(19) United States
(12) Patent Application Publication
(10) Pub. No.: US 2005/0208558 A1
(43) Pub. Date: Sep. 22, 2005

(54) Detection kits, such as nucleic acid arrays, for detecting the expression or 10,000 or more Drosophila genes and uses thereof

(75) Inventors: J. Craig Venter, Rockville, MD (US); Mark Adams, North Potomac, MD (US); Peter W. D. Li, Brookeville, MD (US); Eugene W. Meyers, Silver Spring, MD (US)

Correspondence Address: CELERA GENOMICS;ATTN: WAYNE MONTGOMERY, VICE PRES, INTEL PROPERTY, 45 WEST GUDE DRIVE, C2-4#20, ROCKVILLE, MD, 20850, US

(73) Assignee: APPLERA CORPORATION, Norwalk, CT (US)

(21) Appl. No.: 11/097,143

(22) Filed: Apr. 4, 2005

Related U.S. Application Data
(63) Continuation of application No. 09/614,150, filed on Jul. 11, 2000, now abandoned.
(60) Provisional application No. 60/191,637, filed on Mar. 23, 2000.
(60) Provisional application No. 60/184,831, filed on Feb. 24, 2000.
(60) Provisional application No. 60/175,693, filed on Jan. 12, 2000.
(60) Provisional application No. 60/173,383, filed on Dec. 28, 1999.
(60) Provisional application No. 60/164,769, filed on Nov. 12, 1999.
(60) Provisional application No. 60/161,932.
(60) Provisional application No. 60/160,191, filed on Oct. 19, 1999.
(60) Provisional application No. 60/157,832.

(51) Int. Cl. C12Q 1/68; C12M 1/34

(52) U.S. Cl. 435/6; 435/287.2

(57) ABSTRACT

The present invention is based on the sequencing and assembly of the Drosophila melanogaster genome. The present invention provides the primary nucleotide sequence of a large portion of the Drosophila melanogaster genome in a series of genomic and predicted transcript sequences. This information is provided in the form of sequences and annotation information and can be used to generate nucleic acid detection reagents and kits such a nucleic acid arrays.

### RELATED APPLICATIONS

[0001] The present application claims priority to U.S. Ser. No. 60/157,832, filed Oct. 5, 1999; U.S. Ser. No. 60/160,191, filed Oct. 19, 1999; U.S. Ser. No. 60/161,932, filed Oct. 28, 1999; U.S. Ser. No. 60/164,769, filed Nov. 12, 1999; U.S. Ser. No. 60/173,383, filed Dec. 28, 1999; U.S. Ser. No. 60/175,693, filed Jan. 12, 2000; U.S. Ser. No. 184,831, filed Feb. 24, 2000; U.S. Ser. No. 60/191,637, filed Mar. 23, 2000; and U.S. Ser. No. 09/614,150, filed Jul. 11, 2000.

### FIELD OF THE INVENTION

[0002] The present invention is in the field of genomic discovery systems. The present invention specifically provides portions of the Drosophila melanogaster genome in a form that is commercially useful, including detection kits and reagents such as nucleic acid arrays.

### BACKGROUND OF THE INVENTION

[0003] Prior to the present invention it was estimated that the Drosophila melanogaster genome was 165 Mb, with about 120 Mb of this being euchromatic. The genome is organized in 4 chromosome pairs and was estimated to contain 10,000-12,000 genes. Model organisms, such as Drosophila melanogaster, share many genes with humans whose sequences and functions have been conserved. In addition to myriad similarities in cellular structure and function, humans and Drosophila share pathways for intercellular signaling, developmental patterning, learning and behavior, as well as tumor formation and metastasis. The present invention advances the art by providing the genomic sequence (SEQ ID NO: 1, 4, 7, 10 . . . 43000, 43003, 43006), transcript sequence (SEQ ID NO: 2, 5, 8, 11 . . . 43001, 43004, 43007) and protein coded sequence (SEQ ID NO: 3, 6, 9, 12 . . . 43002, 43005, 43008) for over 11,000 transcripts/genes that had not previously been identified, as well as the 3,000 genes that were known. A total of 14,338 transcripts are provided herein.

[0004] Drosophila studies have provided the widest knowledge base available for any single organism; accordingly, developmental biologists use the fly to identify and characterize the activity of genes with similar functions in higher organisms. Despite its small size, the fly is by no means a small developmental problem. Knowledge of the genes involved in the development of the fly provides, to a reasonable approximation, knowledge of the genes involved in the development of other, more complicated organisms such as the worm, the fish, the mouse, and the human. Developmental biology studies the sequential activation and interaction of genes, in relation to developing morphology. Currently in Drosophila, one can begin with a list of genes active in the egg and follow the morphological changes and gene activation through to adulthood. The genes involved in the development of Drosophila, with few exceptions, are the same as those involved in the development of higher organisms.

[0005] A major goal in the development of insecticides, therapeutics, and pharmaceutical drugs is to understand and elucidate the molecular mechanisms that govern cell signaling and cell-cell interactions in higher eukaryotes. The primary sequence of the Drosophila genome in a usable form would therefore be invaluable in developing human therapeutic targets and insecticide targets. Not only will the system serve as a basis for gene discovery and validation, the system will aid in the understanding of complex genetic mechanisms that control cell differentiation, proliferation, and death.

[0006] Nucleic Acid Arrays and Detection Kits

[0007] Oligonucleotide probes have long been used to detect complementary nucleic acid sequences in a nucleic acid of interest (the “target” nucleic acid) in the form of detection kits/reagents. In some assay formats, the oligonucleotide probe is tethered, i.e., by covalent attachment, to a solid support, and arrays of oligonucleotide probes immobilized on solid supports have been used to detect specific nucleic acid sequences in a target nucleic acid. See, e.g., PCT patent publication Nos. WO 89/10977 and 89/11548. In other formats, the detection reagents are supplied in solution.

[0008] The development of arraying technologies such as photolithographic synthesis of a nucleic acid array and high density spotting of cDNA products has provided methods for making very large arrays of oligonucleotide probes in very small areas. See U.S. Pat. No. 5,143,854 and PCT patent publication Nos. WO 90/15070 and 92/10092. Microfabricated arrays of large numbers of oligonucleotide probes, called “DNA chips” offer great promise for a wide variety of applications.

[0009] The present invention provides nucleic acid arrays and detection kits that are based on the novel sequences of the Drosophila melanogaster genome provided herein.

### SUMMARY OF THE INVENTION

[0010] The present invention is based on the sequencing and assembly of the Drosophila melanogaster genome. The present invention provides the primary nucleotide sequence of a large portion of the Drosophila melanogaster genome in a series of genomic (SEQ ID NO: 1, 4, 7, 10 . . . 43000, 43003, 43006) and predicted transcript sequences (SEQ ID NO: 2, 5, 8, 11 . . . 43001, 43004, 43007: See the Sequence Listing and the Figure Sheets for both the genomic and transcript sequences). This information is provided in the form of sequences and annotation information and can be used to generate nucleic acid detection reagents and kits such a nucleic acid arrays.

[0011] The present invention provides these nucleotide sequences of the Drosophila melanogaster genome, or a representative fragment thereof, in a form that can be used, analyzed, and commercialized. For example, the present invention provides the nucleic acid sequences as contiguous strings of primary sequences in a form readable by computers, such as recorded on computer readable media e.g., magnetic storage media, such as floppy discs, hard disc storage medium, and magnetic tape; optical storage media such as CD-ROM; electrical storage media such as RAM and ROM; and hybrids of these categories such as magnetic/optical storage media. The present invention specifically provides a CD-R that comprises this sequence information (in the form of a Sequence Listing). Such compositions are useful in the discovery of drug and insecticide targets.

[0012] The present invention further provides systems, particularly computer-based systems that contain the primary sequence information of the present invention stored in data storage means. Such systems are designed to identify commercially important fragments of the Drosophila melanogaster genome.

[0013] Another embodiment of the present invention is directed to isolated fragments, and collections of fragments, of the Drosophila melanogaster genome. The fragments of the Drosophila melanogaster genome include, but are not limited to, fragments that encode peptides, hereinafter open reading frames (ORFs) and fragments that modulate the expression of an operably linked ORF, hereinafter expression modulating fragments (EMFs). The ORFs are provided in the Sequence Listing and in the File Drosophila_Genes_Transcripts_Proteins, provided on the accompanying CD labeled CL000728CDA, while the EMFs can be identified as being 5′ to these regions (1 KB of genomic sequence found 5′ of each transcript is provided: discussed in detail below).

[0014] The present invention further includes kits, such as nucleic acid arrays, detection reagents and microfluidic devices, that comprise one or more fragments of the Drosophila melanogaster genome of the present invention, particularly ORFs. The kits, such as arrays, can be used to track the expression of many genes, even all genes, or rationally selected subsets thereof, contained in the Drosophila melanogaster genome.

[0015] The identification of the entire coding set of sequences from the genome of Drosophila melanogaster will be of great value to all laboratories working with this organism and for a variety of commercial purposes. Many fragments of the Drosophila melanogaster genome will be immediately identified by similarity searches against protein and nucleic acid databases and by identifying structural motifs present in protein domains and will be of immediate value to Drosophila melanogaster researchers and for commercial value for the production of proteins or to control gene expression. A specific example concerns secreted proteins, ion channels and G-protein coupled receptors. The biological significance of secreted proteins for controlling cell signaling, differentiation and proliferation is well known. Many of the known human therapeutic proteins have Drosophila melanogaster orthologs. The Drosophila melanogaster genome will serve as a rich source of such therapeutic proteins.

[0016] Further, the development of insecticide targets and therapeutic protein therapeutics and protein targets for human intervention typically involves identifying a protein that can serve as a target for the development of a small molecule modulator. Many classes of proteins are well characterized as suitable pharmaceutical drugs (protein therapeutics or modified forms thereof), drug targets and/or insecticide targets. These include, but are not limited to, secreted proteins, GPCRs and ion channels.

### BRIEF DESCRIPTION OF THE FILES CONTAINED ON CD LABELED CL000728CDA

[0017] File Drosophila_Genes_Transcripts_Proteins.doc provides the results of detailed computer analysis of the Drosophila Genome. The file provides for every identified gene/coding region:
[0018] 1) a genomic fragment spanning the gene, including 1 KB of sequence 5′ of the identified ATG start site and 1 KB of sequence 3′ to the termination site, the predicted exon boundaries and predicted start (ATG) site (SEQ ID NO: 1, 4, 7, 10 . . . 43000, 43003, 43006);
[0019] 2) the predicted transcript sequence of the gene and starting ATG site (SEQ ID NO: 2, 5, 8, 11 . . . 43001, 43004, 43007);
[0020] 3) the predicted protein sequence (SEQ ID NO: 3, 6, 9, 12 . . . 43002, 43005, 43008);
[0021] 4) Whether the sequence of the protein or transcript is known in the art (DNA:+ is known DNA:− is unknown.

[0022] The size of this file is 118,675 KB and is stored as a MSWord document.

[0023] File SEQLIST.TXT provides a copy of the Sequence Listing of the present invention in text (ASCII) format. The file size is 180,628 KB.

### BRIEF DESCRIPTION OF THE FIGURE

[0024] The Figure provides a block diagram of a computer system 102 that can be used to implement the computer-based systems of present invention.

### DETAILED DESCRIPTION OF THE PREFERRED EMBODIMENTS

[0025] The present invention is based on the sequencing and assembly of the Drosophila melanogaster genome. In this process, the primary nucleotide sequence of over three million nucleic acid fragments, from about 400 to about 600 nucleotides in length, was determined. These fragments were assembled using the Celera Assembler. After assembly, the sequences were analyzed with various computer packages and compared with all external data sources. The results of this analysis was the identification of 14336 predicted gene/transcripts contained in the Drosophila genome. The present invention provides the genomic nucleic acid sequences (including 1 Kb 5′ and 1 Kb 3′ of the gene start and stop sites, (SEQ ID NO: 1, 4, 7, 10 . . . 43000, 43003, 43006)), predicted transcript sequences (SEQ ID NO: 2, 5, 8, 11 . . . 43001, 43004, 43007), and predicted amino acid sequences of all of these encoded protein (SEQ ID NO: 3, 6, 9, 12 . . . 43002, 43005, 43008), See File Drosophila_Genes_Transcripts_Proteins.doc, provided on the accompanying CD labeled CL000728CDA.

[0026] The present invention provides the nucleotide sequences of the present invention, or a representative fragment thereof, in a form that can be readily used, analyzed, and interpreted by a skilled artisan. In one embodiment, the sequences are provided as contiguous strings of primary sequence information corresponding to the nucleotide sequences provided in the Figures and/or File Drosophila_Genes_Transcripts_Proteins.doc.

[0027] As used herein, a “representative fragment of the nucleotide sequence provided herein refers to any portion of these sequences that are not presently represented within a publicly available database. Preferred representative fragments of the present invention are Drosophila melanogaster open reading frames and expression modulating fragments (ORFs and EMFs respectively, see below).

[0028] The nucleotide sequence information provided herein was obtained by sequencing the Drosophila melanogaster genome using a shotgun sequencing method known in the art. The nucleotide sequences provided herein are highly accurate, although not necessarily a 100% perfect, representation of the nucleotide sequence of the Drosophila melanogaster genome.

[0029] Using the information provided in herein together with routine cloning and sequencing methods, one of ordinary skill in the art is able to identify, clone and sequence all “representative fragments” of interest including open reading frames (ORFs) encoding a large variety of Drosophila melanogaster proteins. In very rare instances, this may reveal a nucleotide sequence error present in the nucleotide sequence disclosed herein. Thus, once the present invention is made available (i.e., the information in the Sequence Listing and Figures and File Drosophila_Genes_Transcripts_Proteins.doc in a useable form), resolving a rare sequencing error would be well within the skill of the art. Nucleotide sequence editing software is publicly available.

[0030] Even if all of the very rare sequencing errors in the sequences herein disclosed were corrected, the resulting nucleotide sequence would still be at least 90% identical, and more likely 99% identical, and most likely 99.99% identical to the nucleotide sequence provided herein.

[0031] Thus, the present invention further provides nucleotide sequences that are at least 90% identical, or greater, to the nucleotide sequences of the present invention in a form which can be readily used, analyzed and interpreted by the skilled artisan. Methods for determining whether a nucleotide sequence is at least 90% identical to the nucleotide sequence of the present invention are routine and readily available to the skilled artisan. For example, the well known BLAST algorithm can be used to generate the percent identity of nucleotide sequences.

[0032] The present invention further provides a prediction of all of the genes/exons within the Drosophila genome. This information is provided in File Drosophila_Genes_Transcripts_Proteins.doc, provided on the accompanying CD labeled CL000728CDA. The information in this File can be used to generate detection kits, expression arrays, microfluidic devices, individual gene fragments and the like, and in the identification of commercially important genes and gene products (proteins: (SEQ ID NO: 3, 6, 9, 12 . . . 43002, 43005, 43008).

### Computer Related Embodiments

[0033] The nucleotide sequences provided in the present invention, a representative fragment thereof, or nucleotide sequences at least 99% identical to these sequences, may be “provided” in a variety of mediums to facilitate use thereof. As used herein, “provided” refers to a manufacture, other than an isolated nucleic acid molecule, that contains a nucleotide sequence of the present invention, i.e., the nucleotide sequences provided in the present invention, a representative fragment thereof, or nucleotide sequences at least 99% identical to these sequences. Such a manufacture provides the Drosophila melanogaster genome or a subset thereof (e.g., a Drosophila melanogaster open reading frame (ORF)) in a form that allows a skilled artisan to examine the manufacture using means not directly applicable to examining the Drosophila melanogaster genome or a subset thereof as it exists in nature or in purified form.

[0034] In one application of this embodiment, a nucleotide sequence of the present invention can be recorded on computer readable media. As used herein, “computer readable media” refers to any medium that can be read and accessed directly by a computer. Such media include, but are not limited to: magnetic storage media, such as floppy discs, hard disc storage medium, and magnetic tape; optical storage media such as CD-ROM; electrical storage media such as RAM and ROM; and hybrids of these categories such as magnetic/optical storage media. A skilled artisan can readily appreciate how any of the presently known computer readable mediums can be used to create a manufacture comprising computer readable medium having recorded thereon a nucleotide sequence of the present invention. One such medium is provided with the present application, namely, the present application contains computer readable medium (CD-R) that has the sequence contigs provided/recorded thereon in ASCII text format in a Sequence Listing.

[0035] As used herein, “recorded” refers to a process for storing information on computer readable medium. A skilled artisan can readily adopt any of the presently known methods for recording information on computer readable medium to generate manufactures comprising the nucleotide sequence information of the present invention.

[0036] A variety of data storage structures are available to a skilled artisan for creating a computer readable medium having recorded thereon a nucleotide sequence of the present invention. The choice of the data storage structure will generally be based on the means chosen to access the stored information. In addition, a variety of data processor programs and formats can be used to store the nucleotide sequence information of the present invention on computer readable medium. The sequence information can be represented in a word processing text file, formatted in commercially-available software such as WordPerfect and MicroSoft Word, or represented in the form of an ASCII file, stored in a database application, such as OB2, Sybase, Oracle, or the like. A skilled artisan can readily adapt any number of data processor structuring formats (e.g. text file or database) in order to obtain computer readable medium having recorded thereon the nucleotide sequence information of the present invention.

[0037] By providing the nucleotide sequences of the present invention, a representative fragment thereof, or nucleotide sequences at least 99% identical to these sequences, in computer readable form, a skilled artisan can routinely access the sequence information for a variety of purposes. Computer software is publicly available which allows a skilled artisan to access sequence information provided in a computer readable medium. The examples which follow demonstrate how software which implements the BLAST (Altschul et at, J. Mol. Biol. 215:403-410 (1990)) and BLAZE (Brutlag et at, Comp. Chem. 17:203-207 (1993)) search algorithms on a Sybase system was used to identify open reading frames (ORFs) within the Drosophila melanogaster genome which contain homology to ORFs or proteins from other organisms. Such ORFs are protein-encoding fragments within the Drosophila melanogaster genome and are useful in producing commercially important proteins such as proteins used as drug or insecticide targets.

[0038] The present invention further provides systems, particularly computer-based systems, which contain the sequence information described herein. Such systems are designed to identify commercially important fragments of the Drosophila melanogaster genome.

[0039] As used herein, ‘a computer-based system” refers to the hardware means, software means, and data storage means used to analyze the nucleotide sequence information of the present invention. The minimum hardware means of the computer-based systems of the present invention comprises a central processing unit (CPU), input means, out-put means, and data storage means. A skilled artisan can readily appreciate that any one of the currently available computer-based system are suitable for use in the present invention. Such system can be changed into a system of the present invention by utilizing the sequence information provided on the CD-R, or a subset thereof without any experimentation.

[0040] As stated above, the computer-based systems of the present invention comprise a data storage means having stored therein a nucleotide sequence of the present invention and the necessary hardware means and software means for supporting and implementing a search means. As used herein, “data storage means” refers to memory which can store nucleotide sequence information of the present invention, or a memory access means which can access manufactures having recorded thereon the nucleotide sequence information of the present invention.

[0041] As used herein, “search means” refers to one or more programs that are implemented on the computer-based system to compare a target sequence or target structural motif with the sequence information stored within the data storage means. Search means are used to identify fragments or regions of the Drosophila melanogaster genome which match a particular target sequence or target motif. A variety of known algorithms are disclosed publicly and a variety of commercially available software for conducting search means are available and can be used in the computer-based systems of the present invention. Examples of such software includes, but is not limited to, MacPattern (EMBL), BLASTN and BLASTX (NCBIA). A skilled artisan can readily recognize that any one of the available algorithms or implementing software packages for conducting homology searches can be adapted for use in the present computer-based systems.

[0042] As used herein, a “target sequence” can be any DNA or amino acid sequence of six or more nucleotides or two or more amino acids. A skilled artisan can readily recognize that the longer a target sequence is, the less likely a target sequence will be present as a random occurrence in the database. The most preferred sequence length of a target sequence is from about 10 to 100 amino acids or from about 30 to 300 nucleotide residues. However, it is well recognized that searches for commercially important fragments of the Drosophila melanogaster genome, such as sequence fragments involved in gene expression and protein processing, may be of shorter length.

[0043] As used herein, “a target structural motif,” or “target motif,” refers to any rationally selected sequence or combination of sequences in which the sequence(s) is chosen based on a three-dimensional configuration which is formed upon the folding of the target motif. There are a variety of target motifs known in the art. Protein target motifs include, but are not limited to, enzymatic active sites and signal sequences. Nucleic acid target motifs include, but are not limited to, promoter sequences, hairpin structures and inducible expression elements (protein binding sequences).

[0044] A variety of structural formats for the input and output means can be used to input and output the information in the computer-based systems of the present invention. A preferred format for an output means ranks fragments of the Drosophila melanogaster genome possessing varying degrees of homology to the target sequence or target motif. Such presentation provides a skilled artisan with a ranking of sequences which contain various amounts of the target sequence or target motif and identifies the degree of homology contained in the identified fragment.

[0045] A variety of comparing means can be used to compare a target sequence or target motif with the data storage means to identify sequence fragments of the Drosophila melanogaster genome. In the present examples, implementing software which implement the BLAST and BLAZE algorithms (Altschul et al., J Mol. Biol. 215:403-410 (1990)) was used to identify open reading frames within the Drosophila melanogaster genome. A skilled artisan can readily recognize that any one of the publicly available homology search programs can be used as the search means for the computer-based systems of the present invention.

[0046] One application of this embodiment is provided in the figure. The figure provides a block diagram of a computer system 102 that can be used to implement the present invention. The computer system 102 includes a processor 106 connected to a bus 104. Also connected to the bus 104 are a main memory 108 (preferably implemented as random access memory, RAM) and a variety of secondary storage devices 110, such as a hard drive 112 and a removable medium storage device 114. The removable medium storage device 114 may represent, for example, a floppy disk drive, a CD-ROM drive, a magnetic tape drive, etc—A removable storage medium 116 (such as a floppy disk, a compact disk, a magnetic tape, etc.) containing control logic and/or data recorded therein may be inserted into the removable medium storage device 114. The computer system 102 includes appropriate software for reading the control logic and/or the data from the removable medium storage device 114 once inserted in the removable medium storage device 114.

[0047] The nucleotide sequences of the present invention may be stored in a well known manner in the main memory 108, any of the secondary storage devices 110, and/or a removable storage medium 116. Software for accessing and processing the genomic sequence (such as search tools, comparing tools, etc.) reside in main memory 108 during execution.

### Biochemical Embodiments

[0048] Nucleic Acid Fragments

[0049] Another embodiment of the present invention is directed to isolated fragments of the Drosophila melanogaster genome. The fragments of the Drosophila melanogaster genome of the present invention include, but are not limited to, fragments that encode peptides, hereinafter open reading frames (ORFs) and fragments which modulate the expression of an operably linked ORF. Some of these fragments are identified and described in File Drosophila_Genes_Transcripts_Proteins.doc, provided on the accompanying CD labeled CL000728CDA. The isolated nucleic acid molecules of the present invention include, but are not limited to single stranded and double stranded DNA, and single stranded RNA.

[0050] As used herein, an “isolated nucleic acid molecule” or an “isolated fragment of the Drosophila melanogaster genome” refers to a nucleic acid molecule possessing a specific nucleotide sequence which has been subjected to purification means to reduce, from the composition, the number of compounds which are normally associated with the composition. A variety of purification means can be used to generated the isolated fragments of the present invention. These include, but are not limited to methods that separate constituents of a solution based on charge, solubility, or size.

[0051] In one embodiment, Drosophila melanogaster DNA can be mechanically sheared to produce fragments of about 2 kb, 10 kb, or 15-20 kb in length. These fragments can then be used to generate a Drosophila melanogaster library by inserting them into plasmid vectors (or lambda vectors) using methods well known in the art. Primers flanking, for example an ORF, can then be generated using nucleotide sequence information provided in the present invention. PCR cloning can then be used to isolate the ORF from the Drosophila DNA library. PCR cloning is well known in the art. Thus, given the availability of the present identified gene coding sequences of the Drosophila genome, it is routine experimentation to isolate any ORF, or other fragment of the assembly of the present invention, particularly using the information provided in File Drosophila_Genes_Transcripts_Proteins.doc, provided on the accompanying CD labeled CL000728CDA. Particularly useful is the generation of nucleic acid fragments comprising one or more exons of a gene, particularly those identified herein. Such fragments can be applied to an array, microfluidic device or other detection kit format and used to detect expression of a gene (see below).

[0052] As used herein, an “open reading frame,” ORF, means a series of triplets coding for amino acids without any termination codons and is a sequence translatable into protein. A skilled artisan can readily identify ORFs in the Drosophila melanogaster genome using the gene coding sequences provided herein and/or the computer-based systems of the present invention.

[0053] As used herein, an “expression modulating fragment,” EMF, means a series of nucleotide molecules which modulates the expression of an operably linked ORF or EMF.

[0054] As used herein, a sequence is said to “modulate the expression of an operably linked sequence” when the expression of the sequence is altered by the presence of the EMF. EMFs include, but are not limited to, promoters, and promoter modulating sequences (inducible elements). One class of EMFs are fragments which induce the expression or an operably linked ORF in response to a specific regulatory factor or physiological event.

[0055] EMF sequences can be identified within the Drosophila melanogaster genome by their proximity to the ORFs identified using the computer system of the present invention. An intergenic segment, or a fragment of the intergenic segment, from about 10 to 200, 10 to 500 or 10 to 1 kB nucleotides in length, taken 5′ from any one of the ORFs identified in File Drosophila_Genes_Transcripts_Proteins.doc, provided on the accompanying CD labeled CL000728CDA, will modulate the expression of an operably linked 3′ORF in a fashion similar to that found with the naturally linked ORF sequence. As used herein, an “intergenic segment” refers to the fragments of the Drosophila genome which are between two ORF(G) herein described. Alternatively, EMFs can be identified using known EMFs as a target sequence or target motif in the computer-based systems of the present invention.

[0056] The presence and activity of an EMF can be confirmed using an EMF trap vector. An EMF trap vector contains a cloning site 5′ to a marker sequence. A marker sequence encodes an identifiable phenotype, such as antibiotic resistance or a complementing nutrition auxotrophic factor, which can be identified or assayed when the EMF trap vector is placed within an appropriate host under appropriate conditions. As described above, an EMF will modulate the expression of an operably linked marker sequence. A more detailed discussion of various marker sequences is provided below.

[0057] A sequence which is suspected as being an EMF is cloned in all three reading frames in one or more restriction sites upstream from the marker sequence in the EMF trap vector. The vector is then transformed into an appropriate host using known procedures and the phenotype of the transformed host in examined under appropriate conditions. As described above, an EMF will modulate the expression of an operably linked marker sequence.

[0058] The sequences falling within the scope of the present invention are not limited to the specific sequences herein described, but also include allelic and species variations thereof. Allelic and species variations can be routinely determined by comparing the sequence provided in the present invention, or a representative fragment thereof, with a sequence from another isolate of the same species. Furthermore, to accommodate codon variability, the invention includes nucleic acid molecules coding for the same amino acid sequences as do the specific ORFs disclosed herein. In other words, in the coding region of an ORF, substitution of one codon for another that encodes the same amino acid is expressly contemplated.

[0059] Any specific sequence disclosed herein can be readily screened for errors by resequencing a particular fragment, such as an ORF, in both directions (i.e., sequence both strands). Alternatively, error screening can be performed by sequencing correspond polynucleotides of Drosophila melanogaster origin isolated by using part or all of the fragments in question as a probe or primer.

[0060] Each of the ORFs of the Drosophila melanogaster genome that can be routinely identified using the computer system of the present invention can be used in numerous ways as polynucleotide reagents. The sequences can be used as diagnostic probes or diagnostic amplification primers to detect the expression of a particular gene or groups of genes. This is particularly useful in the form of nucleic acid arrays where 100 or more, 1000 or more, 5000 or more, or even most to all of the ORFs in a single array.

[0061] “Nucleotide sequence” refers to a heteropolymer of deoxyribonucleotides. Generally, DNA segments encoding the polypeptides and proteins provided by this invention are assembled from fragments of the Drosophila melanogaster genome or single nucleotides, short oligonucleotide linkers, or from a series of oligonucleotides, to provide a synthetic nucleic acid molecule.

[0062] Nucleic Acid Arrays and Detection Reagents

[0063] The present invention further provides detection reagents, such as arrays or microarrays, of nucleic acid molecules that are based on the sequence information provided in the present invention and particularly the transcript information (SEQ ID NO: 2, 5, 8, 11 . . . 43001, 43004, 43007) provided in File Drosophila_Genes_Transcripts_Proteins.doc, provided on the accompanying CD labeled CL000728CDA.

[0064] As used herein “Arrays” or “Microarrays” refers to an array of distinct polynucleotides or oligonucleotides synthesized on a substrate, such as paper, nylon or other type of membrane, filter, chip, glass slide, or any other suitable solid, or semi-solid support. In one embodiment, the microarray is prepared and used according to the methods described in U.S. Pat. No. 5,837,832, Chee et al., PCT application W095/11995 (Chee et al.), Lockhart, D. J. et al. (1996; Nat. Biotech. 14: 1675-1680) and Schena, M. et al. (1996; Proc. Natl. Acad. Sci. 93: 10614-10619), all of which are incorporated herein in their entirety by reference. In other embodiments, such arrays are produced by the methods described by Brown et. al., U.S. Pat. No. 5,807,522.

[0065] The microarray or detection kit is preferably composed of a large number of unique, single-stranded nucleic acid sequences, usually either synthetic antisense oligonucleotides or fragments of cDNAs, fixed to a solid support. The oligonucleotides are preferably about 6-60 nucleotides in length, more preferably 15-30 nucleotides in length, and most preferably about 20-25 nucleotides in length. For a certain type of microarray or detection kit, it may be preferable to use oligonucleotides that are only 7-20 nucleotides in length. For others, such as cDNA, longer lengths are possible and preferable. These can be of the order of 1 kb or more.

[0066] The microarray or detection kit may contain oligonucleotides that cover the known 5′, or 3′, sequence, sequential oligonucleotides which cover the full length sequence; or unique oligonucleotides selected from particular areas along the length of the sequence. Polynucleotides used in the microarray or detection kit may be oligonucleotides that are specific to a gene or genes of interest.

[0067] In order to produce oligonucleotides to a known sequence for a microarray or detection kit, the gene(s) of interest (or an ORF identified from the contigs of the present invention) is typically examined using a computer algorithm which starts at the 5′ or at the 3′ end of the nucleotide sequence. Typical algorithms will then identify oligomers of defined length that are unique to the gene, have a GC content within a range suitable for hybridization, and lack predicted secondary structure that may interfere with hybridization. In certain situations it may be appropriate to use pairs of oligonucleotides on a microarray or detection kit. The “pairs” will be identical, except for one nucleotide that preferably is located in the center of the sequence. The second oligonucleotide in the pair (mismatched by one) serves as a control. The number of oligonucleotide pairs may range from two to one million. The oligomers are synthesized at designated areas on a substrate using a light-directed chemical process. The substrate may be paper, nylon or other type of membrane, filter, chip, glass slide or any other suitable solid support.

[0068] In another aspect, an oligonucleotide may be synthesized on the surface of the substrate by using a chemical coupling procedure and an ink jet application apparatus, as described in PCT application W095/251116 (Baldeschweiler et al.) which is incorporated herein in its entirety by reference. In another aspect, a “gridded” array analogous to a dot (or slot) blot may be used to arrange and link cDNA fragments or oligonucleotides to the surface of a substrate using a vacuum system, thermal, UV, mechanical or chemical bonding procedures. An array, such as those described above, may be produced by hand or by using available devices (slot blot or dot blot apparatus), materials (any suitable solid support), and machines (including robotic instruments), and may contain 8, 24, 96, 384, 1536, 6144 or more oligonucleotides, or any other number between two and one million which lends itself to the efficient use of commercially available instrumentation.

[0069] In other embodiments, the array or detection reagent/kit can be produced by spotting cDNA or other nucleic acid molecule onto the surface of a substrate (See Brown et. al., U.S. Pat. No. 5,807,522). In such use, PCR primers to one or more exons is used to generate a nucleic acid molecule suitable for deposition onto a substrate.

[0070] In order to conduct sample analysis using a microarray or detection kit, the RNA or DNA from a biological sample is made into hybridization probes. The mRNA is isolated, and cDNA is produced and used as a template to make antisense RNA (aRNA). The aRNA is amplified in the presence of fluorescent nucleotides, and labeled probes are incubated with the microarray or detection kit so that the probe sequences hybridize to complementary oligonucleotides of the microarray or detection kit. Incubation conditions are adjusted so that hybridization occurs with precise complementary matches or with various degrees of less complementarity. After removal of nonhybridized probes, a scanner is used to determine the levels and patterns of fluorescence. The scanned images are examined to determine degree of complementarity and the relative abundance of each oligonucleotide sequence on the microarray or detection kit. The biological samples may be obtained from any bodily fluids (such as blood, urine, saliva, phlegm, gastric juices, etc.), cultured cells, biopsies, or other tissue preparations. A detection system may be used to measure the absence, presence, and amount of hybridization for all of the distinct sequences simultaneously. This data may be used for large scale correlation studies on the sequences, expression patterns, mutations, variants, or polymorphisms among samples.

[0071] Using such arrays, the present invention provides methods to identify the expression of one or more of the ORFs of the present invention. In detail, such methods comprise incubating a test sample with one or more nucleic acid molecules and assaying for binding of the nucleic acid molecule with components within the test sample. Such assays will typically involve arrays comprising most, if not all of the genes in the Drosophila genome, or rationally selected subsets thereof. The genes/transcript (genomic sequences: (SEQ ID NO: 1, 4, 7, 10 . . . 43000, 43003, 43006); transcript sequences: SEQ ID NO: 2, 5, 8, 11 . . . 43001, 43004, 43007) found in the Drosophila genome of the present invention are provided in File Drosophila_Genes_Transcripts_Proteins.doc provided on the accompanying CD labeled CL000728CDA.

[0072] Conditions for incubating a nucleic acid molecule with a test sample vary. Incubation conditions depend on the format employed in the assay, the detection methods employed, and the type and nature of the nucleic acid molecule used in the assay. One skilled in the art will recognize that any one of the commonly available hybridization, amplification or array assay formats can readily be adapted to employ the novel fragments of the Drosophila melanogaster genome disclosed herein. Examples of such assays can be found in Chard, T, An Introduction to Radioimmunoassay and Related Techniques, Elsevier Science Publishers, Amsterdam, The Netherlands (1986); Bullock, G. R. et al., Techniques in Immunocytochemistry, Academic Press, Orlando, Fla. Vol. 1 (1982), Vol. 2 (1983), Vol. 3 (1985); Tijssen, P., Practice and Theory of Enzyme Immunoassays: Laboratory Techniques in Biochemistry and Molecular Biology, Elsevier Science Publishers, Amsterdam, The Netherlands (1985).

[0073] The test samples of the present invention include cells, protein or membrane extracts of cells. The test sample used in the above-described method will vary based on the assay format, nature of the detection method and the tissues, cells or extracts used as the sample to be assayed. Methods for preparing nucleic acid extracts or of cells are well known in the art and can be readily be adapted in order to obtain a sample that is compatible with the system utilized.

[0074] In another embodiment of the present invention, kits are provided which contain the necessary reagents to carry out the assays of the present invention.

[0075] Specifically, the invention provides a compartmentalized kit to receive, in close confinement, one or more containers which comprises: (a) a first container comprising one of the nucleic acid molecules that can bind to a fragment of the Drosophila melanogaster genome disclosed herein; and (b) one or more other containers comprising one or more of the following: wash reagents, reagents capable of detecting presence of a bound nucleic acid. Preferred kits will include detection reagents/arrays/chips/microfluidic devices that are capable of detecting the expression of 1 or more, 10 or more, 100 or more, or 500 or more, 1000 or more, 10,000 or more, or all of the genes expressed in Drosophila, particularly the genes/exons provided in File Drosophila_Genes_Transcripts_Proteins.doc, provided on the accompanying CD labeled CL000728CDA.

[0076] In detail, a compartmentalized kit includes any kit in which reagents are contained in separate containers. Such containers include small glass containers, plastic containers, strips of plastic, glass or paper, or arraying material such as silica. Such containers allows one to efficiently transfer reagents from one compartment to another compartment such that the samples and reagents are not cross-contaminated, and the agents or solutions of each container can be added in a quantitative fashion from one compartment to another. Such containers will include a container which will accept the test sample, a container which contains the nucleic acid probe, containers which contain wash reagents (such as phosphate buffered saline, Tris-buffers, etc.), and containers which contain the reagents used to detect the bound probe. One skilled in the art will readily recognize that the previously unidentified ORFs that can be routinely identified using the sequence information disclosed herein can be readily incorporated into one of the established kit formats which are well known in the art, particularly expression arrays.

[0077] All publications and patents mentioned in the above specification are herein incorporated by reference. Various modifications and variations of the described method and system of the invention will be apparent to those skilled in the art without departing from the scope and spirit of the invention. Although the invention has been described in connection with specific preferred embodiments, it should be understood that the invention as claimed should not be unduly limited to such specific embodiments. Indeed, various modifications of the above-described modes for carrying out the invention which are obvious to those skilled in the field of molecular biology or related fields are intended to be within the scope of the following claim.

1) An isolated nucleic acid detection reagent that is capable of detecting the presence of 1000 or more genes from Drosophila, wherein said genes are selected from the group consisting of SEQ ID NOS:1, 2, 4, 5, 7, 8, 10, 11 . . . 43006, and 43007.

2) The detection reagent of claim 1, wherein said reagent is a nucleic acid array.

3) The array of claim 2, wherein said array is comprised of short oligonucleotides from about 5 to about 100 nucleotides in length.

4) The array of claim 2, wherein said array is comprised of polynucleotides based on the transcript sequences (SEQ ID NO: 2, 5, 8, 11 . . . 43001, 43004, 43007), wherein said polynucleotides are from about 100 to about 1000 nucleotides in length.

5) An isolated nucleic acid detection reagent that is capable of detecting the presence of 2000 or more genes from Drosophila, wherein said genes are selected from the group consisting of SEQ ID NOS:1, 2, 4, 5, 7, 8, 10, 11 . . . 43006, and 43007.

6) The detection reagent of claim 5, wherein said reagent is a nucleic acid array.

7) The array of claim 6, wherein said array is comprised of short oligonucleotides from about 5 to about 100 nucleotides in length.

8) The array of claim 6, wherein said array is comprised of polynucleotides based on the transcript sequences (SEQ ID NO: 2, 5, 8, 11 . . . 43001, 43004, 43007), wherein said polynucleotides are from about 100 to about 1000 nucleotides in length.

9) An isolated nucleic acid detection reagent that is capable of detecting the presence of 5000 or more genes from Drosophila, wherein said genes are selected from the group consisting of SEQ ID NOS:1, 2, 4, 5, 7, 8, 10, 11 . . . 43006, and 43007.

10) The detection reagent of claim 9, wherein said reagent is a nucleic acid array.

11) The array of claim 10, wherein said array is comprised of short oligonucleotides from about 5 to about 100 nucleotides in length.

12) The array of claim 10, wherein said array is comprised of polynucleotides based on the transcript sequences (SEQ ID NO: 2, 5, 8, 11 . . . 43001, 43004, 43007), wherein said polynucleotides are from about 100 to about 1000 nucleotides in length.

13) An isolated nucleic acid detection reagent that is capable of detecting the presence of 10,000 or more genes from Drosophila, wherein said genes are selected from the group consisting of SEQ ID NOS:1, 2, 4, 5, 7, 8, 10, 11 . . . 43006, and 43007.

14) The detection reagent of claim 13, wherein said reagent is a nucleic acid array.

15) The array of claim 14, wherein said array is comprised of short oligonucleotides from about 5 to about 100 nucleotides in length.

16) The array of claim 15, wherein said array is comprised of polynucleotides based on the transcript sequences (SEQ ID NO: 2, 5, 8, 11 . . . 43001, 43004, 43007), wherein said polynucleotides are from about 100 to about 1000 nucleotides in length.

The application's sequence listing, which the Patent Office published only in electronic form, follows.

SEQUENCE LISTING (43008 sequences)

SEQ ID NO: 1 - DNA, 2397 bp, DROSOPHILA
aagtgaagccaagtgaaaatgaaaacaaagtttaacaaaccgtggctaacgagctacattattaaaacttcaaaaatgcataaatttgccgaagacgaatggagcgaactgcagactgcggcattataataatataatgcatatcctgggcaggcatttgaaagttattgacacctcctcctctgctcaccgctctacctactcccatcacccaacagccggtaaaactcgtgacgtgatcggttttgaggcacctacgaaggagagtgttgcaacacaggccaggttccacaaaagctgcacgatctgggcactgggcacccactccccaatccacaatccccaaccccactctccattccaatcctagcttcaatcccagcccaactggaactgcggatcgagttcgcgactcggctgccaagtgattctgcgcatattagttggccattaggcgcacaccattgtcagctgtgaacggcagtcgaaagcgcattaaaattcagacggtgttaaatattacaagcgccccctgttgcagaaaaggggaaaaggtttcgcgctgatttgcagctgccactcaagaggttttttggagggggtggtgctgcagatcgcgtaggagcttgtgaaacgtattggcgacgtgatatgttaatctttcaggcgaaaacgtggagcgttttggatgcggatgtttggcagacagaaaagcacttgtcggttagacatggttggaaatgaagattcctccttttttgatccaatgaatgcaatataatactttttttgggttttacgaaaagcgttcacttatcttagcacttcgctttcattgcagactggactcactaaatatgtatcttagctttataggaaacatttttccgcaatagtttatgctcttcaaaggctttcagttggtaatagcaatcgtccaactgaaaactttatttaatacttgtgtggcaattataaacagcataatatgtgctaaatgctaaccctttatgttaagaaaagtatctttggcattctgaaccaccaaaacggtgatcttggcatctggtgtaatgagcacctcgtgatacttggtacgaactctcagtagagtcaaattttgggctggctccattttggagaggaacgcctggcacttctcccgcaaattgtcatatagacaggcgtactgcaagccctcctgacgatccatcgaggttttcaccggcacacccgagtgattcatgatcaatatgtcctccacgccgggtttctcctgcactttgcgaaatacttcttccacgtaacttttagttcgctttggctgcgtaaagtttaactatcagttaggatgtaaatacatttaacatacttacatctgtctctgcttcctgcattttgcctacagttttttttaaacgtccaccaaatgtacttttagttataaattttctaagtcagtaactgcttgggttgcttaaatttgagtttatgggtatgacattaatgtattggagtaccttgaattgattgtagttacactcgagtaaaatcgcagtaattgcgcaccgttattagtatccagccagaagcaaagtttaataaattccttgggtatcatcctgtgacgtcataatcacgggcattagatgatttagtcggatgccaagcagggccaaattaggcgggagttatttgccaaagcgggctgtaagtctatggccaactctaatcgtctcctaactcagctgccaagcatcatggacggcccactttcgaggcgcgctcccagagcataaagtgcaattatagcggtgcagcgaggagcagggccatgaaataccaacacccgacagctgtaaacaacaatttgccgggcggccggccataagtgcatctcgcatctgagaccaaatgccaataactcgccgtgcgagagcgcttataaaaaagttatttaaaagcccagccaactcggctggagtccaagagccaaactcaagccaatctcaagccaggccaaaccaagccaatccaagccaacaatggcaaatgatgatgagacgtccagtcgtttcacgttaaacgctaagcgtttcggcaaacgcgcaaaaagttagacggtgccaaggagccgacttcactcaagacgagttgaggatggaaacttgaatgaaaatacctcgaacaggagaagcgaacgtaatgagcaaatttatggtcaattgataatttagaggcattcggtatcatcaataatggacccaaccgctgtggctctggatcgaagatgaggcattgttattgttaccaatgtggcgcaaattgtgctaaatgtttcggcagaccctacgcactcgcacatgaaatatatttatgcgagcatcttaaaggggc

SEQ ID NO: 2 - DNA, 345 bp, DROSOPHILA
atgcaggaagcagagacagatccaaagcgaactaaaagttacgtggaagaagtatttcgcaaagtgcaggagaaacccggcgtggaggacatattgatcatgaatcactcgggtgtgccggtgaaaacctcgatggatcgtcaggagggcttgcagtacgcctgtctatatgacaatttgcgggagaagtgccaggcgttcctctccaaaatggagccagcccaaaatttgactctactgagagttcgtaccaagtatcacgaggtgctcattacaccagatgccaagatcaccgttttggtggttcagaatgccaaagatacttttcttaacataaagggttag

SEQ ID NO: 3 - protein, 114 aa, DROSOPHILA
MQEAETDPKRTKSYVEEVFRKVQEKPGVEDILIMNHSGVPVKTSMDRQEGLQYACLYDNLREKCQAFLSKMEPAQNLTLLRVRTKYHEVLITPDAKITVLVVQNAKDTFLNIKG

SEQ ID NO: 4 - DNA, 4064 bp, DROSOPHILA
ccaccgatgccagctcgcagatcgcagctcccaggaccccacttggcgcaagttttcggacccgctgcactcctcgatggcggcactgagctccagttgggtcatatgctcatttgtgtgcatgacgcactgacctgtttctaatgcaacaaaaacgttaagcgcctgccagccactcgcagtgcagtcaactgtgtcctcttggctcagagagcacagccacccacccacttgagcgccccaaatcccatacacccgtatacccagctccacccaacttggccatgttctttggtgcctcgcagccgtagcatacttttttacgctgtctgccggagagtttattttacgcacgccttgaccagacgacggaggcggatgcagccttccactttgcactccgcaggcaagtggaaaagtcaagcggataaacaagagattaaaatgtcataaacaatgctttttgccactccggccaagcaacttaatgaaagccgggaaaatgggtttcctccgctgcagctgcaaagtttcaacttcaagtttggatctgaaagcggagtatctctcgaaactcctgtcgatgcaactcaataaatttccattaaacttttgatttgtttccatgactttttccgccctgcaagaccagagaattcaattgaaattgtttccaaaacaagctacacaaaaagttgttaacaactatttgaatgccagccaataaatgggtcttttgcctatgtgactatattgtaattcctaatcaaaatcggagtcggagagacaataataaggctatatgcacatactttatcttaagctgaaaaacttgtgaattattacatcgaaatcttcaaaagattgatcaagcagtatgttccaaatattttttattatcgttatagttacgtttccattattacgaacatttaaaatatttatttgcaggtaagggcatagaaccatcgacttctcgaaagtaaaaacttttcatttgtaacacaattgaaaaaaactttattttcgttgggcctgcgaacaacaggagggttgcacaaatgacaaactatcatacagaggcataaattagtctcgcatatttgcgccaaacaagaaactataaaacacttagatatacttcggattagatttactgcccatgtgcacacacacacacgcgcgcgctcttaaacacacacacacatgtgcgtcttttaaagttccttcgataaacgacatttaggggctattctaaatgaaatactggatgctgcgtcggtgcaagcaaaacctcaggcaatttgtcggcgacaagaatcagcaacgctgtgatgctgaacgtaaactgatccttggcggcgaaaattacggatacgatacaaattgtgaggactaatttcccggttatgtgttatgtgtaatgcgtgtacggtattaagtattgattcgttaacatatacatgtggatagactgaaggaataaaggaatgaatattgagtgcgcattgaacaatcaaataaggtgtgaaccgatgatgtaggcggtttactcggcggcggcattgatggtgatagtcttgcccttgggatcgtcgaagcggtccatcgtgttgatgtccatcatccagcagacgccgacgaacatgatgaccagcagtagggcgaccacaaacagtcccatcaggataccgggcgtcacgaagcccacacagtcccaggagtcgccgaagggaaagtcctccttgtacgtaccatcgaagggagcctgcagctgcagggacttgaagctcagggtgttgtacatgttgttgacggccgcggactcgagggtgaggttgccgcacgagtaagagaacgtggttggggcattcacgccgctggagcggaagttgttgttgtcgtagaccaaattgctcagactaaagtatccgccattataaacaacgtcaaaggtgattggcttgtcggcgacagatgtgtccataacaacggatagcttggtagagctagagttggtgagcttgaggtcggtgacggtgatggggttgccgttgtagagcagggcagtgtagaagatctgaaactgattggtcgacttccacatgatgccaccggttgtggcggcggtgtcacggcgggtacgacgctgcaccacaggagccgtggagggggcggccaggtacagataagccaccttgcactcgaactgcttgctgatagcagctatggcggcgtctaaatgtgttaaatcattgttaaattagtgtgtcttattgacgcctttgtagtacgttattgttgacccaccatgtgactccagactggcctcccggctctcggcggcgtcctcgaaggtcacaaacagggccgtacctacggcacacttggccggcgtggtcagctttccactggcatcgatggagttgtgctcgcgcttggcggccactgagcgcagtgcctccgaggggttctccacgctggtgtagtaggtcttggggctcactccctgcagctgggcgtagcaggactgcgcctgggagttggagcacaggaagtccttgctgctcagctgagttggggaacaaacacatgtgtcacaagccctagctatctaagtgggttctcaagcacttacgccattttcctcgaaggccacgaccatgtgatcttccagcaatgcagccaactgctcggcaaactccacttgggacaccgtcttcagggagggtttcgccacactgtgaaaaaaggaggaaggcactcgttacactcacattcaactggtgcaggcgctcacccacctgttggctccccacaaaaagacgggcgtttgctccgccacggcagccccaatgacgcacaacgcaatcagcgatttccacaacatcgcgctggattcgcttacttcggtgggggtttaatggaaacaaaggagaacgaaaaatgcataagtaaggaaccaaggagaacgcaagaggcactaaaaaccaaccgaaaagtgaactgaaactacaaacgaaaaatggtggtgaaaattttcgctttgccttgctcgacgtcgcctattccagtgagaaaaaaaaccttatgacggtcatgtgatgcgcaccagctgaccgcagtgctgtctaaaaataccaaaagcgtgagattaggaaaatactagaaaaaaattattcgactctgagagcatttagtaaagcctaattggatatttgcaccaggaactgacattaactgggtttcttttcaaaattaatacttataagaaagtatagtttgtcaaataaggttcatatcttcggtgtccaattagcgcagtcacacacctttccagctggaaactgtcaacggaaccggttccgttaattccacatgttgattctttaaaacccgtatgttctatttcgcactgcttactaatagtttaattaaatatctaaagaaattcgggttttatactgattgcttttataagctcgatttgaaccgagtttttatttcagtctttccagttagtaattttacgcagttctagcacggccacactgtcccgcaggaaaacaatgtttgttatgattttactgcgggaattgtgtgtgaaatgtgccatttgaggacctgagaatgcgattacgccgccgttggccgcgaaggatgcggcgtgccatggaacaactgcgtctccagtcccgccggaagctgctggcgctcacgagtgagttaccttgctcaccagccccattacttaactaatgttctttttttttcaattttagtgactggaggactctgcctggctatctgggtagttgccaactatctgtccgcatcggaggagggccaaaccggcggcttcagcagcgcctgcactgccatcgatgcggtttacacgtgggtcaatggctcggatcccaactttattgaggacatccggcgattcgatgacaagtacgatccctcgcggttcgatgacaagaatgagctgcggtactctctgaggtccctggaaaaacacgccgcatggatcaggcatgtgtacatagtaaccaatggccaga

SEQ ID NO: 5 - DNA, 1863 bp, DROSOPHILA
cgacgtcgagcaaggcaaagcgaaaattttcaccaccatttttcgtttgtagtttcagttcacttttcggttggtttttagtgcctcttgcgttctccttggttccttacttatgcatttttcgttctcctttgtttccattaaacccccaccgaagtaagcgaatccagcgcgatgttgtggaaatcgctgattgcgttgtgcgtcattggggctgccgtggcggagcaaacgcccgtctttttgtggggagccaacagtgtggcgaaaccctccctgaagacggtgtcccaagtggagtttgccgagcagttggctgcattgctggaagatcacatggtcgtggccttcgaggaaaatggcctgagcagcaaggacttcctgtgctccaactcccaggcgcagtcctgctacgcccagctgcagggagtgagccccaagacctactacaccagcgtggagaacccctcggaggcactgcgctcagtggccgccaagcgcgagcacaactccatcgatgccagtggaaagctgaccacgccggccaagtgtgccgtaggtacggccctgtttgtgaccttcgaggacgccgccgagagccgggaggccagtctggagtcacatgacgccgccatagctgctatcagcaagcagttcgagtgcaaggtggcttatctgtacctggccgccccctccacggctcctgtggtgcagcgtcgtacccgccgtgacaccgccgccacaaccggtggcatcatgtggaagtcgaccaatcagtttcagatcttctacactgccctgctctacaacggcaaccccatcaccgtcaccgacctcaagctcaccaactctagctctaccaagctatccgttgttatggacacatctgtcgccgacaagccaatcacctttgacgttgtttataatggcggatactttagtctgagcaatttggtctacgacaacaacaacttccgctccagcggcgtgaatgccccaaccacgttctcttactcgtgcggcaacctcaccctcgagtccgcggccgtcaacaacatgtacaacaccctgagcttcaagtccctgcagctgcaggctcccttcgatggtacgtacaaggaggactttcccttcggcgactcctgggactgtgtgggcttcgtgacgcccggtatcctgatgggactgtttgtggtcgccctactgctggtcatcatgttcgtcggcgtctgctggatgatggacatcaacacgatggaccgcttcgacgatcccaagggcaagactatcaccatcaatgccgccgccgagtaaaccgcctacatcatcggttcacaccttatttgattgttcaatgcgcactcaatattcattcctttattccttcagtctatccacatgtatatgttaacgaatcaatacttaataccgtacacgcattacacataacacataaccgggaaattagtcctcacaatttgtatcgtatccgtaattttcgccgccaaggatcagtttacgttcagcatcacagcgttgctgattcttgtcgccgacaaattgcctgaggttttgcttgcaccgacgcagcatccagtatttcatttagaatagcccctaaatgtcgtttatcgaaggaactttaaaagacgcacatgtgtgtgtgtgtttaagagcgcgcgcgtgtgtgtgtgtgcacatgggcagtaaatctaatccgaagtatatctaagtgttttatagtttcttgtttggcgcaaatatgcgagactaatttatgcctctgtatgatagtttgtcatttgtgcaaccctcctgttgttcgcaggcccaacgaaaataaagtttttttcaattgtgtta

SEQ ID NO: 6 - protein, 379 aa, DROSOPHILA
MLWKSLIALCVIGAAVAEQTPVFLWGANSVAKPSLKTVSQVEFAEQLAALLEDHMVVAFEENGLSSKDFLCSNSQAQSCYAQLQGVSPKTYYTSVENPSEALRSVAAKREHNSIDASGKLTTPAKCAVGTALFVTFEDAAESREASLESHDAAIAAISKQFECKVAYLYLAAPSTAPVVQRRTRRDTAATTGGIMWKSTNQFQIFYTALLYNGNPITVTDLKLTNSSSTKLSVVMDTSVADKPITFDVVYNGGYFSLSNLVYDNNNFRSSGVNAPTTFSYSCGNLTLESAAVNNMYNTLSFKSLQLQAPFDGTYKEDFPFGDSWDCVGFVTPGILMGLFVVALLLVIMFVGVCWMMDINTMDRFDDPKGKTITINAAAE

SEQ ID NO: 7 - DNA, 6692 bp, DROSOPHILA
tgtgaaattcgaaacccctgacaatgatgatcttctacggggaatcggggaatcaaggggaatcaggacggggctcggtttcgaattcgattccatgacatgttctgcattgctgagccgatatactttatttgcatttttggccacttgcagtggcacgttcccttaaaaacaacagaattatagaagcaatgttttagctattgaacggttacgtatcaatagaggaattttaaaactatttctaagcaagcaaatagttttgctagtttttttagtttagaaactaatttacattaccattgtgagcaattgtgacattgaagttatttctggaaactattcgaaagtgcggagctaaagaaaaagcgactgctactaccgatttcatcatctttaattgtgttaacaatttgtttgactttcttgtctttgtttaaaggcatcgacgggaaactcagcaaaacaatggacttggtacctttacaaatacaactaaaatgagcttaaacctcttctagtacgttaatatatattactagtaataatataaaatgagataaaagtcggttttgctgaaaggcaattaaacgcaaaggccttgctagaatttcgcaacattgcagagattagagctcagatctgcgtagtaggccatgacaaagcgcagatcgctggagatcggcgagaagacagaagacagaagacgacgcatttgttagtcagtggcattggcaagaagtgctggcccgtctggatgagtcattcaccgttatgtggcaaggcggcagatgggggaaaccagtgaataaccagcgacgaaaaaccttcgaaccgctcgcctcgagctgcagcagtcgagtgactgcagtgcgcacaccccacccacccacacaagacaagatccggatgtgccatgcaacacttatacggccgaaccaaaacacaacatgttcgaagtggctctcttatactgcaccgcacagcgagcacttataaaggccggctgccttgcctttcgaaagtcagttgcgtgcgagccgcgagcgcgagatcatcaaactgagaaagtcggactgcgactcgaaactgaaattgaaactgaaagaaagaaatattcaaattgtcgtgtgtgtgggtgcaagcagagaatatatatctcaagaatatctgaatacaagctcctggatttacgagcagcaaaactaagttaccaatgtgcgagccgaaaaaagcgagtgaaaaacgtgcgaatatgccagctaactaaagacatttggattacaagaaacccacgcattttggattataaacattgcgacaggcagaaaaacctaaggtaagcccccgaccctaatgagaaaatgcgcgagagctaaaagatacaagatacaaaatatgagttgcgagatacaagctacaagccacaagggatatgcaagaaatgtgcaaattgcaatagaaattgtcacagcggcaaaacaaaagcatttcaacttagaggcgtaatgagtttgttcaacctgtgtgcccgctcgctctatctctctcgctcgcaccctttgcccgtttttttttttaggggtgcgagtgcagcagaaagcataaaaaatgcaaattacaccgcgggccatgtgaaactatgtttctgaccaaacagacaaaaaaaaaaaatgagaagaaagaaatgatgaaaagaaggccgaatgaattaattcattatgtcttaaagcccgctttcgacatctcttcttcatgctcgcatggacattcggtgcagtctgcaattaaagttaataaataaattaattaataagcggccgactgcgatttcgtgccttattgaaattgctaggcaaccgaaatgaagaacatgaaaagagcgccagccaaggcacggcacccactcactttttcgagcagtgtaggtagcagacacaaaagcaacaacggtgcgtgtgtgcaatgcgacttgaggcgaaagagagagagggggcatatgcgaacacaatgagtgtgagtgggagaaacgcgtttttttaagtttattttttttttttttgttgagcaaggcaatgaatttgttattttttttccttgttgcgacgaacagttgtttggggaatttaagaagatttgtgctgtgactgtaattgaatcgaatgcgattaacataatttgtgaggaaatgtctctgggcaatgaattacaataatgcctggccattagctgattagttggccattagcgaagatgatttcagggctgaaagtgcagtttatgtaacggcgtagatgctacacaagctacatcttcaattttgtccagctaatttcgggccacaaaagcaaacttggcccatcaaattttatggttagctcacacaagctgacccagttttcccttcggggaaaagcagccaggaagttgcaggcatcggaatccgtgtcccaggccataaacaaaattcttacccacaaagaagcaggcttttccttcgcttttcttttatttctgctgcatttccccacacactctggtttttctgaagtgttgtaattgctcttgttttgtgctgcgttttatgaataacttatgcacttaattgatttttgtttattgttcggttcaagttaattaattacacactttatgcgctcctctctttctccagaatttcttcaacggcgccagcatggagaacttaacgcagaatgtaaacgaaaccaaggtggatttgggccaggagaaggagaaggaggcgtcgcaggaggaggagcatgccaccgccgccaaggagaccatcattgacattcccgccgcgtgctccagttcctccaactcctcgtcgtacgacaccgattgcagcacggcgagcagcacctgctgcacccgccaaggcgagcacatctacatgcaacgcgaggccatcccggccacgccacttccggagtcggaggatatcggcctgctgaagtacgtccaccgccagcactggccctggttcatcctagtgatctccatcattgaggtaagcacacacacagcgaactcagtaactcaacccattaaatcaaagaagccgcaaactttcatcccaagagcgataaaaatgatatagggggcggaaagcggcgacgaagggcggaagttttccgagagttttcctcgcttttcgtgtttcgttttctgcgtctgactcgctggcgcccccgaaaatcgattgtaaacaagttgaacaacaaaacagccgaaggaaaaaaagcgaacagaaaagtttatgaaaccagaccgttcgtagttttttcttttttttattttttaagggcagaccaaaaattgtcatgtgaaaaacagtggaagatgagaagatggaaatgatagttagtttgatagcgaaattggtaacttggaacattgagtttaaaataaacaatacacttttacatgaccccttacattcgtattggaaataatttgcttcgtatagaaactagcacgaatatcaaataaacagggcggcccacggggcgtatgagtttagtgagtttgaagccctgccaagttggcaggactcgcccctaagcattctcataagactttatttggaacgtggtcgcgtgccagacagcaacaacataaatcagagcgagagcccagaactaacccccaattctttgcgtctctgtccattttagattgccatcttcgcctacgaccgctacacaatgcccgcccagaatttcgggctacccgttccgattccgtcggattcggtgctggtctatcggccggaccggcgtctgcaggtgtggcgcttctttagctacatgttcctgcacgccaactggttccacctgggcttcaatatcgtcatccagctgttttttggcattcccctggaggtgatgcacggcacggccaggatcggcgtgatctacatggcgggcgtttttgccggatccctgggcaccagtgtcgtcgactcggaggtcttcctggtgggcgccagcggtggcgtctatgccctgttggccgcacatctggccaacattacactgaactatgcgcacatgaagagcgcatccacgcaactcggatccgttgtcatctttggtgagtttccccacaccttatgactagaatctatagaacctaatctatcctacctaaacacgaatttgtcacatctttttcttctatgtttaacttaactaacttgaatcccttctgttcttccatttgcagtctcctgcgatctgggctatgctctctacacccaatacttcgatggaagcgccttcgccaagggtccccaggtgtcgtacattgcccacctgacgggagccctggcaggactaacgatcggctttctggtgctaaagaacttcggtcaccgagagtacgagcagctcatctggtggctagcgttgggcgtctactgtgccttcaccgtcttcgccatcgttttcaacctgatcaacacggtgaccgctcagctgatggaggagcagggtgaggtgattacccagcatctgttgcacgacctgggagtgtcctaagtttgaggttcggagtcgtcagcatgctcgcagggattcggaatctgcttgagcttcaggagagatcgagagacagagagttggtggaaaagaaaagttcactcaacgatttagttcaaaactaattcgatattcgtttggcttttgcttttcgttagcattatctcgttatcgttaccgtttgcagttaaacgtttcagttccgaaacatagtacacaaactcaaaaaaaaaaaaaacaaatcaagagaaatacactggacaaaaagaaagtgcgaggagtgaggagaacataaaccgaagccgaaacgtgtaaacaaatgttgtgatagaaccaaagactgaatttatttcgcgtgtaaaaaccaagtaaaaatcaagaggaaaatcaaagaggagaaacagaactaatcgcctctcgctatgatttaaatgatttatccatgttttcaattaatggtttgtctgttttcttaaattatgtatttattggccgcaattactacgaatgaatcgaatcgaagcatcagcaaactgtatcaaattgtttatacatccataagcataatgtgctccgaattgtaggatttagtgttataatttatatatatttaggtataactagccctcctaacaaattgtttcaaattgtaaatactattaagtcgcacactagtcaaacaacaacaacagcaacagcaaaaacaacaaaaaaaatatggaaaaccacagcaaagaaccattcaattcagatcaattaagcaaatcgagttaaattaaattaaattatactaaagtcacttaatgcgttacaaaatcgagcatcgtaatcccctacacacacacacacacacacacactcgaaagtattactaattatatttatttatggtagggcagcgagggtttattaattcgtcaattgagcgaactatttatttatttatttatttaataatttagtgaaattcacacaaacaagcacgaaaaaacaacaacaacacaagagagagaagaaacaaaccaattcaactgtaaaaatatccaattgaaaaatacacacgaaaagccaaagaaaataaaaaatcaaaacatttcaagaatacaacagtaataacaaaatacaagcaaaagcgttttcatttcccattttgtatttttattttactttcagtttttggctgtcggctcgcttggttttaattcccacaatttaagggcaataaataatcgagccagcagattatcaagatacttgacatattgaccgatacacatatatatatacatatatatatatatatatcgtacgcaaatagagaaatattcaaagtaatcgccgaatgaaaacagctaatctggcataaaggccagcaaagcgtaagccaaaatagaatccttttgggccacaaaaccccaagatagcatactcgattttccaaaataatggatccacactccacccgatgaaaaaaaaaaaacaaaacaaaaaaataaaataaaacaaactaggaaacggaaatgttcagcacgagacaagggacagaagaaatgcaaatagcaaaaaattatagataaataaataaggagagaaaaattgaacaaaaataaatgtctaaattatatatgaatttctcgttttcttcacaaataactcagggcgagttgagcttgtgtatgtatgtatcctctgctggatgagttttttggggggcagcccaatcaatatttgctccacataaatatggcaattcaaagcgaaaggttgcaactacaactaagactcgaagaaaatccttaattaatacccactccgcagaagacttgtgtcaacgaattttcccactcgaatgttgccactgccaccaatcgatagttgccccaatatgaaatatgaaggcgcagcatacgcattttgtaataattcatattgtctgtgattccacatctcatgcgagtattatattcaatccaactggattagcaggactaagtccatgaatttccaaatcggcattcaactcgaaggacttgaagcgaaccaaaaacatttgccagctgtttgcgtttagtcgactaatgcatacctattagcaataagcacttaatagaaaactaaagcagaaacatg

SEQ ID NO: 8 - DNA, 2558 bp, DROSOPHILA
ggccggctgccttgcctttcgaaagtcagttgcgtgcgagccgcgagcgcgagatcatcaaactgagaaagtcggactgcgactcgaaactgaaattgaaactgaaagaaagaaatattcaaattgtcgtgtgtgtgggtgcaagcagagaatatatatctcaagaatatctgaatacaagctcctggatttacgagcagcaaaactaagttaccaatgtgcgagccgaaaaaagcgagtgaaaaacgtgcgaatatgccagctaactaaagacatttggattacaagaaacccacgcattttggattataaacattgcgacaggcagaaaaacctaagaatttcttcaacggcgccagcatggagaacttaacgcagaatgtaaacgaaaccaaggtggatttgggccaggagaaggagaaggaggcgtcgcaggaggaggagcatgccaccgccgccaaggagaccatcattgacattcccgccgcgtgctccagttcctccaactcctcgtcgtacgacaccgattgcagcacggcgagcagcacctgctgcacccgccaaggcgagcacatctacatgcaacgcgaggccatcccggccacgccacttccggagtcggaggatatcggcctgctgaagtacgtccaccgccagcactggccctggttcatcctagtgatctccatcattgagattgccatcttcgcctacgaccgctacacaatgcccgcccagaatttcgggctacccgttccgattccgtcggattcggtgctggtctatcggccggaccggcgtctgcaggtgtggcgcttctttagctacatgttcctgcacgccaactggttccacctgggcttcaatatcgtcatccagctgttttttggcattcccctggaggtgatgcacggcacggccaggatcggcgtgatctacatggcgggcgtttttgccggatccctgggcaccagtgtcgtcgactcggaggtcttcctggtgggcgccagcggtggcgtctatgccctgttggccgcacatctggccaacattacactgaactatgcgcacatgaagagcgcatccacgcaactcggatccgttgtcatctttgtctcctgcgatctgggctatgctctctacacccaatacttcgatggaagcgccttcgccaagggtccccaggtgtcgtacattgcccacctgacgggagccctggcaggactaacgatcggctttctggtgctaaagaacttcggtcaccgagagtacgagcagctcatctggtggctagcgttgggcgtctactgtgccttcaccgtcttcgccatcgttttcaacctgatcaacacggtgaccgctcagctgatggaggagcagggtgaggtgattacccagcatctgttgcacgacctgggagtgtcctaagtttgaggttcggagtcgtcagcatgctcgcagggattcggaatctgcttgagcttcaggagagatcgagagacagagagttggtggaaaagaaaagttcactcaacgatttagttcaaaactaattcgatattcgtttggcttttgcttttcgttagcattatctcgttatcgttaccgtttgcagttaaacgtttcagttccgaaacatagtacacaaactcaaaaaaaaaaaaaacaaatcaagagaaatacactggacaaaaagaaagtgcgaggagtgaggagaacataaaccgaagccgaaacgtgtaaacaaatgttgtgatagaaccaaagactgaatttatttcgcgtgtaaaaaccaagtaaaaatcaagaggaaaatcaaagaggagaaacagaactaatcgcctctcgctatgatttaaatgatttatccatgttttcaattaatggtttgtctgttttcttaaattatgtatttattggccgcaattactacgaatgaatcgaatcgaagcatcagcaaactgtatcaaattgtttatacatccataagcataatgtgctccgaattgtaggatttagtgttataatttatatatatttaggtataactagccctcctaacaaattgtttcaaattgtaaatactattaagtcgcacactagtcaaacaacaacaacagcaacagcaaaaacaacaaaaaaaatatggaaaaccacagcaaagaaccattcaattcagatcaattaagcaaatcgagttaaattaaattaaattatactaaagtcacttaatgcgttacaaaatcgagcatcgtaatcccctacacacacacacacacacacacactcgaaagtattactaattatatttatttatggtagggcagcgagggtttattaattcgtcaattgagcgaactatttatttatttatttatttaataatttagtgaaattcacacaaacaagcacgaaaaaacaacaacaacacaagagagagaagaaacaaaccaattcaactgtaaaaatatccaattgaaaaatacacacgaaaagccaaagaaaataaaaaatcaaaacatttcaagaatacaacagtaataacaaaatacaagcaa

SEQ ID NO: 9 - protein, 355 aa, DROSOPHILA
MENLTQNVNETKVDLGQEKEKEASQEEEHATAAKETIIDIPAACSSSSNSSSYDTDCSTASSTCCTRQGEHIYMQREAIPATPLPESEDIGLLKYVHRQHWPWFILVISIIEIAIFAYDRYTMPAQNFGLPVPIPSDSVLVYRPDRRLQVWRFFSYMFLHANWFHLGFNIVIQLFFGIPLEVMHGTARIGVIYMAGVFAGSLGTSVVDSEVFLVGASGGVYALLAAHLANITLNYAHMKSASTQLGSVVIFVSCDLGYALYTQYFDGSAFAKGPQVSYIAHLTGALAGLTIGFLVLKNFGHREYEQLIWWLALGVYCAFTVFAIVFNLINTVTAQLMEEQGEVITQHLLHDLGVS

SEQ ID NO: 10 - DNA, 6080 bp, DROSOPHILA
attctgtaattaatcaagcccttgttgaaccactcgcattgtctttttcgccttttcgtgttgattgtggaacctccttatcccacaaaacacttttcattcattttcatgctcattcacaaaacatgagaaaaaaaaaagaaaaacaaacattgcagtcgtgagaggaaaattattgagcgagagttactgttcgtgttttctcattttcagctgagaaaagcagccgaccaatcacaaaaccatttcccctttacaaaaaaccgatcattttgcatctcgtggagagtattcagatttgtttggagagtttcggagaggaactcgttaagccgggtctacaaaggtgagtatctgtggaccgtggtggagtcaggggaaatgttagtgctttaaaaagtgtctactatgtgtggaatttggattgtatcttgtggattggatattgtggtaaggttgagtttcatttggtatctcgggtagaagtcaatgaggtggatgttcgggcacacaggctgtagaacttgttggatattttgtcaagaactgaaagtatccgaaaggattaattcatagcatatatacctcagttgtattttgaattattttaaattagttttctcagaattcatgggcttcacactacacatcttcccctcttaagatctcaggcttaaattcgtactccattctcattgtggatttgaaatgatgactgtgaagaccaaacacgaagggctaccccttaattccacattcttgtccaccaaagcagacctctccgcaactcacctcttaggaactctcctaaattccggtttcaagttgtggtccaagttccacatggacaccaatgagacacattccccagtctccactctccaaccaagtacatatctctctccagccgaacgaacccgagagcgaagactccgcctatcggattcggaaatgcccgttcggggggtataaaagcgggcgctctgagcgagcaccactcattcgttgtctgaccgctcgcagcaaaagatatagaaatcgagaacgtaaacgcagaaaacacgctggattaaagtgtttcgtttcgaacatcgacagagtgagaaaacaaagtgaagtgagcgcacaaagccgaaatcaaatcaaattgaaaagccagtcaagagcaatctttaactgaacctcgcaagtaatccggtacgaccgtgtaacaaccgccaagattctactcaaggagcgtaaagcaatcatctccagaatgaagtccctgacggccgtctgccagacaggtgcctccggaatgccggccttgaatgccagcgggcgcatccagcgccatcccacgcaccgcggcgacggggagaacgccgagatgaagatgtatctgtccaaactgaaggacctcgttccgttcatgcccaagaacaggaagctcaccaagctggagatcatccagcacgtcatcgactacatctgcgacctgcagaccgagctggagacgcaccccgagatgggcaacttcgatgcggcagccgctctgacggcggtgaacggactccacgaggacgaggacagcgacatggaggatgcggatgccgaggcagaagcggaagtcgatccagatatcctcgcccagcgcctgaatgccgagcagccggcgaaagtctctagtcccgccgcccgtctcccgcttaccgatcgccaaacgcccaacactcttgtggcgcccgcccatccgcagcagcatcagcagcagcagcaactgcaactgcagcagcaacaactgcaatcacagcagcaactgtccaacagtttagcaacggtgagttaacaaacaaattgctagggtagtgaaaaacccaaataggaagtgggcagatgagcacagctcaggtcgaaatattaggagaaataataaggttatggaatatttaaagtagttatttttgagaaaataacatagttaaacatttaaagtacatgacttcactggtttcaactagacaataaagcgattaattgctaaagttacgataaggaagtgcgaatatcgcaaagtttgcgatccaccgattttcgctatttccttgagtgccattattttgaccgcagctgtttggcatttgcattgcaaatttaggagacaattgagtgtcaaactgtttggctttacttgtttttgtttcgcgagtgacctcattcataaggcgattgacgaatgtttgcgtgaatgttgttttttttcattttgttttatttttttttaacggaaggacgaggcgcgtttcgtttcgttggcgagttttgggaaatttctttattgggcgggtggctttagacaacgcggcctgcccgattttgtcgtaccctcttcttcgccgcacagattcatttcgtttttatagacatttcacagaccgtctctgtgcgattgtatgcgttgcggttgttgtcgccatcgtttctttcttttgtgtgttgcctatacgtagctgttaattttttctcgcggcctttttctgttgttgtgatgttttaaatgaacacctgcagatacttaaatttatttcacacacactcgcacacacacatactcactcactcacacgcacttgcgagcttgaaaacggaatttggaattggggaatcatcagtcttcgtattttatttcatttgggtttattttttggctcacttcattagctctcagcttcgttacttcttcgtttttggactttcggttattaatgatgctggcgaaaaaattcgtttgagatctacaatatgttcgtaaaaacaggttcgaaaaagcttttttttcaatgggtttctcaaacaaatgatcgactgggtggcccggcaagtgttattaattttcgatctctgattgttgattaattgtgaaggtggaaacccttcttcgaaattcagaaagatggttttgaaatcgtgccttcgtcattcctggctatgagttacttcttaaatttttgattaattaactgtgggtctttagctcagtccgctttgcgtaggtctcttttctctcattttgggtgcgtaatttttgtgtttttgttgcaaaacatctgcaacccacaaacatatatactttttgtgtttgtatgatgtgtcaccgccgcaacaacaacaacaagccaacaacaatccgagaattctttcgaaaacacgcacacacacacacacagaagaacacatgggggcactcagaaaactgtaaaaagaaatgcacgtgttcaaaatgttctctctgtgggttgttttcagttgtttttgctgtttctttttcgatttttttttcgcgcagctgtgcgccagtcgccagtcggtcgctttctacattgtgttccccccacggatcctgcccccccccctccacaaccgccccctcgcagtaagagagcagaagacggaggagaagagagcgcaagacactgggggaaaaactgcgtgatttcaacgttttgctgattttcaactgggtatacttgtgcaagcaagctacctgagatgttattttaaaacatgttgtatcttctaatgcacatgttcttagtgcaaaacatttttcccagtgccaaagaactcaaataagtgcaaaacaaaagctcaatgacagcgcgtttgattttcttggcgcctctttattgccccatcccctccactcatcgaaatcagcctctcggcgagtgtcccaaacacaaacaaaacaaacaaatcagtggaacagggaactaattgataacatagaatggcgaaataatacagcttataaactaattattgcatttcaatcgcacattaataatgtactaatttgaatcttcccgcttctctctttttagccacagaatgcggagaaagacagcagacagtcgtaagcgtggaaacgcccagccgggaaaacccacggaacctataagcctattaactaaatgcataatgaaagtacagtcaaaactccactcgcaaccttcgtgtgaagatctccgcataagataacgtgtgaaactctcaagaaaaccacagcccaggcgcatctcttcaacgctccttttcccgggaaacggaaaacccgggaaaacgagacctcgcttttggctccaacagagtttagtttaaacatttaataacaagaatacaacaacacaaaacctagcattagagcagcgtaagcaagtacacattatgattattaattaaacattacaactaggatgatggcgcttaagaatgaacggaagaaagaaaacttggcaaagctttaaacaatttaattttcctttaacgcttgaaattacactgaagcatatatttttgttttcctaattttagttttgttttggtttaaacaacgcaagaaaaaatgttactaatgcaaagcaaacagagatcagcaataaaaaaaaattataaaaatgcacaggcaccaaactggaattacgttgaatcaccgtttcctgcattacgattatatgatttcaatccaaatgattttcctattaattttaatcaatgaagagttttcctattattgattagccacagccaataaacaacaagaacaaccaactcagcagcacacacacattcaaattcattaatttatatcgagagagtacgtttagagtttaagttcgagaaagttcatttccaggcactaattttcactcacaccactcacatagaaaaacacaaacacctcattttgtagttttccgagtcccttggatcgttttcctcttttttaatcgaaataacgcataatgcataataattattaccagatatacactaaaacctataaatatatattaatatatgttctgtgatctgtagcatactttgtacaaagtgttttttttagcataattatgcgattttaattatgatccgcaatcgaaattacacatttttgttctcatttcgatggtaaaaacactctatcatgatgtaaaaaaaaaaaacaaaagaaaacatttgatgatgttgcgaaaaaatatattatctaaaacataaagaaaaacaaacactagctcttaataaattgcaaaaatttaaaaaacattaaaaatcgaatatgtcaatggatttccgttgggagcaggggattaagaaactaccagatcttaccgcaaaagtcggtaactacctgcagacaacgacaacaagtagccgggggaggaaaactcagctggatggccattttcacatgtaaacaagtgcaacgaattaccagaacaatgaggtggatgatattattctcggagtttcatgggcgagcgagttttctcacgcagccgccgcctttgtcattaggggtttggttttcccattttccatttcccaggtaaaacggccgtagggtccgttgaaaactcgacctgcacacgtgtgcgaattgcggacggaaaatttccgttgagaaaatttccttcactgtggcctggccgcttttccttttatttcacgtacgaaccacttgggtgtggatttagttttggattttctgcgctacccgcagctgcctgcccacccacttccactcacactcacactcccacggcccaccgcccactgtctccctctctttcccgctatctggcggcctattagcgttaatgattgcaactacaatgcactgaccaattggcaattgcgactgtagtctcgggttggcttcgagatcggggcttggagcttggagctcggcactcggagcactcggtgccagtcgccccattcaaatgtcaattcggatcggaccccagtggaccgctggggaaacactttgaacagctacgaaaagcttttccgcggagcccataaatctgggatgctctatggaaggccctaaaatgtatcattaaatctttaggttaaggcactttcttgaaaaaacgacctatttacatcttagcaaccatattaactagtttaatcatgcggtaaaagtagtcgatcgatttccttgtgctaaacttaacccaacacctttttgaaaacatattttctttaaagttgttgcatattttaaataacactgttgacagatctgc

SEQ ID NO: 11 - DNA, 2036 bp, DROSOPHILA
attcgttgtctgaccgctcgcagcaaaagatatagaaatcgagaacgtaaacgcagaaaacacgctggattaaagtgtttcgtttcgaacatcgacagagtgagaaaacaaagtgaagtgagcgcacaaagccgaaatcaaatcaaattgaaaagccagtcaagagcaatctttaactgaacctcgcaagtaatccggtacgaccgtgtaacaaccgccaagattctactcaaggagcgtaaagcaatcatctccagaatgaagtccctgacggccgtctgccagacaggtgcctccggaatgccggccttgaatgccagcgggcgcatccagcgccatcccacgcaccgcggcgacggggagaacgccgagatgaagatgtatctgtccaaactgaaggacctcgttccgttcatgcccaagaacaggaagctcaccaagctggagatcatccagcacgtcatcgactacatctgcgacctgcagaccgagctggagacgcaccccgagatgggcaacttcgatgcggcagccgctctgacggcggtgaacggactccacgaggacgaggacagcgacatggaggatgcggatgccgaggcagaagcggaagtcgatccagatatcctcgcccagcgcctgaatgccgagcagccggcgaaagtctctagtcccgccgcccgtctcccgcttaccgatcgccaaacgcccaacactcttgtggcgcccgcccatccgcagcagcatcagcagcagcagcaactgcaactgcagcagcaacaactgcaatcacagcagcaactgtccaacagtttagcaacgccacagaatgcggagaaagacagcagacagtcgtaagcgtggaaacgcccagccgggaaaacccacggaacctataagcctattaactaaatgcataatgaaagtacagtcaaaactccactcgcaaccttcgtgtgaagatctccgcataagataacgtgtgaaactctcaagaaaaccacagcccaggcgcatctcttcaacgctccttttcccgggaaacggaaaacccgggaaaacgagacctcgcttttggctccaacagagtttagtttaaacatttaataacaagaatacaacaacacaaaacctagcattagagcagcgtaagcaagtacacattatgattattaattaaacattacaactaggatgatggcgcttaagaatgaacggaagaaagaaaacttggcaaagctttaaacaatttaattttcctttaacgcttgaaattacactgaagcatatatttttgttttcctaattttagttttgttttggtttaaacaacgcaagaaaaaatgttactaatgcaaagcaaacagagatcagcaataaaaaaaaattataaaaatgcacaggcaccaaactggaattacgttgaatcaccgtttcctgcattacgattatatgatttcaatccaaatgattttcctattaattttaatcaatgaagagttttcctattattgattagccacagccaataaacaacaagaacaaccaactcagcagcacacacacattcaaattcattaatttatatcgagagagtacgtttagagtttaagttcgagaaagttcatttccaggcactaattttcactcacaccactcacatagaaaaacacaaacacctcattttgtagttttccgagtcccttggatcgttttcctcttttttaatcgaaataacgcataatgcataataattattaccagatatacactaaaacctataaatatatattaatatatgttctgtgatctgtagcatactttgtacaaagtgttttttttagcataattatgcgattttaattatgatccgcaatcgaaattacacatttttgttctcatttcgatggtaaaaacactctatcatgatgtaaaaaaaaaaaacaaaagaaaacatttgatgatgttgcgaaaaaatatattatctaaaacataaagaaaaacaaacactagctcttaataaattgcaaaaattt

SEQ ID NO: 12 - protein, 185 aa, DROSOPHILA
MPALNASGRIQRHPTHRGDGENAEMKMYLSKLKDLVPFMPKNRKLTKLEIIQHVIDYICDLQTELETHPEMGNFDAAAALTAVNGLHEDEDSDMEDADAEAEAEVDPDILAQRLNAEQPAKVSSPAARLPLTDRQTPNTLVAPAHPQQHQQQQQLQLQQQQLQSQQQLSNSLATPQNAEKDSRQS

SEQ ID NO: 13 - DNA, 7129 bp, DROSOPHILA
cttttccacctctattcccactggaagctgctcttaccccactccagtggcgttccatgtgcaggggtcagcaggcatgtggcaagtagcaaaactagcagcacatccattccaaatcggatgcggatcattttacaggtggattatatagccaacggacacctgcgattgcacaatcgcctggctttatggttaggttgcggaaattagaagcgcctggccgtagttgccgttgcctggccagtcggaaaggggatttgcgcgaacgtgggataggaaacaacagcgcgctgtttttacggactttcggagggggcttcaaagaacgcgccacggaaaacgctaacgacctttcgatccgacaagatttcttaaactaactttaaaagtcacttgatttgatcggagggtgcacatagtggtggggaatcatagatatgattgcgaaatgtatcgatgtattcccatgctttgcagtatctatcggaacctcccctctggaccgttacaatacagttcctttactaaatgaatagtttatgtgcgaagcgggtaaaaactacgaaaaactacgtcaaacacattgcctgtgcctcaaaaatcacaaagcatatcgtgtgttttaaatccattagagcaagccaaaaatcagactttcgagataaggaataacagaaatattttcaaactaaaattaacggctggcagctagtcgccagtgctggtaagtctgccacattttacacactgcctgttgtagagttacgctgctgctagtgtttttattttcatttgcaactttttcggtccaaagtcatgtacaaaaatgcactgaaaggcggtattcgcacggccaagcaggcttggaagttaaaaaacggtgattacacaatattttatgtcagtgcagttaggcatttagcgggtagtgtgggcggcggaacagctgatcggcgttcgagcggccaacttccagtcgttccactttccaagtgggccactcgaagcgtgttgttcgctgccgccgcatattgttcgtttttttctccgctaaattaagtccggagtacgcctggaatcggtaattaatagctagtaattgtacttgcagaactgggcaaactcaacttggacttggccaaggcaaactcagattttgagcagcatttgtgcgaaggtttgccaacgcttgccccatagcctataccccgcccccaaactcaatagctaatcaaataacaacgcttatcagtgcaattcacgcttgtgtcccggtgctaaccagcttttcccacttccagctgccagatatactcagagtttccacttcctcgccagaaacaccccgagaacacctttgttgctactaaaaacgacaggcgataacaacagctccccccgaatcgttgctaactattatcggacagctccagttaaccccccgaagcagcagaatccgaaacccagcggagcggcagataagaccacctcagtaaagcatctttttcgagcagaaagcggccacctcaacgcgctaatctcgtcgaagcaatttgtgaaggtgcaaaagcagttctacagggacttctcttccgtttcgcttggagcccctctgaagagcagtgacgctccgttgctgggagatttgtgcagtcagtatcgcgccatcctcgcccacacatcagcggacgtgattccaggccaggatcgccatcatccgggttgcaactatcagcagatcaggcgggcacacacacagttactgagcaaggagcagcagctggagcaggagcgcaagatggcccagaaggcaaagttcgagaggctgcccaccaatgtggtgccaaggcactacgagctcctcctgcagcccaatctcaaggagttcaccttcacgggcaagaccgtggtgcaagtcaatgtgagtacagatcgctattgggattaatcgagtaagcggtttcagttagggagttgcgactgtatcctccgtctctttccatttctctccgctccagccactttcacttttcccgcattgttattttctgcgcctcattgtgcgaactttttcccctgacgtgggcaaaaaaaatatttcggattggatcggacattctccttgttaacatttcgctttacgctgcaatttgcatgcaagcaaacgctcagactgatgggcagatagatatagagatatagatatggatatgagtacacccactaggaagtgcgatttctttgtcggcagaaggaatgactggcgaattggacatggcactcgtgggtaccgcgcaaaatttattcgagacaatctctttttgcgaacgccgctcataacggtggattttgtttacgttttgcttgcgtcagcagcggaaatgattatccgctcataagtcgcacttttaataccttaaaactaagattaacttaaccgagatcagcctagaatgctacttctcactaaataccaaaatgggagggtcttttgaatgctatcaactaaaagcataaacaaactaacagaacataaaaaattacaaaatatatttaagagggtatctaaaacatgctattaactgagctactatcaaataataagcatagttcaaatacttaaaattttatttatgtttttaagatacatatcaatgaagtgcaaaattattcatctcttataaaagactactcgttattcatataaatcaacaaaaatgtgctgccagctaatgcaaattggtaatatttttcgagcttcattattccgataagacgagtgaaagaattacgataccattagttagttcataaactagagatccaatcggttggatcctcccttggtcagtgtataattttcgccaaaaactcgttttgaccgctttgatcgcttggcttaagccggaaacctacaacaaagtccagaaagccgcatttctacgaccttgaagtaactgtttgtggattctggccattcttgtcggccaactcggctaactgtttctgctgactggttttgggcttaaagtttcgggttgctcacctaacggttaccgattgtcttgcaggtcaaggagcccactacccagataaccctgaatgccctggacattgttctcgattcggtagagctccattttgagtgcagcaaactgaagccggagaagatagtgtactctgcggaaaatgagacggccacgctggagtttgcccaagagattccggcggagactcaaggcgtactgcatatgtcctttacgggcgagttgaacgacaagatgaagggcttctacaggagcaagtacttcggaccgaacggcgaagagcgctttgcgggcgtcacccagtttgaggccaccgatgcccgacgttgcttcccctgctgggacgagcccgccattaaagccaccttcgacatcacactggtggtgcccaaggaccgggtggctctgtccaacatgccggtcatcaaggaggattcccttccagacggtctgcgacgagtgcgtttcgaccgcacgcccatcatgtccacctacctggtggccgtcgtagtgggcgagtacgactatgtcgagggcaagtccgacgatggcgtcctcgtcagggttttcacacccgttggcaaacgcgagcagggcactttcgccctggaggtggccaccaaggtgctgccgtactacaaggactacttcaacatcgcgtatccgttacccaagatggacctcatcgccatctccgacttctcggccggcgccatggagaactggggcctggtcacctaccgtgagacctttgtgctagtggacccgaagaacacctcgctgatgcgcaagcagtcgattgcgctgacagtgggtcacgagattgcccatcagtggttcggtgagtactactttccatatccggtaacaacgaaatggaggttcgccttcatcgaccagcgggattgtcttaaagtgcaccagcagtcaatatgatttctgtgattcaccgatgtattcagttcagctcgtctgacgcagaagcacctgaaactcaatttggtatgcagatggtttaggtatcgattctccaatagggttttagtgtcaatgtcttgactctgatgtttaaaatggatgagttctgggtgacatttatataatgcttaaggctaatcccctggcggattctgtttacaatcatgacctttatcattgcagaactaaagttatcttactgatgtgttcctaatcaatccatttaactgtaggcaatctggtaactatggagtggtggacccatctttggttgaacgaaggctatgcctctttcgtggagttcctgtgcgtacaccacctgttcccggagtatgacatctggacgcagttcgtcacagacatgtacacgcgagccctggagctggactctctgaaaaactcgcatcccatcgaggtgcccgtgggccatccgtccgaaatcgacgagatcttcgatgaaatcagctacaataagggtgcctcggtgattcgcatgctgcacgactacatcggcgaggataccttcagaaagggcatgaatctgtatctaactcgtcatcagtacggaaacacctgcaccgaggacctgtgggctgctctgcaagaagccagctccaagaacgtgagcgacgtgatgacctcgtggacacagcacaagggcttcccagtggttagcgtcgagtcagaacaaacaagcaagaatcaacgcctgctgcgccttaagcagtgcaagtttacggctgatggttcgcaggcggacgagaactgcctatgggtggtgcccatttcggtgtctacctcaaagaatcccacagggatcgccaagaccttcctgctggacaagtcctcaatggaggtgacactcgacaacgtcgatgaggacgattggatcaaaatcaatccgggaacagtgggttactatcgcacccgctattcgcaagaaatgctagaacagctgatgcccgcagtagagaagatggagctgccgcctctagatcgtctgggattgatcgatgacatgtttgctatggtgcaggcgggtcacgcaagtactgccgatgttctggccctggttgattcgtacagaaacgagacgaactacacggtgtggactgccatcaccaactcgctcaccaatctgcacattcttatctcgcacaccgatcttatggaggacttccatcgcttcggacggaatctgtacgagccggtggcctatcgcctgggctgggagccacgcgatggggagaatcacctggacactttgctcaggagcctggtgctcacacgactggtctccttccgcagcagcgataccatcgaagaggcaaaaatccgcttccgcagacacgtgaacggcacagaactgctaccggcggatctgcgcaccacttgctacaaggccgtactgcaagatggcgacgaaaagatcttcaatgagatgcttgatctgtacagggccaccgatttgcacgaggagcaggaccgcatctcgcgagctctcggttgttgcggagatttaaagctgttgcgtcgtgtcatcgactttgccatgtcggtgggtattgtccttactcctcagatgaaaaggaacattgatttaaacgatttatctttttagagtgaagtgagagctcaggactctgtgtttgtaattgtcgccgtggccatcaaccccaagggacgtgacatggcttgggagttctttaaggagaacaacaaacagctgctggaacgctaccaggtgagtgaaacaacttatttttatattggttgaaatatacatatgtatatttgtggtttcagggtggctttctactttcccgtctaattaagtatctgatcgagaacttcgcgtctgaggagcgcgccaaagaagtggaagagttcttgcaggtcaatcaaatccccggctgcgagcgtactgtatcccaggcggtggagaccatccgactcaacgcggcctggctgcagcgtgaccgcgagcagttggcgatcttcctcagggatgaccaataaacgttattgcgctcgccagcataccaaagcatttaacaacaatcaccagcagtgtaaccacagcaacagcaacgccaacgcagcaccatcatcagcaccagtaacccgtaaccaggtcatcgtaagctacagctaatatatccataacaccacacgaccaaagccgtcacaaatgaagaaaacaaatggcaaacgtactcctaaagatgagagccaaataggttagctttagtcaaggatccacctacagccactgctccaaccgggcgtgcttacatatatcgattgactactcgccccagcacatgggacttggacttggacgcagacccctagaagcatttaagacccctaagcttatcgaatgtgtaactccattcaacatttctattccctgaaaattatgtacgtgttgagtttattacaataaataaatgcaattcctagtaagagtcaaaaccaattgaaagcgaagtttataaagcaagttagttattagttatttttacagtttttattcgattcaatttatataaagtttatagactatgtacaattcagaaggcgaataacttgtgctttcctcgataggttctatttcatcttattctcctcagtgttgttattgttaaactcgaatttctgggcccttcgcttcaactcctgcgattgggtccagaaagtggacaggcgctgatcgctgttcgagcaaaactcgcggaaatccttgagcatcttcagctggaagagctccccgtccgcggagttgtttatcgtctgggccttccatttcttgttcggaatcatgtggttccacgcccacaagaaacccactttcttgggcacgttcgtgttgttggtgtgcccatagacgcagcgcgtgacatttgcctccttcaggatgggcgattccacctggtagttgtttgtagcgcaactgtaagagaggagcgattagaaggtatcaaggagcaggagacttcacacatcttaccggatcaaggcaaacatgttgcccgtgcagtgcacatactggtactccttgggcagctgcaaaagtaaaattgtaatgagaaatgcccaac

SEQ ID NO: 14 - DNA, 3264 bp, DROSOPHILA
ctcgaagcgtgttgttcgctgccgccgcatattgttcgtttttttctccgctaaattaagtccggagtacgcctggaatcgctgccagatatactcagagtttccacttcctcgccagaaacaccccgagaacacctttgttgctactaaaaacgacaggcgataacaacagctccccccgaatcgttgctaactattatcggacagctccagttaaccccccgaagcagcagaatccgaaacccagcggagcggcagataagaccacctcagtaaagcatctttttcgagcagaaagcggccacctcaacgcgctaatctcgtcgaagcaatttgtgaaggtgcaaaagcagttctacagggacttctcttccgtttcgcttggagcccctctgaagagcagtgacgctccgttgctgggagatttgtgcagtcagtatcgcgccatcctcgcccacacatcagcggacgtgattccaggccaggatcgccatcatccgggttgcaactatcagcagatcaggcgggcacacacacagttactgagcaaggagcagcagctggagcaggagcgcaagatggcccagaaggcaaagttcgagaggctgcccaccaatgtggtgccaaggcactacgagctcctcctgcagcccaatctcaaggagttcaccttcacgggcaagaccgtggtgcaagtcaatgtcaaggagcccactacccagataaccctgaatgccctggacattgttctcgattcggtagagctccattttgagtgcagcaaactgaagccggagaagatagtgtactctgcggaaaatgagacggccacgctggagtttgcccaagagattccggcggagactcaaggcgtactgcatatgtcctttacgggcgagttgaacgacaagatgaagggcttctacaggagcaagtacttcggaccgaacggcgaagagcgctttgcgggcgtcacccagtttgaggccaccgatgcccgacgttgcttcccctgctgggacgagcccgccattaaagccaccttcgacatcacactggtggtgcccaaggaccgggtggctctgtccaacatgccggtcatcaaggaggattcccttccagacggtctgcgacgagtgcgtttcgaccgcacgcccatcatgtccacctacctggtggccgtcgtagtgggcgagtacgactatgtcgagggcaagtccgacgatggcgtcctcgtcagggttttcacacccgttggcaaacgcgagcagggcactttcgccctggaggtggccaccaaggtgctgccgtactacaaggactacttcaacatcgcgtatccgttacccaagatggacctcatcgccatctccgacttctcggccggcgccatggagaactggggcctggtcacctaccgtgagacctttgtgctagtggacccgaagaacacctcgctgatgcgcaagcagtcgattgcgctgacagtgggtcacgagattgcccatcagtggttcggcaatctggtaactatggagtggtggacccatctttggttgaacgaaggctatgcctctttcgtggagttcctgtgcgtacaccacctgttcccggagtatgacatctggacgcagttcgtcacagacatgtacacgcgagccctggagctggactctctgaaaaactcgcatcccatcgaggtgcccgtgggccatccgtccgaaatcgacgagatcttcgatgaaatcagctacaataagggtgcctcggtgattcgcatgctgcacgactacatcggcgaggataccttcagaaagggcatgaatctgtatctaactcgtcatcagtacggaaacacctgcaccgaggacctgtgggctgctctgcaagaagccagctccaagaacgtgagcgacgtgatgacctcgtggacacagcacaagggcttcccagtggttagcgtcgagtcagaacaaacaagcaagaatcaacgcctgctgcgccttaagcagtgcaagtttacggctgatggttcgcaggcggacgagaactgcctatgggtggtgcccatttcggtgtctacctcaaagaatcccacagggatcgccaagaccttcctgctggacaagtcctcaatggaggtgacactcgacaacgtcgatgaggacgattggatcaaaatcaatccgggaacagtgggttactatcgcacccgctattcgcaagaaatgctagaacagctgatgcccgcagtagagaagatggagctgccgcctctagatcgtctgggattgatcgatgacatgtttgctatggtgcaggcgggtcacgcaagtactgccgatgttctggccctggttgattcgtacagaaacgagacgaactacacggtgtggactgccatcaccaactcgctcaccaatctgcacattcttatctcgcacaccgatcttatggaggacttccatcgcttcggacggaatctgtacgagccggtggcctatcgcctgggctgggagccacgcgatggggagaatcacctggacactttgctcaggagcctggtgctcacacgactggtctccttccgcagcagcgataccatcgaagaggcaaaaatccgcttccgcagacacgtgaacggcacagaactgctaccggcggatctgcgcaccacttgctacaaggccgtactgcaagatggcgacgaaaagatcttcaatgagatgcttgatctgtacagggccaccgatttgcacgaggagcaggaccgcatctcgcgagctctcggttgttgcggagatttaaagctgttgcgtcgtgtcatcgactttgccatgtcgagtgaagtgagagctcaggactctgtgtttgtaattgtcgccgtggccatcaaccccaagggacgtgacatggcttgggagttctttaaggagaacaacaaacagctgctggaacgctaccagggtggctttctactttcccgtctaattaagtatctgatcgagaacttcgcgtctgaggagcgcgccaaagaagtggaagagttcttgcaggtcaatcaaatccccggctgcgagcgtactgtatcccaggcggtggagaccatccgactcaacgcggcctggctgcagcgtgaccgcgagcagttggcgatcttcctcagggatgaccaataaacgttattgcgctcgccagcataccaaagcatttaacaacaatcaccagcagtgtaaccacagcaacagcaacgccaacgcagca

SEQ ID NO: 15 - protein, 866 aa, DROSOPHILA
MAQKAKFERLPTNVVPRHYELLLQPNLKEFTFTGKTVVQVNVKEPTTQITLNALDIVLDSVELHFECSKLKPEKIVYSAENETATLEFAQEIPAETQGVLHMSFTGELNDKMKGFYRSKYFGPNGEERFAGVTQFEATDARRCFPCWDEPAIKATFDITLVVPKDRVALSNMPVIKEDSLPDGLRRVRFDRTPIMSTYLVAVVVGEYDYVEGKSDDGVLVRVFTPVGKREQGTFALEVATKVLPYYKDYFNIAYPLPKMDLIAISDFSAGAMENWGLVTYRETFVLVDPKNTSLMRKQSIALTVGHEIAHQWFGNLVTMEWWTHLWLNEGYASFVEFLCVHHLFPEYDIWTQFVTDMYTRALELDSLKNSHPIEVPVGHPSEIDEIFDEISYNKGASVIRMLHDYIGEDTFRKGMNLYLTRHQYGNTCTEDLWAALQEASSKNVSDVMTSWTQHKGFPVVSVESEQTSKNQRLLRLKQCKFTADGSQADENCLWVVPISVSTSKNPTGIAKTFLLDKSSMEVTLDNVDEDDWIKINPGTVGYYRTRYSQEMLEQLMPAVEKMELPPLDRLGLIDDMFAMVQAGHASTADVLALVDSYRNETNYTVWTAITNSLTNLHILISHTDLMEDFHRFGRNLYEPVAYRLGWEPRDGENHLDTLLRSLVLTRLVSFRSSDTIEEAKIRFRRHVNGTELLPADLRTTCYKAVLQDGDEKIFNEMLDLYRATDLHEEQDRISRALGCCGDLKLLRRVIDFAMSSEVRAQDSVFVIVAVAINPKGRDMAWEFFKENNKQLLERYQGGFLLSRLIKYLIENFASEERAKEVEEFLQVNQIPGCERTVSQAVETIRLNAAWLQRDREQLAIFLRDDQ

SEQ ID NO: 16 - DNA, 26781 bp, DROSOPHILA
ttgctatcaacatccacataattgcaaatactccagaggcacgcgctactggcaactcccacattccctcccatacgcaacccattccaatttcgatacgatttaatcggcactcgagagttgacaccccgcacactaattgccgcaacaccctcgtggggcattaaggtcttacctgataacagaccgcaatcgaaaccgaaatcgaaatgggaatcagaatccgagtctgaatcggaatcggaatcggaatccgaggcgagtcacaatcaaaagcccgagagtcgcgtaattgcagatgcaaatgcgattacactaagtagcttgtctcgataataaatgtgctccccaaaatgggtggtggctagtgggtgggtgggtgttgaataacctaatcgaaatcgaatgtaagccttgctttctctttccgctcgccttgccgcagaacattcaagttcgttttgttctcgcgtcgtatacgtaattaactacatggcgtatgctaaatgcatattgtggaatatggaaaacttgtttgtaggagcttctagcagttacttcacttacattggcaagttttgaaatgcagctgctttgtttaactatgaaaaggagttcatgtgaactaacactgaattgaagggttccgggaagcataaacaaaagtagttataacacacatattcgacgcaatgtgagatgtgaaactgacatatgagttgctcagtatgcattttccagaatctttgtaagtgtattccagtcgtcgcttggaactctcttccttctgctctccgacaccgctattgctttccctcttccgtacccatcgcattgttttaaacgctcactcactctgtcagtaagcatatcaccaacaggttttacggtttaatgactctccggcttacgctctcccagtctcccactcctctgggtagctctcttccgttcgcactctccgcaccttcgattctccacttttcttctgcctaacgctcagttttatctggaactttgccgccgtcagtcatttccaacttccatgcggcgtgtttcgggtttatttttcgtctaggtgtaaacatttctaattagtgttgtgtttggtgcagtagttcttccttccaatctttgttatcagtcgcgtagtgctaatcgactctatctcaagtgcgctggtaccgtaaaaggtctccgttctttttttggccaatcacttgtatcaataaataattaggggctatcgctccgtgtttatttcgagacataatttaattccagaaagcagtgaggcggcacataagaggtaagccgatagctcagggagaatgtgtctttaatcttaatgcatctgcctccctctcccgcacgacacatctctttcactccgacaagtggcaataacatgtcacaagagcaagtgcaagtgagagggagacggccagcgaaggagacaggaacagagaaagcggtaaagttgaaagaactcgacgagataaagcaataaacgaatattgcagcaagtttgcgcgtttaaaaacaattgcatttccatttaattttacaacgaaaatcacgatgctgcagcagcaccaccaccaccaacaacaacaactcaactcaattaaaaaccttcggtgaccggcaaaaaaagatgaattgaattgtgcaaacagagagacagcaaaaacaacaaacacaaacttcaccgtcgcttgtcattactctttttttttcattgggtttttgctcgtataaatcggatgcgattacagtaaatatcgggtaacacatacaaccggttaagcacaaaaaacattctgttgaagcaactttaaaaaataaatcattacaaatcacgcgtcacggtaattgacactcatgtttatgcctttaaacttaaatatactcctttaaatatttatatgtttcgtgtgaactgtatgacttatgttattattaagggagtatttatacacaaaataatgtatatattgtgtaaattcaatttcataagaatatctagaaccgtatcaaactcaactgataagtgtaatttacaactcccaagctacaaacataaactttatgaatgacaaagtttgcgttgatgccgagtggtttttgtttgcggaaggcaaatacaattacagattgcggttaattgtggtttattttctaaggtgttatcacatcaatgccaagtgtttctttaacagcgtacttttaaattatattgtgtcacttccagaaaattgcatcataaaattaatatatgcacatttgattatgtttttctggatttaatagatgacttttaactagctgactagaaatatgatgataggaaaattattgatttaacatgacatgcaaaaagttaatctctttcttattggatctgcacaaaagtaacgaagcgaaatcggaattttaattatggaatttataaaagctaatcttaactctgggctaattactcacttaattttcggattttccaaatttgttaatgtttatcttaaccaacatttattgtacctgtttttgccaactttcggatgtttatgatatttatggcccttccacgcgactaaacaaatgccatccaatttattggtgaatctatcagaacaattgcctgcacattttttactcaactttattaagcgatattttcgagtggttttaatggccaacaaaaatttatgtctgtatgtaatgaattgaaattcgatgacgggcaaatgtggaatgtctgcaaattgataaacagaagtcggttgcggatactggcacagaatttccagaaggcggttagaattttatgaactgcatcgggattcctattaaaagtgcggattgattggctcagggaactctgggagtttgacaatgttttcaattctggaaaccccattcgggtattcagagtgcctcgatacgcatctaagaagaggatagccacttctacaccgagaaaatagggagttgagttctatataatagaatcacatattgtgataagataactagtatccggttgaatttttgtaccaaactggagtaaatttctatgacagttatgagtttattctaaaaatatacatcgaaaccataactgactggctttcaaaattgtcaagccacttgccgattatggtattatattttctgccagtttagtgcaatttcctcgcttctggcttctggcacacctgctcaggtggagccaaactgcagcagtttcctccaaacatcgaatcatgaaaattgcattgaaactatttcaagttttccggacaaagcgaaggcgggatgaaaagtggaaaagcggaagagcgggaaaggctggggacttggtgttagttgctgttttctggcaactgcagagatgccgctcaaaaattcatgagtgcgaaaagccacagcaggaaaagtcgcatatagaagcagttgagagggcgagcaaagtttcgacaggcaaacaaaaatcataacggaaccaaggaggattgtgtcggcggattcccaggaccttttctcttcccgctcctcctggccatgggtttgaatgtttattaaaagacaatgtcactagagaggcgaaaagaaggctgcaagggcagagtgaaaaggacgaaggcaaggacagcggagctcgcgaccagaaaacctcaaaatggcatgaaatgtcagtgatttgacgctcggggagattcgggtagttaggtcctctatcccctccaggaattgctagctgctcatatgtaaagttacagtcgacactgtagtgtaaagaaatagaatccatattagctactcaacaaatcgaagttgggtagttcaagtgtaggatttcatttttcatacatgcacatttttcagtgcttagatttggttttggtgtgggttagcttattccgagattccactgtaggcaaatgccagaacttggagtgaggacttcaggctgaagtcattgtcgtcgggcaacaaaacaaactgcagcggcgcaagaaacacagcagaatacgaatccgaaaactgggaaatgggaaatgggaaaacggggcagacttttgcttttcattcatacgaaattacctgcggccaagagcttaatgccagttggactgcaaaatccgcttaggaagttgatacaatcagttcctctctggccagagatgcaaccactccgagcctccacaacccacatcctgctcctccatttcccactgcatcctgtggcctgcatgtggggcgaggatgaggacgagaacgaggatgggaaagtgaatgtggatctggctgtgcatgtggatgcagatggattcattaaaacgaattgctgcgagtttaaaggcctgccctgcaacgatgcagacggaaaataagaacgtttcttattgcattctcaaaaatatatacgttcagtgcttaaataaatttaacacacattatattataagaaataactaggcctaatagttctctgttctttattatcctttttggagatatttctccctgtgcacatttatatccctgcctgagtgtgtggctgacgtttgtgtgtgtgagttgtttttggggttttgtttcgggactcattgacgtgcaacatatatggtgagggggcgtggccggtctgcggctactggggattggttttgtttgcgccgcaaagtatggaacggctgctggctgcaaggttctctgggacaggatctaaaaaggggctccaatggggctggggctgaagagctggatggatgaatttggcttggctgccttatttcggttaaaagtttagccccatacataactggccacaagtgcagaacgcattaaaactgcaaattaactggagaatagagctgatggtgatctagaaaccccaacgcctaattaggagaagaggttccgcccttcgacttgcattcgtgagcccggctctgaggtctgttaattatttatgctttacatttaaatgcacagcttagactaaaacacacactccaaaactgggcgttccacggcctttgagccgctttccactttcaagtggaaagtggaggggcctgctgctgctggggcaacacttccgcatcgggaaaatgggaaagaaagcagaaagcataaagcatacagctacagtacacacacattcgcatatggcataagggctgctccacacccacacactagcagaaacacactgagaaagccagataggctggcatattgtgcttacgcatacatttgcgcagacaaacacagacccaaagagcatcctacatcctacatccttcatccttcatcctgcgtcctctatcccaaatccgaagtggaaccgagtcgagtccccagaccgactgaactccatgtaacatgttaatgaactgcgccaactgtgtttgcacagaacttagtgtaatgtaatccaggctgggcacagaatcaagctggaaccccacgtgcactgtgaaaaatgggagataaatggacttaaatagatctcagttttgcaaggcgggaaagcttcggtacaagatagttattgattcatcagaatcttcagaaaatcgttttaatggtgccaaaatgtaaatgatataatgctttcttcagtttgaccgcagtgtacgtacccacgcacacccacacacacacttacacacactctcagggacgcactcacacctcaacgcccgatgtgtcgaatgttacgctaaggagtaactttgacatttaccattcaaggcttatgagtgccaccgcagtggaatggtgctgcggatcctgaaaggggaaggataccgtgttgcccgcccgggcaattgccttatggttattttcatagccctggcctggccacaaaactgcgagccaagtgtgacagcgacatggccagggatgaggacccagcagaggacctggtaacttgaatggaggctgggcgctttcgcagtggttggcaaaaggacgaaaacgaaggacgcaggctgggcgaaggaataagtgtgagtttgcaacggcgacaatccagctgggattttctcattttctttttcttggcgtagaggttttcctgttggtacttttgttgtgatagtaagggagacgtgagtgcaagggcctcacacacaggacatcatcaggtggaaaattaaattgcatttaaggcaattgacaggccaagacgacgggccacatgtgccgatgaatacttctggaaggtggaaaatgccttcgccaattattggacgcaaatctagcaaaaggatgagcgcactctctgcaatgttgaatagagcttattggtggaggcagcagcttgcagcagcggaaagtgcaccgccttctatttttctatgtgcaaatcaggtgcagtagttagacgtcatgattattcatactgctggccgaaagtcaggacgactgggtgataacggagaatgcgaggagcgaggggagagttctgcccactgcccacttgcacttcctgcagtgtcatattaatttagtcaagtggccactcaaatttagccaggactacaacttggctggagcaagagtgtattgggggagggagatggcaaggcaggactgtgaggacgttaaatgtgcaaatgacagtgccgtctctttcttcgccactatctcgcctctctctctctttatctgctcgcctcccgtcgcctgccgtctctttcgctctttgaggctgtagtgtctgtgtgagatttgcataagtgcaggggtattagtttgggtagaatgtcactgacttttgtcagccgcccgtcaaatgggcgcccaaaagtgtgcaaagcgaaagcggtgaaagtagaaccgagtagtaggcgaaatgggggggggggggggggggtgcgactttccggggagagaggggaatagcggaaatgcctaatgattacaaattgccaggggcaattttaataaccgcgacgaccgcagagcaataaataaaactcacaataaacacattgcaacaaaggaagtgcggggtggcaggcaggcaggaaaagctagaagctaaaagcggctttaatgcatagctgcgattaatattaatttcatgcggtgcagcgctcagttggaggccatctattcatccagccaagtcaagtcggctaagcccagccagctttgagtgcggtatacggccggggcaatgtagtcgtgcagatgaagatgcagatgcagatgcagatgcagatgctgatgaagtaaagttgatttctctgaaatgggcgggaaaatgggcggtgaaatggggctcaagctcgaggacaatgccgccacatcatgcgcatcattagccgggatgcagagccaactttgaagactccctgatttacacgcagagaaacactaattagtactgcagtttttacttgttcttaaattttaatcaatttagaaactatgcagatggtctatgattcgagaagtccctattaggtacacagcatctcaccttaaatttaaaagaaaactgtgttttaagcatccacttaaattgcgtaaaattttgcaccagtgcactcgcatttagtgcagtctgtttcgccttccgccatcgcattttccagctcatttcgactggcagagattttccttgttcggtctgttcatgtgcttaagcttgagctgtggcttcatcccaaatcgctgctctgctcgatgccagataaccggcttctaattggtatcataactctggggccacagcccgaattcgatatactcaagagctcttgtcttgaaacgccgctcgccagaaaactcggttcgcacggttttcccccatttgcatattcattttccacataatcatcatcattattatcgtcaggcccgtgtgtgatccgcactgatggaaaactatcaaattcatggagtaattaacagagctgcggcggggcaaaatggaaaatgggaaacgagaagcggacgggtttaccagcatttgggagcctaaaaatagaatttaatttgacttttgccagttggcagacgtacgtacacctgtgcggaaatggcggaggatggtgatggtgatgggggagggatcgaggaccaagttcccccagtgatgtgctgacagcattaatttaaatgcggttgtgtgattttgccgcttggcgtgtcagccagttgcttaaagcttaaagacaacattgcaaattaattcggcaaaatcctttaacctgagagagaattaaccactggtcaatacttgattctgcttagtaagagtacttattttccgtcagttgttagtactgttaacttctggaaacattgaaagttacaaagcactttagcaattttaacacaacaactgcagtgttaatgcacgtagttttaaaggcattattgtttcaaaaaagaacgcaactttggctaaaagcaaatattaaagctggtgtgctaatggaatcaggtgattagtgctaggaatgcacagtcccctttgaaagtaaattccatgttgaaaagctgcagtctgctggccccattcacttatttccccttttttttctattttgcagctctccggtgctcggcaaacgacaaaactaatttatggcattaaaaatgcatattttctagcagtgcgtcgacagtttttatcatttgccagaaaggcaaaaggcgctatccaccagcagctgtgccagaaaaggaagctaggaagacacgtcggtcgagaattggatttgactgcggaggattttgaatccgagtccgaaagttctttagtcagcaaccgaagaagcgtaggataattcacatttttctcacggcaactggcaacgaaatggctttcctatgtgcaccggtaagtttcgctttatttggcttccttttatcccccaaatacgccatacatcatgactcgatactgcagtaaaaattataaggaaatggtttgcacttatggcgaacatcagtcttaacgtgccatacgtcgcgtatgcgtgatattttatccattaaacttttccgcgctcgtcactcttcgttcgcaagtgattttaataatgtgaaaaatgtcagatcgttatgcttaaactgccgcatgaagcgttatggtcccaaactcttgcattgatggattgcaggcggccaaattaatcatacgccgtgtgtgctgcaacagttatgccgctttaagagcgccgtataatgatggtgagtgcttctggggggggggggggtcagtgaaactgcggcatgttgacaaataaacatacgccataatacgtgcaaactccggtcgagaataacgaaaacaacagctacggatggatagatagaagccgaaaattgagagtttgccttgtattaacagctgcccgcaatgtcaatattcctcgtagattcccagccatcccagggatgcgggatgcggcgaatctgcgaaagcaacaagcagtgacaatggcgtcgtcggcatcccaaaagccaacagccaaggcaagctggaggcccatctgccgaactgtgggccactgagcatcctggcgataaccaatcattaatgtttcaaatgaatctaaaaaagtaaatccatcttatctttaaatatagaaatcttagcagatttctttaaatctgcatctatgcccgagagtatgccacgtgtcctttgaagaaaaagaatatgccttaaagtaggcacttataagtttttataactagactcctctgaccaaaagtatgcaaagattttcgaattttttttcaactctcctcagaaattgcaatatttctactatgtggctccactgttcgaaagtcgaatccctttacgccagtgccgtcgactgccggctgttgtgagtgctgattgtcaagtgctcgacccagacacgtgcttacacagctatccacagctattctgcagctgccacgccccattccgccgcccctctcaatatttgttgaatttcgagttaagcaaacgtgcaagtgtatttaatttgtgatatcatcgaggggctgaaggggcagcgagcggactgagggtggactgggcagcagtgaggtcactcggcttacccgatccttggccaagggcttcggtatggcagttctgtgtgtcctgtacgtgtgtgcgtatggccattaatgcagcatttaaggattttgcggtctgagctgcaggcacttcaatcggggagagggcgaaacaatgccacattcaagtgcatttgagcagcaataatttttgcggtgagcagagacaaaagcctattaatgaacacacaacaacaacagcatgcattctatctgcggttgcaggtgtgtgcgtttcatttaatcaatcatgtatttagtagacaaatcgcttaagacaaaagccccccaagaagccgagttaaaaagctttttatcattggactcgcacatgattacatgattacgtctccgaatagaaggatatcaatctctctataaatcaggaaagtgggggggaagccccctttggattgtgcggctctttaattgaattttaaattacacccatctcgaaaaatgattagcggcctctcatgcataaataagttttcgattctgtgcgctaatttgaattgccgtcgaaagctgacaaagggtatcaattatcgtggtcagcctagaattatgccacaaggatggcataatgcccgattactcccgatgggcaggacgagccctagtccgcccagttggaggccacttgtcatagctgccagaacaagccatgcttcggacttttgtcagtgaccaggcctccaacttggtgcaccgcaacaaaaaaaaaattgggaactactatgtcagaaggctctctagatcacaaagttttctaaacgcaaagtgaagcttaaaatggcaatgtttgaagcccaacattcttgtttaagacaaaccttaatcttctgtggcaacctgactaataacttttgccgttgactctatcaactttcatcttgattggccataaagtttggactctggcaggttatgtgtttgctactggtatgtgcaatttttggatatttttccgtgtatgaaggcggtctgcacttacgccctctccgcgcccatgaataactgctcaatgcccaaacacacacacattcgcatggctgactgcttgcgtcatcagcatcgtcagtggagtatcagccttggcatgcagtcaaaacgcagcttctgcccctccgcactcgcctgggctgtgcttcacaactatttttctatgtcaggggacaggatgcaggacgcaggacacaggacatggatgcaactgccccagactgcggcggaggccactggatgtcatcaactttgctttggctctgccgagagcctccgcaaaggcagggcaaacaaaaagcttaacctcagcacaaatttaagcaaatatttgcccggcctccaccttttcccctcgttgggcaactccactccttccccgcgtctgccttccatttccattgatgcaattgaagccggaagcagtttacttttattttgcccctttttgcggtgtcagcaaagagtttaacattaggcaggtgcaaggcggccacagagagagaaatcgccaattagttgcacttgggtgaggaaactttaagaagcaatcaattaattattcccaaattaagctttcttcggcatagatttggcttacaagagcaacagttatcttggcataattcctcaagatcgagcatatatattttcaaaataaagagtacagtggttataaatccacttttttttccccctgtttctgggattcacccgacccgtcgaggaaacgacattcgcctgatgcatgcacgattttaatcggttaaatgccaggggaaaatgggggagatgcaggccatatcttgcgagcagtgccaactaatgatgcgcaaaatgtttacaaatcattttgtcaataacgaggaagggataaaggacggaggatcctccgccatctgaatcggcccataatttgcccacatttcttgcattcatccgttggatggagcggccatgaaaaggtcattagtgtgtgcgtgtgtacgcaagtgtgtgcttgtgtgtgacacaaatggccattcaatatgccaagaaaggggtcgtagaaaggggggagcagttggtagcagaggggggaaggacatgagctaaagccaaagccataacagccacatgcttttttccacaacattaacgcaaattgcaaataataaaaattcaaaataccgaaccgtagaaaaagcagcacgtgttgctgttgttgtgtgcccactgcggtgtgtgtgtgtgtgtgtgtgaggcctcaagtgggtggttgggcgtgtgtaaggacgaagtggggtcctaaggaaaaaccacaacaacgagaagccatgggcacatttatcgcagccaacgaggcattttttaagtcctgcaaaggtttacatatggccaatgcgaaaaaaaagtagttggaaaggaatggggaaaaaagcgagcactacggaaaactgtgttgggtttcccagggtgaatttcctgcaattgagccctaattgatccttttgcggggaagccttgtaggaactgcaagttgaactttgccaatggccaagaagacagcgaaatgtaagagaattaagcgagcaatttgtgtaaaaaagattcagttacgctgccaacaacatagttcgattctttttcgtaaattatataaacaagttggctcttccaatagggtaaccggatatatcttcgcgttccgcggtactcgcttgattctttcgcttgccagggaatcaaaatggaaatctattttatgcggaggcacgcagcctggccaaatcctgcggatcgcccgcccacgtcaggggttttatgtgtacagctgtacatatatatgggcggggtccttttccttttctcaggtccgtgactggcgaggcgttggcgtaaatgctttgcgtatgcatccatgcatgcgacgccatctcgtgcagcctcctccgtagtccgtagtccgtagtccgcagtccttcgtccttgttctctcatccgccatcctggttccctgctctttggtccttggtccggggttgcggagctggcatacaatttatgtgcgaaatatggcgccgcacaccttttactttgcgctacctggcttttctccgcagcttcctttgccgtcagctttccttgcccgtttcttttgccgctgtttgtggccaacctgccacgtgcgggacaaaattaaaagcctttgcatgctccacttcgaatctgaacgagtcctgcggaagtcttattcattgcagctgcactgggcacaacttgcggggggtggggggtgggatgctccaagctcgaatgcccatttattgagtgaagcgcaaagactccatcattggtgggaaaaatcgattgatgcgattgctgaggacattataatatatcttaaaataagtatcttccatccatctaacggcatgctattcttctattttccccgcaacgaacatacgactgaaatagctggccagaataatgacatggcgaccattggtgacctttcgatgatctcaccgcccacgtcttccatttcgaacgaccaagatccgtttggacagctgcccccgctaccgccgccactgcgttccacccaagtgctccagccactgagcgtgtttccaggtgcccgccaattattttggaatttttcgagatatttcacgatttttttgaattactttctgcatatttgggtgctgtacatatgtgcgccaatgtgtgtgtttgtgtttgtttgttctccccgttgtttgcctgcagttcttcgccttttgtttgggcattatttgtttgatttccattttttttttttttgttgccaaagtttttgtgtagctttttccgcccattataaaagttactgttgcaccttttgtatgaaatttctgatttggttttctttgcttttctgttgtgccatttccaattgattgcaactttaattggtgtgtagattgggtctttgattggtcggttcgttgatttatttttcattcatccacacaccatacacctgcatacactcggcctgctccacgtgaccaccataccactcgtaacacgacactcatagtccacctgtacaggtgtaatactgtacgaccaccactagctacactcgaagtacaccgccaccgagaaccgcattttgccccaaaacttttgtttagcattttcagcagcattcagtcgatcaatcaatcaatcagtcaaatctcaaaaaccaatcagtcctacagtcgcccattaatatatatcgaagccgactttctctctctctctctctctcccacacacactttctatctctctctgtttgtctagttctatatatttgcttgccgtttgtattgccactttttgactatataaaataacagatttgtttgtgttgccacaagaacccggttgatttcaaagtttcgaattttttcaagtagtttccaacgctgctgtgtgtgttgatttttttttgacgagattgttaattagagcgcagccaaaaaacaaaaaacgcgtaatggctgtctcggccgctttgcaacaatttttgaacgctaaaattatctgtgtgtccatcacctttacatagctgcctttttgtgtgtgctgtccaacgtgaaaaccgaaatccagctaacaaactgccacattttgtgctctctctattcttccataaataccaacaactacaacaacaactatgaactacaaactacaacaaccaccaaatgataaatgaaaaatgaaaacgacaaaatctcgacaatctaaatatttgccttggttcccatgtttattttaatgtttgtcttattttaaacaatatttgtgtatcgcataaaacgtgtgtagagtgagtataagagataacgaaaaaagaaacaaacagcttgtggtattatttttgagtttgttgtgtttaatttcggttaagtttgtgccgctctctgttgtcctttatttgctgcccccccccctgaaaagagtgtctgattccctcgatttgtaattctaaaacaatttcccccccgaatggcagtgtccaatttgagcgaagattcctacgattatgtttttggtggtcgacgtaagactccgcccacaacaacgtctacacaactcaagctgacctcaccgccagtgcgtttgcgacccgaaggtgggtagtccttattgggaagagagtcctgcatggagcttgcattgtcctgctcacgctgcactcacgattggcattggatattcacaagcgccatgcaagacattctcttgacccccccagccacacagatcacagatataaccagaaccattctgttatttcaacactgccactctgtcggcgaacccatagacgcctatcgaggagccaacataaacaacggaaggttctatcgccactccttcagctacgcccccaaaaggcagcgccactcgagtcgggatgatcgagaccgcgagtctaggttgagatgtcatggcgaggatgaggccacactgcgccaattgctgctcgagtacgtagaaagtggatcctgaatcgggagtcccggggcacagagtcctccgatccgctggcaggcgagtggttttgacctcgtaatggacccgttgaccttcggggccaggagctcattacgggccattaatttgctggtgcgaccggaggactgggtggccggccataaatatgcgctttcagttagacaaataaacagcaattatttgtgtgcgccatgtttatttaatttattaaacaaataacgaacgatacgtgtttttagttcgggcgcaaataaattttaatttccgttttaatttgtgtgcctttcggtgggctcatcccttttttcggttttatttttttgtgtggcctgtgtgatatattaacgagcaaatatgcaatgtatatgtttaatgttctcctccctcacagatttgcgcaagttatgttcagttaagtgtcctgcgtgtgtccttagactgtcaattattcattgagggcctttgtgttgtgttgtttttgttgcgcaaccttcccgacaaaagatatcacatatagaccccgatatcaaaaatcaaccgcggccatacgacattcaccaaaccccgaaaagaaaagcgattaaaagcgagaagtgagcagagactttaagagcaactttaaagcaacttaataaagatataataattgtaaaagagactctataactaatcaatttatcgacggagtgagtccaaagaaaagcgaacaaaatgatgggcacaatgccacccaggtacataacaatagagttaatctaaaaattaattaactttaacattaacaataacaatagcgacaagatcgcgctgcgattaaaatcaattcgaacatcactcatccgccatgtatgcagagcacacgtttcgttttatactttcgtttcattaaccattcatcgatttgagctgattgtgtggcgcattaataactgtgttcgtgtacatttaaatggcttctcatcgttaattaaaaaatgttaattagcagcatttgtttgtcgtttgctgccattttgcttacaccagaccgcctttgttgctatgtcacgcgctgtacaaaattgcaattcaatcgaaacgtatttactttgcttgaacgtcaccgagtgattgagcacatgtgtctgtaatttgatttccaaactacctgtcaatcacttgagtacatactagggatggcaaatctacgggaatcggattgacaatgagatttcctgcgatataacatctattttagaatagtgctttcaaaatgttgaacaacttttataagtaacagggaaatacctcgaatatatgcaatattttgagcaaataaatattatagattaaatgctaagattaggtagcagaagataaagaagtcattgcaactagaaaatacacttaaataattattaaacctataagcttaaaattttacaatttttttaaagtgttttatgtgtaattctaaagtatcgacatatttggcatccctagtatttgcgtgctatgtattttctcctcctgtgaatatgtctgcattgcctgaaatgcattttgccaaacgcaaacgatgcaaaaccgaaggagaattcggaattctgatgaaatgcatttctcgcgtgcattcaaaactccctgcctcacattttgtacaatgtctatacgtgttctttatcatccaattcccgaaccgccctttgaaccactaaaactgccacaataactccatgaacaacaacaacaacaacaataacaacaacaactcaaccatcgaaaacaacaaaagccacacgcaaagtggcctggtattcacaccactcaatgagtatgcaattacaaccaactaacttcaattacgaaatctaaatatttttgctctattcccctcgtcatattgtaatgcaataataatccaatgatttaccccttttctccgcattttgcactgctctctattttggcactcgtagcccctcaaattgatttgttaattattagaacatttgcccgaaatccagtcactttgctatcccctttcgcatggattgcaattagaattcaattatgttcaaataaattaatttagtttccgaaacgtgctcatcatctgggtggaaaaaaaagagagagagcgttgtcagtgtgcgtgtgggtgtcggtgtgaatctcccattttttgggaccacttgacaaaaccctcgagaacagtacagagataaaaaaaaaaatggccagaaaaataagtagttttctatactaaagtagaatctcaatatgtgctccaatggaatgttggaatatattttatgttcttggatatttcttgaactctttaaaagtgtgatttgtagggcacttcggatataaaagttaaagtaattctaccgaaatgttataccgcaattaaaaagtgccaaaaaagtacggagtcatttatttttctctgtgctgttgccaggaggctgtgttttttatgacaagccgaaaagtgtttgagggccattaagtcgctgttcgcaccacacacacacacacacacacacaggcatacacactcacccatactcgtgcgcaggcatgtaaagccattgacaaacatcctttggccaggcagtcaatcagcctgcggttggccacttcagcagcgctcgctcttattttccgcccgccactttccgccccctgcatgtcatcaagttcataattagcttaacctctttaccccccaaaaaaaaaacccctttcgtgcgtaatcccctgccaatgcatcactcagtcagtcagtcagtcagtcacacaatatctgcaggatttttcaactcgtttactgtcccgcctcggtttttttttttgttgttatttgtgttttcggttccaatgtttcgttgctgcaatgaattactgtactgtacactttttatggtttcatgtttgtcgatgtttaaaagtttgccacagacagaacccagactaattggcgtagcggttccttcaccaaaattaaccgaaaaccgagagaaaactgtaacaagcagatactacagaacatttgttttccgttcattcgttcattttggctttgcatatatcttttaccgaaagcgaactcaaacaatttcataatccaaacaaaatgttaatcatgccaatcataaaatattgccttgcaaatcgaaatcaacgagagcacaaataaattcaaattgatttacaaatgccgacgcaacgcgggctgtgcagcaaaagtttatgagagtcgacacaaaaaacaggctgaaaaacaagtgtttgcaacgtttggtgaatgtcctatatgccaattggtttgaacaccccgttttcccggtttcctgctttccctcgatttccctcgatttccctcgattctccttgtttccccaattcgaactgattgatgaaccttgcatacagctttgcgagatgtatgagaacaatcgattttgattttaatttattcgctgaatttattgtgtgcactgagatctgaactgaactttagctgtaagtgaagcgagtctggagacttgacggatggcgaactctggctgtggactttcgcagggttaatgtgattgaaatcctgccaaaggataatccgcttttcttcttgtcaaaaatgtgatattcctaaaactgagcgcagctttttgacaaactcaaagcgaaaagaacatctcgattggaatcccgaatcccaaaaccagaatgctgaatgctaaatcctgaaatccgggaatcccttcagccggcgggacacgtacactgccggttttaatgaatgcacaagccggggagaaattggcagaaaatttattaaatgctcacgtatacaaatcccttgtacaaaaccgaaaaccgaaaatgcctgcatctgacaagcacacatacacgcacaggcagcaattgttttcgcagagaacaataacttgaacaggatgcgctcgaatatctcgtcctggttctggttttgctctcgattctgtttcggattcggtttcgccggctgatgtatgcataaaataatccttttatgctcggcacaacaatgtccgtgaaatgcaaaacaataacagtactaacgatagcatttccccgccttccccgcaggatgcccatgccctccttctgcgttgcattaacataatgcgcaggcaactcaagcagggcccacgtgtcgtatgcgcaatgtgggcggcatgggttgccattcatgcacccatccacccatccggtggcaactgtcgccccaacacttttgttgccatttgatttagatgcccccccctccccgcacaccaaacaaataaagcataaagtgcatcttccgatgcgaccgtcgatatacaatatatctaaactaaagcaacccgaacctataaggcttataatacattttttctaatatatagtgtgcttattttgatttcaaagatggatgaaagtgcaaaacagcagctgttgaattcattaaaaactcgggaaacctatctcgatctctaatgtggttaagttagtcagaaagcgcattcataggcattgttttaagttgcacaactttggatgcagagcaaaaggcgcggccgatttgttttcacagcctttgcggttgatgaaaatgtaaatttgatgcattccaagaagccagaaccagatatgaacaagattaaaactacaactttgtcagggtcgctccttccatccatccgaaagagttgccagcagaagagcggaataaatggggccagagttcggagctcatgcagcttaaatataaatactagcgtatatatgtatgtataatgccgtcaagtttccatcctcgtgcattgtacattactcttggcttaaccttaacgaaatatgccaacaatttactttaagttactttttatgtacttagtggcctggctcggttattattgttgttctcggtccgcccaacacagaaatcctttcttggacttctgcccaaggagctgagtgactaaggaactcgccgactggcgtgcgtttctgttcggtttcagtttcagcttcagcttcagcttcagtttcggtttttgtttctgctcctcggcttcgagccgtggcccataaaatttatgttgcttcattcctcaataattgcatagctcagtaaattttaatgcaagcggtcataaataatttcgttctgtttgtgtttgtgttttgtgtgtttcgttcacgatttgcgttttgccatttgcgtttactctgggccagagcgaaataaataacgtatacgctaaataactctgtctcagtctcgtagtggaataagtactttaaggaatgaactcgaaggcatttcacgaccggcgcacgactaaaatgcattttgtttgatattctctttggcctttgactcgacgcctgtgctgtgaccctttgcccttccactgacccaccacagtttgcaaaagcaagttagcgtgatgagcatgaatctgtcagcgaaactcgatgagctgcagcggggagatcgacacctggagacgacggtcgccctgtgcgaaatccgcacccagctccaggagctgaccaaatccgtggagagctgccagagcgaggtgtccgaggtgagttgggagtcgagaatcccaataatacctggctaaattgcttagaatttgtccaaaaattcgctgtacttatttatatgaataactaaaaaaaggattcgttgcttatccaggtgaagcgcgacatggtggccatcaagcacgaactggacaccgtgcagcaggtgaaggaggagatcgaggagctgcgcgaatacgtcgatcgactggaggagcacacgcacagacggaagctaagacttttagaacaagtttgtagcttaaattatttgccatgttgtgtaattaaatacttgaatttcatttctctattcatgtacaaaccgaaacaccaagaaccaactaccaacaacccagagccagacaaccacacgaccaaaaaaccacccagaactacccgaacatccatccacccagccacacaaaaccactgacggcagaaactgccaccatgacggacagatgcaaatgctcttcggattggcctcagtttctgtccacactcaaacaaatttatcccctataacgacttgaaaattggataaccgaatttcattggccgaattgcagtataaaaagtacttaacagagatttgtttgagtgtacggcacacgtacagacggcttcttcatcaacgtatattaaatattagctatctaattagttttgtattatttatttttataagttctgtagcaaaatcaaataaatatatgcgaaaaatgttaatacaacttttattttgttcaatttcattgatttgaagtatggtttccgacatccgaacactttcatccatcagaacgtatcttattgtttcgttacccctgagtttcaattagaaaattggccttatccaaagagaaagctttggtttccttgacgcacactcgtttgcaaagcgtttgatggacccgcccgcacatcccccaccaaatccccaccgtcccgccccgctcccccgctgaattgttcaccactaatggtatttaccaatcaaaacttccagggtctcaccttcttcctcacctactcgattttctcggcggtgctgggcatgctgcaattcggctacaacaccggcgtcatcaacgcgcccgaaaagaatatcgagaacttcatgaaggacgtctacaaggaccgctacggcgaggacatcagcgaggagttcatccagcagctctactcggtggcggtatccattttcgccatcggcggcatgctgggcggtttcagcggaggctggatggccaaccgctttggcaggtaatttaattgtcttatatcaatagttttataccaaactagatatgatatcattgcttaaatggtttccatttggttcgaattgcagaaaaggcggcctactgttgaacaatgtgctcggaattgccggcgcctgtttgatgggatttaccaaagttagtcattcctatgaaatgttattccttggccgatttataattggtgttaattgcggtgagtgattattataaactaataagttcaaatacttactaatgggtgcatggatttgattcgaaggcctcaacacttcgctggtgcccatgtacatctcggagatagcgccactgaatctgcgcggtggcttaggaactgttaatcaattggctgtgactgtaggtttactattatcccaagtgctgggcatcgagcaaatcctcggcaccaacgagggctggcccatcctcctgggcctggccatctgcccggcgatcctgcagctgatcctgctgcccgtctgcccggaatcgcccagatatctgctcattaccaagcagtgggaggaggaggcgcgaaaaggtacaactcctgtgtaatctataaactttaagctgcatcttttaacaaatccttgtgtagccctgcgccgactgcgagcctctgggtccgtggaggaggacatcgaggagatgcgggccgaggagcgcgcccagcagtccgagagccacatatcgaccatggagctgatatgctcgcccaccctgcgccctccgctgatcatcggcatcgtgatgcagctgagccagcaattcagcggcatcaacgccgtcttctactattccacgtcgctgttcatgagctcgggattgactgaggagagcgccaagttcgctacgataggcatcggcgccataatggtaggtttcgagaagccatcatcaaacgacctcagattctgagttatgtgtgttactgtatttttgcacaggttgttatgacgctcgtgtccattccgctaatggatcgcacgggtcgccggaccctgcatctctatggtctgggcggaatgttcatcttctcaatcttcatcaccatttcgttcctgatcaaggcaagtatagtggtgtccaggattcttgagtcctgctcttgctcctgtagagtaatgcctgcgaatgtcaatgctaagatgcctgccagtttgggtttgcatttgtttgtcccccgcccgttcagtgatttgcatatgactctgaaatcctagaaacgctagaacttatatcccatatcccatttcccatttactccaaacgagtgcgtgcgtttataaatatttgaatattaatatattttatgcatgaagttgtgttttaccccttcgagccctcaaaacatgaaaaaaaaaaaaaaaaacagaacataaaaacactcaccaacacacacgtaagagcatgacagttgtcccgcgcgtatatctataaattattgatgtgagatatatttgaatttataacaagttggatttatgactctcgcccagccattaaacaaacgtagcctttttgtgttttttccgtgcttgcgttgatgtattgcatttaagtcatagacgtatgtgtgtttaatttataggccaaaacttggtcactttagtaattaattacgtcctctatctgcgatttgaaaatatgtttacgcagattgtggcacatgaatgattagctttggaatgcttttgtgttagttatgactttttgagttttttaccgctttccaactttgtatacacagtttgcacgtggcttgccaatagatatacaatagttactttttcagttgcctaggctaagttgttgcgcctgtgagctggaccacaaatacctatttaatcaggcacttgtttatggatgtgtcaagcatttaaagacaagttcctgatttcaaatatcccggccagccccttgcgcaactgtcccgcccctaattagtgctattctcgacttggcaggctttcgccccacaaaacactcactcgaaatcggttgacgaattcgttctgtttatgatttatacgctttgttttccgctagaggcaatccacacagtttcaaaggcaagcaaaagtttcgacaaaaagcaaaaccaacacacaactgagcaaaagttttccgggcaccagttccaccagctcccccaaaatggagaaaaacatagagcagagcaccgcgctgaactcgctttagaggtgtcaccacctcccacacacgaaactctcacatagaaaccaaaacactcaatgtgacctcaagccataatttatactctttgtttggtaattgtgtaagatatagctaactttgcaactaagtacaacaaagcattcctaagcattctcagacccagaaagactcgagcagcagttcagaggtcaactctttgagaaccaagaaaacgagagcagccaacttcagctcctatcaaacttaatactttcgataatctaataaccaactcatgcataaaagagatcaggcttatctagggggttgtgtcttatattcattcgtattatttcgaagacagttcgttaagcgcgagtagaggaaaagcctacatcgagaatgcgagtactatgcattttgtataggagttctttggttatgtgcaggaaatgatcgactggatgtcctacctctctgtggtggccactctcggattcgtcgtcttctttgcggtgggacccggttcgataccctggatgattaccgcggagctcttctcccagggaccccggcccagtgccatggctattgcggtgctggtcaactggatggccaactttgtggtcggcattggtttccccagcatgaaggtgagttaaacgagctgagctttcatttagtacaatgctcgtcgtatttggatgtgacatattattcactttttacagactgccctggagaactacacgttcttgccgttcagcgtattcctggccatcttctggatattcacgtacaagaaggtgcccgagacgaagaacaagacgttcgaggagatcctggccctcttccggcacaacaatggcaggtatgtgtccttgcactagctcattctacgctcaaattctgcacacaaatcatggcaatatgtcgaatagttatccagctcataacttaaactcaactttcttaactgacacaagaaatgcgaactataaatactataaaatacaatacagaatctttgtactatgcccttgattaccattacttggaagtttattatgcggtttgcatagccaaactgatccagtgaaccgcttctcaaggatcggttcagggttcagaagttttgatttcctttcgttttgaaattttggttccattttgttttacgaagcaccataagttcgaaaataaccctctgacttgaaatacgttccatgtattcctccaaggacctttcgagatagtagactgtacgggtaagttgcatgaagccaccgaggacgattgatcagactcttaagctccgaatctaaaagatcccccattcaaaatcaaatattagatccgatgcgtttcgctctccaaagttccaccttaaatttgtagctcgtattgctgtactttatttagccactttatgtacaatttttaatcgaaccaaaaatactaaaaacaaagctaaccgaatcgaattgagattgtggattcctgcgctcaaaagtttctatgaatttttcggcatgtttgcttaactttgcctgtactttgttacaactcgttactttgttactacaactacaaaccataaacaactggctgccgtaaagcaaactaaataagactcataatagccaaactatatacaataaatacccaatattaaatatcaattttaatactctactctccaactctctctatgcatagctaagccgttacctatacttactactattaagagccgcatctcatctctttctgcccccccatcacgttatccgatgtatcagaatcgctatcattgcgtcccgtttcccctcatagctcatttacaaatcaaattggttggttcaaagtgctccatccatgcatttcattaaagccccacttacactgccacaccacatgcacactgattttgttgcccgatctttgatcatatagcgaggataatgccaatggaaacagtgttaccaccgcggactttgagttgtcgcagaacgatggcgaagagaaaggtggc

SEQ ID NO: 17 - DNA, 2169 bp, DROSOPHILA
cagttttatctggaactttgccgccgtcagtcatttccaacttccatgcggcgtgtttcgggtttatttttcgtctaggtgtaaacatttctaattagtgttgtgtttggtgcagtagttcttccttccaatctttgttatcagtcgcgtagtgctaatcgactctatctcaagtgcgctggtaccgtaaaaggtctccgttctttttttggccaatcacttgtatcaataaataattaggggctatcgctccgtgtttatttcgagacataatttaattccagaaagcagtgaggcggcacataagagctctccggtgctcggcaaacgacaaaactaatttatggcattaaaaatgcatattttctagcagtgcgtcgacagtttttatcatttgccagaaaggcaaaaggcgctatccaccagcagctgtgccagaaaaggaagctaggaagacacgtcggtcgagaattggatttgactgcggaggattttgaatccgagtccgaaagttctttagtcagcaaccgaagaagcgtaggataattcacatttttctcacggcaactggcaacgaaatggctttcctatgtgcaccgggtctcaccttcttcctcacctactcgattttctcggcggtgctgggcatgctgcaattcggctacaacaccggcgtcatcaacgcgcccgaaaagaatatcgagaacttcatgaaggacgtctacaaggaccgctacggcgaggacatcagcgaggagttcatccagcagctctactcggtggcggtatccattttcgccatcggcggcatgctgggcggtttcagcggaggctggatggccaaccgctttggcagaaaaggcggcctactgttgaacaatgtgctcggaattgccggcgcctgtttgatgggatttaccaaagttagtcattcctatgaaatgttattccttggccgatttataattggtgttaattgcggcctcaacacttcgctggtgcccatgtacatctcggagatagcgccactgaatctgcgcggtggcttaggaactgttaatcaattggctgtgactgtaggtttactattatcccaagtgctgggcatcgagcaaatcctcggcaccaacgagggctggcccatcctcctgggcctggccatctgcccggcgatcctgcagctgatcctgctgcccgtctgcccggaatcgcccagatatctgctcattaccaagcagtgggaggaggaggcgcgaaaagccctgcgccgactgcgagcctctgggtccgtggaggaggacatcgaggagatgcgggccgaggagcgcgcccagcagtccgagagccacatatcgaccatggagctgatatgctcgcccaccctgcgccctccgctgatcatcggcatcgtgatgcagctgagccagcaattcagcggcatcaacgccgtcttctactattccacgtcgctgttcatgagctcgggattgactgaggagagcgccaagttcgctacgataggcatcggcgccataatggttgttatgacgctcgtgtccattccgctaatggatcgcacgggtcgccggaccctgcatctctatggtctgggcggaatgttcatcttctcaatcttcatcaccatttcgttcctgatcaaggaaatgatcgactggatgtcctacctctctgtggtggccactctcggattcgtcgtcttctttgcggtgggacccggttcgataccctggatgattaccgcggagctcttctcccagggaccccggcccagtgccatggctattgcggtgctggtcaactggatggccaactttgtggtcggcattggtttccccagcatgaagactgccctggagaactacacgttcttgccgttcagcgtattcctggccatcttctggatattcacgtacaagaaggtgcccgagacgaagaacaagacgttcgaggagatcctggccctcttccggcacaacaatggcaggtatgtgtccttgcactagctcattctacgctcaaattctgcacacaaatcatggcaatatgtcgaatagttatccagctcataacttaaactcaactttcttaactgacacaagaaatgcgaactataaatactataaaatacaatacagaatctttgtacta

SEQ ID NO: 18 - protein, 481 aa, DROSOPHILA
MAFLCAPGLTFFLTYSIFSAVLGMLQFGYNTGVINAPEKNIENFMKDVYKDRYGEDISEEFIQQLYSVAVSIFAIGGMLGGFSGGWMANRFGRKGGLLLNNVLGIAGACLMGFTKVSHSYEMLFLGRFIIGVNCGLNTSLVPMYISEIAPLNLRGGLGTVNQLAVTVGLLLSQVLGIEQILGTNEGWPILLGLAICPAILQLILLPVCPESPRYLLITKQWEEEARKALRRLRASGSVEEDIEEMRAEERAQQSESHISTMELICSPTLRPPLIIGIVMQLSQQFSGINAVFYYSTSLFMSSGLTEESAKFATIGIGAIMVVMTLVSIPLMDRTGRRTLHLYGLGGMFIFSIFITISFLIKEMIDWMSYLSVVATLGFVVFFAVGPGSIPWMITAELFSQGPRPSAMAIAVLVNWMANFVVGIGFPSMKTALENYTFLPFSVFLAIFWIFTYKKVPETKNKTFEEILALFRHNNGRYVSLH

SEQ ID NO: 19 - DNA, 3738 bp, DROSOPHILA
gttaactaacagtctcatgtaaatcttggccattcaactacctcagccgacgaaaagcagttaaaagcagttcggcaaatgcgtctcggtgtttaggcccgaaacgatcccatcccatgccattccaattccattccattccaaatccccatccccatccatatccaaagcaaatccagctaactctgttcctcggatgcaagtggccgaagacgtcacaaaactggtcgagcccctcgtccgccaagtggttctttcggactttggtccggttgggtgggtatcaaatcacatcacatcagatccgaacggtttttcaaacattacaagacaatcttcacacgtgctggctgcgtgctgtcgaaactgaaaatacgcaataccaataaaaagaattttggattcgattccggcattacacaagatcaagcacccctcctccgtcctccctctatccatcgtatgggaattggagaaagcgtagtagtcaattaatttactaatgagagtgggcgttgacattgctaaaacacttgtttataaaaacagcacagaaaagaacattttccttttcaccaaggaacccaatatatatgtttaaattttttgcaatccaaaaaagcttaaatgaaaatgaatttcttactttcaatagttttttccaatatatagttgtctaacaataaattgctccatttctttctgtgtattaatattttcaattatcgaatgtctcaattagttgctggccttaattctggctttgcgaagtcatcgcacttccgtcattgcaattcaatattcaccatatatatgtagtaaaactttcttaatatttcaaattgcgggccttgttcgatagcgttgccactctggttttgctgagctgcataggcatcgataatatttgtaagcaaagtatcgattattttcagatacttttgtccatctctaatttaccatacttttatttaggaaatatttacaaggaataaatacaaagatttgcttattacccgtggattataagttaaaaccacgatgagtgcagccaccgccgccgccgccgcttctgggatccagagcacagcgggcgccattcccatgcgcaatgagaaaggtaaacagcgaagctcgatcctcaccagaaattgtttataagctgcatatctcttcaataggtgaattgtccatgcaaaaggtgaaggtgcagcgatacatatccggtaagcgacccgactacgcccgtgcggactccagttcggaggagagcgacgacgatgacttcattgacaccaggaagcgccttgagcgccacaaggcggaacggcataagctggagctctcccgtcaaggcggcagcgcggagggcgaagagcgggcggcgggtgagggccaggaggaggacgatgccgaggtggacgatccacgcctccgaagattgcggcagcgacccgtagacatggaggacatggaacgtgagcggagggaacgccaccgacacatccacgaaccggaaatcatggagagtgacagcgaagacgaggaggaagacgagggagcacagggagcgattcagcggggcaccaataagatcacactggcatccgaatccgacacggatgcggagctcagcgacacagagctggagaaccggcgcaccaagctgagatcccgcatgctgcagcagcagcgcgaggaggaggttctacagaaagaggatgagaaacagtcggaatcgtccgaatcagaaagctccgagtacgaggaggagaccgaaagcgaggaggacaacgaaccccgcctgaagccgctcttcgtccgaaagagagatcgtgccaccatccaggagaaggagcgagaggctcagaagcagaagcagctggaggcggaggccaagcgggcagccaaggagcgcagaagagccaccctgcgaatggtcgaggagagcgtcaagaaagatctggagaagaccaagccggagaccaatgaggcctgcatcgaggacgtgtgcacggacgacgaaaacgacgaggtggaatacgaggcctggaagctgcgtgaactcaagcgaatgaagcgggatcgcgaggaacgtgataagtaagtgaacatcaaactgctcttagaattcctttttaacaattctttcccttttctttcagcgtcgaacgcgagaagctggacattgatcgcatgcgcaacatgaccgaagaggagcgacgccaggagctgcgccagaaccccaaggtggtcaccaacaaggccaccaagggcaagtacaagttcctgcagaagtactatcatcgtggtgccttctacctggatgaggagaacgacgtcctcaagcgcgacttcgcccaggccacgctggaggatcacttcgataagaccattctgcccaaggtgatgcaggtgaagaacttcggccgctgcggccgcaccaagtacactcatttagtggaccaggacaccaccaagttcgactcgccctggtacgccgagtcatccagcaacatcaagttccacaacgaacacgccggcggcatgaggcagcagtttgacaagcccaccggctcgaagcgaaaaaagatggagtagtgttagacgtatgtaattgatgtatttgacaggcattaggaaagtaacaagtaaatattgtgcggccacagttatgatggaaccaaaacttcatatacaaacaattatatataatacaaatatcataagtttaaggtatgaacgagatttcgtctgggacttcgatgtgtgatgtacaattttggaataatggctaacgaatgataacaaaaagcggagaacacacaaaaaaaaaaactataacgtttaaagtttgagcgtgtgctcctgtagcatttcaatgttgtgttgaacgagcgcctgcataacagcctcggttttgatgaagtgcaccttttcatagttgttcagacgtcgcttagatttcgtatccttgctggtggtgaccacgtacagatccacgctgatggccagcgaaggcggttgggcatgaaccttgccgccggcgctgtgaatgatgactgtgggagattaccgattagccactagttggaataagatttctagttaggcttgcctttcatttcgttggcctttggcactatgtctttgccgagcataaagtgcaagccatacagcaagcgagggtgttccagtacggaggagggtttgaacttgtaggtctcctcgaacgttgggtcgctgaacagatggtctgcctttatgtcgatgctcctggtcttcttcacagagtgcagccaattggtggagagaactggtttgttggaagcaatgactgttaggaacttataggtgcgctcgcccttgtccatcacaagcaggtcgcactgcaagggatcttcggtgatctccaccacgtctagaaagcatataaatctatttagaattcaactcgctttgcggcatgtgtttacttacgcttcagtgacttgaggacagtttccaaagctggacgattgcacatggtgaacgctaccttaattttgcccgtagtagtcttggcctttctcacgtacaagttaattgctagaaaagaagattatggtgtaagataaggtaagtgtaaggtaaggacgcatttacctctaaggggatcggcatccggctgactgaatcgcgttgtagctgcaaggaaaggtaaatgtgaaaatagtccatcaacaataagaatttaac

SEQ ID NO: 20 - DNA, 1615 bp, DROSOPHILA
aagatttgcttattacccgtggattataagttaaaaccacgatgagtgcagccaccgccgccgccgccgcttctgggatccagagcacagcgggcgccattcccatgcgcaatgagaaaggtgaattgtccatgcaaaaggtgaaggtgcagcgatacatatccggtaagcgacccgactacgcccgtgcggactccagttcggaggagagcgacgacgatgacttcattgacaccaggaagcgccttgagcgccacaaggcggaacggcataagctggagctctcccgtcaaggcggcagcgcggagggcgaagagcgggcggcgggtgagggccaggaggaggacgatgccgaggtggacgatccacgcctccgaagattgcggcagcgacccgtagacatggaggacatggaacgtgagcggagggaacgccaccgacacatccacgaaccggaaatcatggagagtgacagcgaagacgaggaggaagacgagggagcacagggagcgattcagcggggcaccaataagatcacactggcatccgaatccgacacggatgcggagctcagcgacacagagctggagaaccggcgcaccaagctgagatcccgcatgctgcagcagcagcgcgaggaggaggttctacagaaagaggatgagaaacagtcggaatcgtccgaatcagaaagctccgagtacgaggaggagaccgaaagcgaggaggacaacgaaccccgcctgaagccgctcttcgtccgaaagagagatcgtgccaccatccaggagaaggagcgagaggctcagaagcagaagcagctggaggcggaggccaagcgggcagccaaggagcgcagaagagccaccctgcgaatggtcgaggagagcgtcaagaaagatctggagaagaccaagccggagaccaatgaggcctgcatcgaggacgtgtgcacggacgacgaaaacgacgaggtggaatacgaggcctggaagctgcgtgaactcaagcgaatgaagcgggatcgcgaggaacgtgataacgtcgaacgcgagaagctggacattgatcgcatgcgcaacatgaccgaagaggagcgacgccaggagctgcgccagaaccccaaggtggtcaccaacaaggccaccaagggcaagtacaagttcctgcagaagtactatcatcgtggtgccttctacctggatgaggagaacgacgtcctcaagcgcgacttcgcccaggccacgctggaggatcacttcgataagaccattctgcccaaggtgatgcaggtgaagaacttcggccgctgcggccgcaccaagtacactcatttagtggaccaggacaccaccaagttcgactcgccctggtacgccgagtcatccagcaacatcaagttccacaacgaacacgccggcggcatgaggcagcagtttgacaagcccaccggctcgaagcgaaaaaagatggagtagtgttagacgtatgtaattgatgtatttgacaggcattaggaaagtaacaagtaaatattgtgcggccacagttatgatggaaccaaaacttcatatacaaacaattatatataatacaaatatcataagtttaaggt

SEQ ID NO: 21 - protein, 478 aa, DROSOPHILA
MSAATAAAAASGIQSTAGAIPMRNEKGELSMQKVKVQRYISGKRPDYARADSSSEESDDDDFIDTRKRLERHKAERHKLELSRQGGSAEGEERAAGEGQEEDDAEVDDPRLRRLRQRPVDMEDMERERRERHRHIHEPEIMESDSEDEEEDEGAQGAIQRGTNKITLASESDTDAELSDTELENRRTKLRSRMLQQQREEEVLQKEDEKQSESSESESSEYEEETESEEDNEPRLKPLFVRKRDRATIQEKEREAQKQKQLEAEAKRAAKERRRATLRMVEESVKKDLEKTKPETNEACIEDVCTDDENDEVEYEAWKLRELKRMKRDREERDNVEREKLDIDRMRNMTEEERRQELRQNPKVVTNKATKGKYKFLQKYYHRGAFYLDEENDVLKRDFAQATLEDHFDKTILPKVMQVKNFGRCGRTKYTHLVDQDTTKFDSPWYAESSSNIKFHNEHAGGMRQQFDKPTGSKRKKME

SEQ ID NO: 22 - DNA, 2589 bp, DROSOPHILA
cacattggccaggtgggcggctagcaaagcgtatactccaccactggcgcccacaaggaacacatccgggtcaaagatgctagtgcccaggcttcccgccagcaccccggagaagtagatgcaggctatcctcgtggaaccatgaaccatctccagtggcagcccaaaaaccagctgaactgccacgttaaaaccgagatgcagccacccggcatggagtaccatgtagaagaggaagcgccagatctcgtgacgcttatcgggacggtagatgaacatggagtccgagggtatgggtccccttggcgccgcctcacccgtgaccactgagtggtaaacaaagaaacccagctgggggaaaagtagttaagtagtcaagggtctgttcaaggagaacttaaactttcaacgcacctccaccagagtaaccaggatgatgaaaaaaggcggcggacagcaggtgtagcgatcggcgtagtacttgcgatcccgctcctcgggcaggatctccatggccacggcgtgcaccattttgcgaaagagtggcggttcgtttagcaccagctggaaatcgttttcggagcagacttcacgatctcgatggtgtacggcgcacttaaagctacgtgtccgcttgccgctcatctggaattaagtatggaggtttaatcagcaatagttgatgcatatttaagtgtaaagataacctgcaattacatatctagctatggtactgcgatacctttttcgatgtaattgatatagcaatatatgtatattccctaagatcgttatataaacaccacttcgggagtaagcaatataacaaaacatttactaagaacttcgctaagaagaaagtgattagaaaattttcaaaattgtttctactatttcgcctatcaaaaaactctcccattttagtagccttttgatacaatttcagcaatttatcagcaaagactacagaaaacttcagtacctttctaacatcactcgaatacggatcaaacataactagaaaataaatcttttagacaatttctaatttccagttttactacaaatctttttcaaaatgtcgaaaatttatctgaaggccatggaggatgtggtgcagcgaaacacggacaacacaaaccggattacggagcaggcgcagggattcgtggtgtcggaaaatgccggggacagtctgctgcacacttcattcgatttgaccacggcccagtcgattgtgaagcacctgcacgccagtttcctgaaattggcccagagctgcgtccgtgatctggataccgatgataagctgtgctttctgcgcgtgaaaacccgcaagcacgaattcctggttagtccagaggaagccttcactgtgaccgtggtattgtaatcccccagcccatctaggggttaacagtttggacattgttgcttgctggtggacaagggagagaaacaccaatacacacccactatcgctacagctgtctcactcgctcattgttgatgctttcgttgaagatcgtcgtacatgtttaaccaaccccccaccccccacccatccaaaaaagaaaaaagaaatctagtcataaaattataaaacgaacatttatgcgtgtgaccggacaaactaaattatgtttattatgtaattaagatgttggcacagatgccgatgtcagccattaaaacaaacgcagagcgggcaaaaatccgcaaaaagcggaaaataagcattgtgtttaattaaaagtgaagcctacacgcaattaaaatgctcgtctacgacgattgcgaaaataaaaaggccacaaattaagctagccacggccttagggcacaaaatagttacttccgccagtctgggaagggggaatttatgtatcttctagttaatcagcgctaggcggactcttaatggcagtaattatcaaattttgtttaattgataagcctcctctggaggactggaggctatgtcactggaatatcatatgggtggctactctgttcttgcgcgggtgtgcactaaatactcccttccagggaaagcgccgtttttcttgtattttgttatgtacatattaactgtaatattattcacattctccgagcatttcacttacgcaacgaaacagcagcgttcctgctttattaacttaataatccttataaatttttcattacgattaaagtttaaacacaatgaacacttaacattgaaaaaacgaccgaatttacaactttcccgccagcgtgccgaagtttctattcgcgctctgcgctttgtactcttatcctcctagttctatttccattcattccgcttagtagtgttgcacaacgccagctgatcgatcatcgaatctagagcgctaagatcaaaaataaacagaaatcagattttacttccgagtttccgatttgggccaatttctgggtattaaattgtttcgattcgcagacaaagggcgcagagaatctgtgttgtcaacaatgggaacacccacacgcattgtggccgtgtgacaagtcgcattttcggcaagatcaagcgatcacaacaaagtgccaacagggccaata

SEQ ID NO: 23 - DNA, 589 bp, DROSOPHILA
atacggatcaaacataactagaaaataaatcttttagacaatttctaatttccagttttactacaaatctttttcaaaatgtcgaaaatttatctgaaggccatggaggatgtggtgcagcgaaacacggacaacacaaaccggattacggagcaggcgcagggattcgtggtgtcggaaaatgccggggacagtctgctgcacacttcattcgatttgaccacggcccagtcgattgtgaagcacctgcacgccagtttcctgaaattggcccagagctgcgtccgtgatctggataccgatgataagctgtgctttctgcgcgtgaaaacccgcaagcacgaattcctggttagtccagaggaagccttcactgtgaccgtggtattgtaatcccccagcccatctaggggttaacagtttggacattgttgcttgctggtggacaagggagagaaacaccaatacacacccactatcgctacagctgtctcactcgctcattgttgatgctttcgttgaagatcgtcgtacatgtttaaccaaccccccaccccccacccatccaaaaaagaaaaaagaaatctag

SEQ ID NO: 24 - protein, 104 aa, DROSOPHILA
MSKIYLKAMEDVVQRNTDNTNRITEQAQGFVVSENAGDSLLHTSFDLTTAQSIVKHLHASFLKLAQSCVRDLDTDDKLCFLRVKTRKHEFLVSPEEAFTVTVVL

SEQ ID NO: 25 - DNA, 3026 bp, DROSOPHILA
catttagtagctgaaaagtgaatacatttgtgcaatacatgaactatgattctttgaagcctacgcaaacaacgtaaattgaatttaaagtagtagaatccagtgggacgaaagggattgcagctttaaaactgctcaaatggactagactttaagtttccagatgcggcaatttctgccagtgcagtgccacttaccactcagttgtgctgctggaattggaagaatttttgcctggagcagcgagcacaggctggccgatgaccttggccggaggggcggcagtgggagctgaaacttgcttggctagtggagctgcagccgctggagctgcaggtgcaggcacaggagcaggttgagcattgctgttgttgttgctgttggtgccgatcgctgggaatgtctgcgccgcagtctcagcctttgttgattgtttgagggggaaatgaaagcggattagtggggcagtcacgggatgtggccagtcatcatacccatgtcacgccaaccaaataacatatcaccagtagcaccgcgtagacgaacaggcgcttgtgtgccattaatttttctttaatttcaattttcctcagttttcttgccttttattggagaaaattcccttgcaatttcgcagagtgaccgtacttgtctggtgcacagaaaataccaacaaattgtcgctcatcgaactagttccttttggtgcaattagtttttaggctaattattaataactaattatttccttcacgatataacgttcatttaattctaaaacaatcaagaaataagtttctaggcgtatcaataaatctgtgacgtcaaattcgtaatctgctctctgaaaagactaattatatttttcctttattcaacatttattatatacattaagctattttccgttaatggaataagttacagcaatatggagtttgttatagtattatgtttatttttttcggtgagtccataatttggattttaccgcagcctggtcacaccagcaccgtcaaaaatagcaattgtttgcgtgtgcaacgctgatttcaaccgtaattgccggtacagattgactgacttaggtccacggactaggatacgataactagaacaggacacgatgcagcacatactacttcttacaggactggcgctggtaggcagcatttccaggggagccggtaagtggcgacctgaaacaaagtcgcgtctatgtggtcttctctgattggccgcccctctttctgaaccttccgtggccatagttaatgcttatcttatattctatcttgaccctgctgaacacagccaccgaatccaacgtggtcacctgcggctccatcctgaagctgctcaactcggactacgccttccgcctgcactcccacgacgtcaagtacggatctggttccgggcagcagtcggtgacgggcgtggagcagaaggaggacgtgaacagccactgggtgatcaaggcgcagaccggcgagctttgtgaaaggggcgagcccatcgcctgcggatccaccgtgcgactggagcacctgtccaccaagaagaacctgcactcgcaccacttttcgtcgccgctctcaggcgagcaggaggtgtccgcgtacggaacggatggactcggcgacaccggcgaccactgggaggtggtctgctccaacgagaactggatgcgcagtgcccacgttaggctgcgccacatcgacaccggcatgtacctgggcatgtccggccgctcctatggcagacccatctccggccaaatggaaatcgttggcgtccacaagccgcagcacggaacgcgctggaccacggcggagggcctctttatcgtgcccaaggagaagagctcaacgcacgacgagtacgcccactcggagctgtagtgctccctaaggacctcgactgctgcagtttcatactactattagttctgtaatttataacttagttgaatttttattgaagaccccaaaagcaaaccatcaaattaaaattatttaaactcagggtacttcgaaactttcagattgctttcatcgaaagttatgtattctatgtatgtattatgtattctatctagaaagtgccttgcataaaggcagtcgtaagaaccacttagcttaaatgcattgcaacaaatgggggcgtctatagagccctttttaaggtagtgaaacctcagttgcaatctaacttttctaaatttttctagaactttgattgattgtctacttagtcagttgcaggcacacaaatgcttttttatttttatgtaaccttttatattttaaacgggtattttgaggcaatagtactctttctgttggcattactgcagttaatacagatgtatctattccatgtagtgctgaaagacatgcgtaggttaccaggtgctaatagcgtgttcgtgtcacttttctactactcattgatgattaagactgattgcatttggcggaaaatgtcgatatctttgaactccaacagaaggtatcccatgccggattgacagccctttagcttgaagctaaagcgggaagtatccttgcagatgcagccgtagggcgtcactcgcatttcgcgaaaggtgctccccattccttcggatgtttttgtttgcatgcataaaacaatggggcttattccgaccatacaagctatgtatatacattttgccattgctcgcggtttccgctcccttgctgccccgatatcgtcacgtccattatctgctcgtctgttttgtgtttcttttgtttgggccattgtcaacgctttgtctgctcatcctccgggccatgtcctcatcctccgctgcctccgcctccttcgcatccccgtaatcccaactgattgtggacccagtaaggtcaaagtgttagctgatctaacccagcgcacagtcgtttatagattctcataatcgggttgtccttgtaaccattttgcacaaataagaaatggaaacaaggatactcgttctactagtctgatgagcgatg

SEQ ID NO: 26 - DNA, 899 bp, DROSOPHILA
gtcacaccagcaccgtcaaaaatagcaattgtttgcgtgtgcaacgctgatttcaaccgtaattgccggtacagattgactgacttaggtccacggactaggatacgataactagaacaggacacgatgcagcacatactacttcttacaggactggcgctggtaggcagcatttccaggggagccgccaccgaatccaacgtggtcacctgcggctccatcctgaagctgctcaactcggactacgccttccgcctgcactcccacgacgtcaagtacggatctggttccgggcagcagtcggtgacgggcgtggagcagaaggaggacgtgaacagccactgggtgatcaaggcgcagaccggcgagctttgtgaaaggggcgagcccatcgcctgcggatccaccgtgcgactggagcacctgtccaccaagaagaacctgcactcgcaccacttttcgtcgccgctctcaggcgagcaggaggtgtccgcgtacggaacggatggactcggcgacaccggcgaccactgggaggtggtctgctccaacgagaactggatgcgcagtgcccacgttaggctgcgccacatcgacaccggcatgtacctgggcatgtccggccgctcctatggcagacccatctccggccaaatggaaatcgttggcgtccacaagccgcagcacggaacgcgctggaccacggcggagggcctctttatcgtgcccaaggagaagagctcaacgcacgacgagtacgcccactcggagctgtagtgctccctaaggacctcgactgctgcagtttcatactactattagttctgtaatttataacttagttgaatttttattgaagaccccaaaagcaaaccatcaaattaaaattatttaaactc

SEQ ID NO: 27 - protein, 216 aa, DROSOPHILA
MQHILLLTGLALVGSISRGAATESNVVTCGSILKLLNSDYAFRLHSHDVKYGSGSGQQSVTGVEQKEDVNSHWVIKAQTGELCERGEPIACGSTVRLEHLSTKKNLHSHHFSSPLSGEQEVSAYGTDGLGDTGDHWEVVCSNENWMRSAHVRLRHIDTGMYLGMSGRSYGRPISGQMEIVGVHKPQHGTRWTTAEGLFIVPKEKSSTHDEYAHSEL

SEQ ID NO: 28 - DNA, 5132 bp, DROSOPHILA
ttcattgcgattgtttacagtttctttgcattttgtagcacacgaaatgtttggcattgattgaaaatcagtaaaatatattcacaaaaaggcgacaaagtttgcaacaatttaccaaatttagaaaaagttacctaatgagaaaattcaccctaaaattcttagaatgggaaaaattaacacgacttagtaaaagattgccaatacaatttgaaagatgtaaaaacatggatttgttatcaaattgacttggcacaaggggcttcattaaaactacctatgatgaattttttgttacatatatttcagttgtttaattgcgttttttaccttaagctcgttcacatatgtatgtaggtagcaatagtcaacattgtcaattattttcgcaatttgccttttaacgtctacttttgcactttgaaataatacacaaatttttttttttttttggtcttaacatataaatttaagtatttataaacaaaaacaggaaaaattggtgtcttctggttttccaatcagaatgttaacagcgagcgatagaagtaagcagtgcaagcagtgcatgttacctgcgcgcgcagcttcaatttaaatgctaacatgattgcttaataacgaatgcatattttttgcgtagactattatgaaagccattacggtgacaattgcatgacctataacaccgatcgtaaatgggatctggccggtttagcccgctcggccgtccacatgacctgcgactttatatcacttacgagagcacgcagagtgatcattaaaaagcaattacccagaagacgcgaaacagctgtcttctgtgagcagttcggtccgctccgcttatcagtcgcgatattctactccaatattctgcgccatatgtttcgctgcagcgatagcagcaactcacattgcgataagcggcggtcgtgattaaagccgctactgaatcgaggctgctgcgggcttactggcagtcgaactgatggatccgattgttcggttctcattgcgcgattcagttgttcctcgtcgatcgcggcccgcggaagtgttcatttcactatcgtgccccgccggattgtgccgcccattctgacccttgagtcttctgctcacatagttagctgtgaatataattggagtcgcgagcggataaatggagatccgagtgggagtgggcgatctgctgaaaatgggcaccaagtaggtgatctatggcaattacagtaaaagctaactgggagagacccccgtagggtttttattcatcggattttgtcaattgaactcttgtacttaggtgaacactgagtttaatcaaatacttgataaggtttattgtgcctcgaagtaatcacaaatatttcactgttttaacgcagattactgagtggcagtgctggtaggttgtcctttttttggcaaacttggacgattgccaaccaaacaacatatctagaataatatctaagaacgtgttggtttgtcttcgtttttaaaataatcatttccgaattaaggtttgctagtagttatactaacataaaaaggaggagtttaaaagatttcaaaacgcttgctgttcgaaaatgtttgaccaacatagcagtataaatttacctaatgagcttttactgtattcaattgagtacttgttccgctctcacaatgataagataagaaaagcttatgattaaactgaaacatgacgctctttcatccaaacactttggcacataatcaaccaaacataaatgagcaatattctattataaataatatacaactaaatatataaagaagtaacacaaatgtttctatattattcaatcttttaaattctatatctttcacgcaggctcattggccacaagatcgtccagtatcgccttggcacaaagcagacgaaggtggtctgcaccagggatggccaggtgcgcggacatcgccgaaggacactctacgacgaggagatgtacttcgccttcgagggaatcccctttgcacagccgccggtgggggagctgcgcttccgagccccccagccaccacatccctggttgggggtgcgggattgcacctatccgcgggccaagccgatgcaaaagcacttcgtgctcagcatcgtcgaaggcagcgaggattgcctgtacctgaacgtatattccaagcgcctgagatcggacaagccgctgcccgtgatcgtgtggatctatggcggtggattccagttcggcgaggctggtcgagatttctacagtccagactactttatgcagcaagacgtagtggttgtcacattcaattatagggtgggcgcattgggtaagttttatattagatgatatgatttctatgttatttatatataaacctatgatcaagatacactcgttcaaagcttgcatataattatatttagctctgtttcaagaatatttgatttttttcttctcctattatatttatcacaagcttaacactagcctagaattttttaaatataaatcttggtttttcaaaaagattctactaactcagatagcagtctatatcatacgaattaaacgctgcactttccacgccatgcaaactcaatttcaatcggaagaattctcaggccgaatagactaattctccactactggcacctctagtcataaaatcgttagcactactattactgtcgttttacgtgttattaaactggagagggaacaatactcacctgtaattattattaccttaacgatcaattaaaataatgtatatgtaagctcatgcgctgtaactgtaacaaaccggtagaatctaatgctcaacatctatagatagaatctgctttaataaaattgctagggtttatattatatatttagattttcatcagcaatataccaagtcgtgattgcaaactcaaatcttgaaaaatatttcaggcttcctcagcctcgcggatcgcgacttggatgtgcccggaaatgctggtctcaaggaccaagtgatggcccttcgctggatcagtcagaacatagcccaattcaatggagatccccaaaatataaccgtgatgggcgagagtgcgggagcagcctccgttcacgcgttgatgaccaccgagcaaacccgagggctgttccacaaggccatcatgcaatcgggatccatgttctgcgagtgggccaatgagccaagtggcaggtgggcataccgactggcctgccaattgggatactcgggcagtgagaacgagaaggaagtgtttcgataccttcagaaagcacccgcctccgaaatggccgcacagggtattactcttgtctcccaagaggaacggcggcagtacgtcctgtttccctttactcccgttgtggaaccatatatcaccagggattgcgttttgccccgttgccacagggagatgctgccggaagcttggggtaatgacctgccgctgatcctgggcggcaactcctttgaaggtctgttctcctaccagagtaccctgcacgacgaggaacacatgctgagtgcttttgaggtcctaattcctcgggagatcagggagaagagtacccagtcgcatcttaaggatctgctacgtcaatttaaggtggataacttcgatgatgcgactcgagggcgaatggagttcaatgagtgcctgcacatactgtccgttaaacacttttggcatggcattcatcgcactgtattggcccggctcagccacgcccccgcaacgcccacctacctgtaccgcttcgatgtggactcgccccatttcaatcacttccggcaggtgatgtgcggaaaacacgttcgcggagttagtcatgccgacgatctctcctaccttttctatcacattttggccaacaaggtggataagtcctcgatggagtaccaaaccatacagagactggtgggcatgtgggtggcattcgcccgaaacgacaatcccaattgtccacagatcggcccgaccacatgggaggcactagatgagaaaggtccgcagatgtgtctcaatattggaaaacaactggagttcattgtgctgccggagtcgaaacagaatcggatttgggatagactatacgataaaaacgacttgttttaggtgggggagtttgtatgcatgtatattttgtaaataaatagcagctgggtatcgccaatgaagattttaaaaacaattttaattaataattgaataaaatttgaaatattcatgtttgctgtcaacatagccctacaaatatcgcttaacgtgctgtaatcgaaaatgaaactaaacttacatttcaacgttggccataggctaaacaaggcctagaaaaatatattttaaaaaattgtatacatgttgcttaagcaatatatgcaatataaatggttttatctagataaatacaactggtttggggctaccattaatcacaacgcgaaaagcaattcgcctttgccaaggtagttttccatgaaatgaccttaaacttgatcttcgcaatgactcgactatgtttgctgtttataatgagagataaatgccagtggcaactaaagcaatgttcaatggcaagattaggttaaaaataaggttttcttctgccaataattttacaaaaaaacgtcaatttacctcacaaataagtcgccaatctctaatttctatttataaatggggacattttcaaaaacttgcacgacccacaaccaaaatacttccttatctataaacacaaaagtgcaaaatttataaatagaaatttgtttgtgattattttgagaagtcttgaatgacggtctttattataataagaagtcatttcaatatgtatattgttgccaaaagactaatatgagtgatatatatctatatttattcattattaagacaagtgataaattggaatttaaagaagatatttgggaataagacatttaccctcaaatggtaacttcgtagaacatctggagcacttatattaaccttagaattagatttgagaactagaagagcgactccctgggataaaatgtatcccaaacggctaggcaatcggactccggcaaatctcgcatctcaagatcgtggctaatgttgaagcacttctcca

SEQ ID NO: 29 - DNA, 1863 bp, DROSOPHILA
attgttcggttctcattgcgcgattcagttgttcctcgtcgatcgcggcccgcggaagtgttcatttcactatcgtgccccgccggattgtgccgcccattctgacccttgagtcttctgctcacatagttagctgtgaatataattggagtcgcgagcggataaatggagatccgagtgggagtgggcgatctgctgaaaatgggcaccaagctcattggccacaagatcgtccagtatcgccttggcacaaagcagacgaaggtggtctgcaccagggatggccaggtgcgcggacatcgccgaaggacactctacgacgaggagatgtacttcgccttcgagggaatcccctttgcacagccgccggtgggggagctgcgcttccgagccccccagccaccacatccctggttgggggtgcgggattgcacctatccgcgggccaagccgatgcaaaagcacttcgtgctcagcatcgtcgaaggcagcgaggattgcctgtacctgaacgtatattccaagcgcctgagatcggacaagccgctgcccgtgatcgtgtggatctatggcggtggattccagttcggcgaggctggtcgagatttctacagtccagactactttatgcagcaagacgtagtggttgtcacattcaattatagggtgggcgcattgggcttcctcagcctcgcggatcgcgacttggatgtgcccggaaatgctggtctcaaggaccaagtgatggcccttcgctggatcagtcagaacatagcccaattcaatggagatccccaaaatataaccgtgatgggcgagagtgcgggagcagcctccgttcacgcgttgatgaccaccgagcaaacccgagggctgttccacaaggccatcatgcaatcgggatccatgttctgcgagtgggccaatgagccaagtggcaggtgggcataccgactggcctgccaattgggatactcgggcagtgagaacgagaaggaagtgtttcgataccttcagaaagcacccgcctccgaaatggccgcacagggtattactcttgtctcccaagaggaacggcggcagtacgtcctgtttccctttactcccgttgtggaaccatatatcaccagggattgcgttttgccccgttgccacagggagatgctgccggaagcttggggtaatgacctgccgctgatcctgggcggcaactcctttgaaggtctgttctcctaccagagtaccctgcacgacgaggaacacatgctgagtgcttttgaggtcctaattcctcgggagatcagggagaagagtacccagtcgcatcttaaggatctgctacgtcaatttaaggtggataacttcgatgatgcgactcgagggcgaatggagttcaatgagtgcctgcacatactgtccgttaaacacttttggcatggcattcatcgcactgtattggcccggctcagccacgcccccgcaacgcccacctacctgtaccgcttcgatgtggactcgccccatttcaatcacttccggcaggtgatgtgcggaaaacacgttcgcggagttagtcatgccgacgatctctcctaccttttctatcacattttggccaacaaggtggataagtcctcgatggagtaccaaaccatacagagactggtgggcatgtgggtggcattcgcccgaaacgacaatcccaattgtccacagatcggcccgaccacatgggaggcactagatgagaaaggtccgcagatgtgtctcaatattggaaaacaactggagttcattgtgctgccggagtcgaaacagaatcggatttgggatagactatacgataaaaacgacttgttttag

SEQ ID NO: 30 - protein, 565 aa, DROSOPHILA
MEIRVGVGDLLKMGTKLIGHKIVQYRLGTKQTKVVCTRDGQVRGHRRRTLYDEEMYFAFEGIPFAQPPVGELRFRAPQPPHPWLGVRDCTYPRAKPMQKHFVLSIVEGSEDCLYLNVYSKRLRSDKPLPVIVWIYGGGFQFGEAGRDFYSPDYFMQQDVVVVTFNYRVGALGFLSLADRDLDVPGNAGLKDQVMALRWISQNIAQFNGDPQNITVMGESAGAASVHALMTTEQTRGLFHKAIMQSGSMFCEWANEPSGRWAYRLACQLGYSGSENEKEVFRYLQKAPASEMAAQGITLVSQEERRQYVLFPFTPVVEPYITRDCVLPRCHREMLPEAWGNDLPLILGGNSFEGLFSYQSTLHDEEHMLSAFEVLIPREIREKSTQSHLKDLLRQFKVDNFDDATRGRMEFNECLHILSVKHFWHGIHRTVLARLSHAPATPTYLYRFDVDSPHFNHFRQVMCGKHVRGVSHADDLSYLFYHILANKVDKSSMEYQTIQRLVGMWVAFARNDNPNCPQIGPTTWEALDEKGPQMCLNIGKQLEFIVLPESKQNRIWDRLYDKNDLF

SEQ ID NO: 31 - DNA, 6120 bp, DROSOPHILA
gtttgccatgcaaagtgtgttagactgttaaaatgtctggagaagtgcgagtgtggggatatgcttaaaggggtttaccgatcggaaaattacccgattatccgaaaaatgcaaagcgcataaagaaaaagcggaacgtaagtggaaagtgctgcttgtggactctcaattggttcaagtgaagtaacaatggggtaggtcttcagtgggcgtgaaagttatatccattaaagccgattacgatctggaacggcatccgtgcagactaacttaccgattcacttgaggagcagcataaatggtaatggaattcaaaatattcccttgggctgattaaatacagtgaattatatacgtgttaatggaaggagaattcaaatgggtgtgctgacaagaaggctgcttataaccaagtaaacaattcgtatctcggtccgcacaatgataatgatgaggcgtctgctgtctttattgaagaccctcctcccacaaacgaacatcattggcatgccgcccatgacacttgagttctacacttttcaggcggtgaactcatataatcagtccccatatggttctctgatacactcggttagttgctagagaggggggtgtagtatcttcaacaaattactaccgtatctggttaagaatagattgtatacatatctggaggagagcacttgaaatgtgtcagcgctgacactatttttggaatatttgaattttcaagatgctttccatcagccaagaaatgccaggaatgtatagaaatgtattattccatgtgctccaattttcttcacacttgtatatatacacatacacatatatgaaataatccgattatgcacggattatcagctggctgactggcttgattcacctttagactttgccacttagcctagaaaacgttatgaaaatattgttatttattcgcttctcttgttttcttgcagtcagcgaaatcgtggttattgaatggcagccagcaataatggacacaacgcctaatgcggcccctaatccgaaccagaatcgggacttcgtaacgctgaagcccctgcgtccatcccgcggttccagctcgaatctgcgcgccagtcgctcaccctctgccagccgcagcaccgagcaaagtaattatcaattatgattatcaatcctccggactcctcctcccaaaccacccagatcaccaacccctccttgggctccttctggtccattagtcagtcgcttaattgggaataattgcgtcgtgttaaagccggagcttcctgcatcttatcagcggggcttatgttaatctgggagtctggatgtgatggcccagctcgatttcgatggggagtgctggctatcagtgttactttatatactattataattccgctatcaactagtttttacagccgtagatctacagcagaattagtataaaggagaatggggtttcatatcatacatctaaataatatatgattgggtaatatgattatgttttgttagtataccttggcgtattagattaagtttggccattcgtactctccaaaaataagtgttacacacttagttaattcggcatttttttctttggggttcactgtatgtcattccattatgaatttccacccccggctgtggttgagcgatgactcatcttccagaatccaaagaccgccccaacacctcctatacgcccattatttgcaatgtattcacgagtttggcatcaagaaaattacggacagctatttataaatcaaaatcaaaaagtatagcccacttttgagtgccttggtcattgtattattcatttgactgtgtctaacatctgttatttgtttgattgcgcactttacatatttttgtttctttgtatctttttatattttccttgtttagctttgtaaccgttgaatgttagcctgcctaactagctacacttgcaaatcaagcaaacccaatcagaatcattgacaaatgtaggtataccagtactataagactcaatttgttttgcaagtaacctgcacactccatgcactttcgccaccacactcacgcactcattcacataaacatttcaattattttttttttgttttggttctattcacagtgaaaacacgcgatttaaacgctcttaaactgcctgccactgcttcttcttctccctgattcttttgtctctgttcttctttgttgtctgtctctttccgcgactcaaagacaggcagtccagctgtcaataaaaaactgaaataactcttttaaacacttattcatcatacattcatcaaataagctaaaccataaatcagcgcttgtgtgtgagccaactacacattttcaagctcaaaagatcgagtgaataattcgattaaagaaactaaaaactatttttataaaaccgtgctctaaaaaaacattacgttcatagaaattctatgagcaagcaattcttacaatcaattgtgattaaattaaaatggaataaccagccggaatcgcatcattaagataatctatcaaattcttttaaatcattttaactaaaactattataaactctaaataaagaaactttgcaccattacaaaagtagaataaatctattttcaaatgaaataatttaaatgtaataagcaagacatgtatatgaaattaagacatataaaacaaaagagctaaacttaaagataactcattacatcaccatccatcccaccacacaatgatcgtaaataactgaacttttttgtgctgcttcacacgcgcctcatgatcaacaaaatttgagcaaagacaaaaaacgcagataattcttacaaaataacccaagtcgtacctttctatgcgccacaattcgccagtgtcccgggagcgagccagcgaggcagcggcagccactcagacagcagcagccacagcgggaggagcaactgcccactcagccggaggaactgcgggaggatctgcagcagcgacgacaacggctggaggggccacgtccggatccggaacagcctcggcgaacacgaacagcaattcctcggcctcatccagcacagtggcagctgcacaggcggctgtctacagcggcggcaacacggtgaccggaagtttgggcagcgccggggtggtggctcgtggcttccgcagccacagtcccacccaccggcggaggagtcgcgagcgccagcgacgtacgcatggctctgatcagggcggtctgctggcctacagcggtctcgttggcgtcaacgacatgacggatttcttgggtccacagcagggcggaggaggaggtggcggtggtggtggtggcggtggtggtggtggtggaagcgccggcacgggcagtggtctggaggattcccgcctcagtggcaacgaggactactactcgtccttcgtctctgacgagtttgacagcagcaagaaggtccatcgccgctgccacgaacgcagctccagcgttcaggccatcgaccgattgaacacgaagatccaatgcaccaaggagtccatccgacaggagcaaactgccagagacggtgagtagataatcaatcgactggaaaatgtataaagtttatacaacagaattacaatttgaataattgtttaatttagataatgtcaacgagtatcttaagttggcagccagtgcagacaagcagcagctgcagcgcatcaaggtatgcacaatcacttatctctttgcaacaattaattaattatttttaatgtgatactccttgacaggctgtctttgagaaaaagaaccagaagagcgcacacaatatctcgcagctgcagaaaaagctggacaactacacgaagcgggccaaggacttgcagaatcaccagttccagacgaagagccagcaccgtcaaccgcgcgaggtgctgcgggatgtcggccagggtctgcgcaacgtgggaggcaacatccgcgatggcatcaccggcttctccggttcggtgatgtccaagccacgggagtttgcgcacttgatcaagaacaagtttggcagcgccgacaacatcaaccagatgagcgaggccgaactacagggcatgcagtctgccaatgccgatgttttgggcagcgagcgtttgcagcaagtgcctggagccggaacctcgacgggctcaggcggcggcgggcagaacaacaacaccggcggagcgggaagcgggacgggaaagttcaacagtgacaatggcagcgaatgcagcagcgtaacgagcgaaagcataccgggagggtaagagcatctcagaatttgatcacagacaaagatgggaacgatcctaacgaacttgcttattatatttgcttataggtctggtaaaagccagtcgggagccagccaataccacatagtgctcaagacattgctaacagagctggccgagcgaaaggccgaaaacgagaagctcaaggagcgcatcgaacgactcgaggtacgcgtgttctattgaaaagccagcggaacccctgtgttattaacactaatattcgaacctccttttctatgttcgatagacgggccaaaaggaattcaacaatctgaccgccacactcgaaagtgaacgctatcgtgccgagggactcgaggagcaaatcaatgacttgacggaattacatcaggttcgtagttcacttggctgacgctttggcagtttgcccgacattcgtgctcatgctttgccgcctttgttcgacagaatgaaattgagaatctgaaacaaacgattgccgacatggaggagaaagtacaataccaaagcgatgaaagactacgtgacgtcaacgaagtgctcgagaactgtcaaacgagggtaagtttcgaacgcttggggattccagccccaatccacgccaaatgcaaaccgattctaagcgagctcctccacagatatcaaaaatggagcacatgtcgcagcaacaatatgtcaccgtcgagggcattgataattcgaatgcgcgggccttggttgtgaaactcatcaatgtggtattaacgatactgcaagtggtgctcctgcttgtggccaccgctgcaggcatcataatgccttttctcaaaacgaggtagctacttgtgaatttgattccacgttgaacatatttatatatatatttatttatttattatatttccagggttcgcgttctcacaacgtttttgtctatttgtttcgtcatctttgtgatacgacagtggccggatgtccaggacattggatccggcctggtgcgacatctcaagcaatcgctggtggtgaagtaaactacgtgggtttggtggccaccgtctcatctaccgggtagttgacacgttctttagttatgtatcctaagttctaaagtgcatatgttgtatatagcttatcgataacgattataacaataatttttaactgaaattgtatcaattatcaacacgaacacacccgagaaactgtacaaaatattcatataccctatcacacacacacctaatcatcacaccacactctcgcatcaaatctagcaaaattgatttaaactatgtaataacttgaaaatgctgacatgtctccgtgcattactcactatatttgaacatacataatttatgtattacctatataaaatatttacattactataaaataattgaaaatatataaaaagaaagtttgtataaatcggaaattaatttatttcggggaattttttaaagtctgtccgaccctatgcatttaacagttgagtaaaatgatttacttatattaccaatcaaataactattactatagcatatactgcgctgtgtttattcgaacagctgcatacgttcccagttggtattaaaaatatattattcctagactacaatcaaaattgaaagaaataattattgtgcatacattacttcaaatacagtaagaaataaggtaagtggacattgatctgtcggttagtcaatgttccaaatatgttgccaattttctgttaggtttacgatgttaccgttagccttttaaccacgaaattgaaaaagcagttttcgtccgattttgtcgcatatccgaaaagtatgctttaaatat

SEQ ID NO: 32 - DNA, 1917 bp, DROSOPHILA
atggacacaacgcctaatgcggcccctaatccgaaccagaatcgggacttcgtaacgctgaagcccctgcgtccatcccgcggttccagctcgaatctgcgcgccagtcgctcaccctctgccagccgcagcaccgagcaaatgtcccgggagcgagccagcgaggcagcggcagccactcagacagcagcagccacagcgggaggagcaactgcccactcagccggaggaactgcgggaggatctgcagcagcgacgacaacggctggaggggccacgtccggatccggaacagcctcggcgaacacgaacagcaattcctcggcctcatccagcacagtggcagctgcacaggcggctgtctacagcggcggcaacacggtgaccggaagtttgggcagcgccggggtggtggctcgtggcttccgcagccacagtcccacccaccggcggaggagtcgcgagcgccagcgacgtacgcatggctctgatcagggcggtctgctggcctacagcggtctcgttggcgtcaacgacatgacggatttcttgggtccacagcagggcggaggaggaggtggcggtggtggtggtggcggtggtggtggtggtggaagcgccggcacgggcagtggtctggaggattcccgcctcagtggcaacgaggactactactcgtccttcgtctctgacgagtttgacagcagcaagaaggtccatcgccgctgccacgaacgcagctccagcgttcaggccatcgaccgattgaacacgaagatccaatgcaccaaggagtccatccgacaggagcaaactgccagagacgataatgtcaacgagtatcttaagttggcagccagtgcagacaagcagcagctgcagcgcatcaaggctgtctttgagaaaaagaaccagaagagcgcacacaatatctcgcagctgcagaaaaagctggacaactacacgaagcgggccaaggacttgcagaatcaccagttccagacgaagagccagcaccgtcaaccgcgcgaggtgctgcgggatgtcggccagggtctgcgcaacgtgggaggcaacatccgcgatggcatcaccggcttctccggttcggtgatgtccaagccacgggagtttgcgcacttgatcaagaacaagtttggcagcgccgacaacatcaaccagatgagcgaggccgaactacagggcatgcagtctgccaatgccgatgttttgggcagcgagcgtttgcagcaagtgcctggagccggaacctcgacgggctcaggcggcggcgggcagaacaacaacaccggcggagcgggaagcgggacgggaaagttcaacagtgacaatggcagcgaatgcagcagcgtaacgagcgaaagcataccgggagggtctggtaaaagccagtcgggagccagccaataccacatagtgctcaagacattgctaacagagctggccgagcgaaaggccgaaaacgagaagctcaaggagcgcatcgaacgactcgagacgggccaaaaggaattcaacaatctgaccgccacactcgaaagtgaacgctatcgtgccgagggactcgaggagcaaatcaatgacttgacggaattacatcagaatgaaattgagaatctgaaacaaacgattgccgacatggaggagaaagtacaataccaaagcgatgaaagactacgtgacgtcaacgaagtgctcgagaactgtcaaacgaggatatcaaaaatggagcacatgtcgcagcaacaatatgtcaccgtcgagggcattgataattcgaatgcgcgggccttggttgtgaaactcatcaatgtggtattaacgatactgcaagtggtgctcctgcttgtggccaccgctgcaggcatcataatgccttttctcaaaacgaggtag

SEQ ID NO: 33 - protein, 638 aa, DROSOPHILA
MDTTPNAAPNPNQNRDFVTLKPLRPSRGSSSNLRASRSPSASRSTEQMSRERASEAAAATQTAAATAGGATAHSAGGTAGGSAAATTTAGGATSGSGTASANTNSNSSASSSTVAAAQAAVYSGGNTVTGSLGSAGVVARGFRSHSPTHRRRSRERQRRTHGSDQGGLLAYSGLVGVNDMTDFLGPQQGGGGGGGGGGGGGGGGGSAGTGSGLEDSRLSGNEDYYSSFVSDEFDSSKKVHRRCHERSSSVQAIDRLNTKIQCTKESIRQEQTARDDNVNEYLKLAASADKQQLQRIKAVFEKKNQKSAHNISQLQKKLDNYTKRAKDLQNHQFQTKSQHRQPREVLRDVGQGLRNVGGNIRDGITGFSGSVMSKPREFAHLIKNKFGSADNINQMSEAELQGMQSANADVLGSERLQQVPGAGTSTGSGGGGQNNNTGGAGSGTGKFNSDNGSECSSVTSESIPGGSGKSQSGASQYHIVLKTLLTELAERKAENEKLKERIERLETGQKEFNNLTATLESERYRAEGLEEQINDLTELHQNEIENLKQTIADMEEKVQYQSDERLRDVNEVLENCQTRISKMEHMSQQQYVTVEGIDNSNARALVVKLINVVLTILQVVLLLVATAAGIIMPFLKTR

SEQ ID NO: 34 - DNA, 5675 bp, DROSOPHILA
tttagtttttctctgatcaaacctaaagagtgggacagagagtactactatattcgtttcactcgccaaaagttttgaacgcaggcgccttgccaatttttgtatcatacttataagtggaaatgcaattgcaaatgcatgttaaaaatgttttgagaaattctgccgaaggtgcgcgttaattatacaaaaggtgttgcccacccgttcttgtctttaagaaattccgtgtttttcaatgctaccccttgaacttcggaattttcgatcgatccattttttaaaatggtgtgtgtttcgatcgaaatactgtaataaatcaaatattaaattagtttgttataaatttgagaaacttactactactactttgatttcaaaactaaaataatcggtaaaatcataccattagaactaatatcaaaatgaaatcattcttagtaatgatattaagaggtattttctggccgagttggcccccgccatgtctggttctattttgccgatctgattgatgctcaatgatgtacccatgccccattaatttccttttgaaccaaaaatgcatggcaaaatatcgaattttaattaaatgcaaatgcgcatgttaatttattgatgttgaagtgccaatgttccgaaaggcaggcaggcagtggctttgaacaagacagttgaaccatgttgttggtccaataaaataccaacatcatctttttcgccttgtcatgagcacgatcacctggaatattctgctataaaatgaccgtatatacaatttatgaaagcacatttttcttgtatactagcatattgtatatgtgagagcagatattttgtgatttgttgggattcttgttcggatggctaatgtatttattgttggggctatatagtcatccctatcattttctctggcgacaaagttgccttcgtgccgtgtgcagacaaagactgaaagcgcttgacaaatttttcagcgcgatcagtcgaaaatcgttgttaatcgaagctaaactaaaattaaggatatttctcttgcgaacctttttattacgaacgaaaagtaaatatcagtttttgtcaatggaaaacgaaaaccaaaaccaaaaccaatcacgcataacccagtaaattccaatattttgtgttgtgcttgtctaaaaaatatcggttcaagctctgctacaaaccaaacgcgaagcgatgaaaatacagttttgtcaagcgatcgtttaaatttagaacttgtgcgtaatttggaccataatttgacccacaaatgagaggaggaatgtatggctccacacaggaagcatttttcccacacactattattaatagattccgttttttcgagtgtgaaaaaactttacggaaactgtctcactcaataaaatgagaactatttgcgaggagtttttttttcaatcgagttttattcaagtacaaatcgatcatcttttcatcagatcaaatcgaatagtcactatccttgaatagagaaaaattaaagatacagtccttactcgacgtaaaaaacacgtacattttgatgagttttataatcttattgcatgcaaaaagtattatatttagtcgggaatataaacaaactcccagatgcctgaggtttccaatgatatgcaacttttcgatcatctttgataatctcccactgggataaatgtgcatataatatacacaaaagttagcaaacatccaagaatgagatacggtcaagaaaaaacgagtgaaggatatggaataaaaaactttttcgaagaatcgaaaaagtttaaaaaccgcagatgcataccaatatgtttccatcccactctctggcgttatttgatgaaaactgaaataaaacgaaggaaaactgctccgtgttgccgcatcttaagtttctcaactcggtgtgctgagcaggaaaactcagtggcagcggcgaaaagtcgaccgcgttgccgtgccgtgtgcactcacaattatatagactagtttgctttgagcaatcttccagttcagtactcggcgcttccgtgtgtggttttagtgcgttgtaggttccgttctatcttggctataatacactcacacccaacggttggatatcgccagctcttaaccgatttttttgcacgcagcaaaagaccattgcaaagcacctgactaatccatcgcaaccgctagataaccagattaccggccagggacgatgctcatctgatggtggtgctttagctctgactcagttttagaacacccagatatgtacatatatatatctgccacagttattttttgtgtgtgcttttcccaaatctatctacctgtctgcgttatttttatacaacattttctgtatagatagatacacatttattgctcatgtttttctctgtgttctgtgatttgaaaaattcctcctttattttttgttgtcatgagaaagatgttattttctgatcattaacataggaatcttcaatatgaattacgtatacatacgtccggttgggtaattttctggcacgggcgatgacgtctcgactgacagataagaatcttgatagatgatctacataatgcaaattgaggagaaattcgcgactgtcaagttgaatttgtaatagttcattgtaaacttaagataaaacaagcgtcttaatcgtccaaataggttaacatgtagattagcttgaattaactagttgggcttagaataatttggaaaccatttaacatacaaaaatgacagatgcttacctcatcgctttcatcgccaccaaagcttccactctgctgcatttcccagcaggacttacgccacgatcccatcgactctatgtgttcttctattttgctatttcagataataaacttaataagtaaagtaattgtactcgcgtagatcattttgatagcgttaaaaaaaccgaaacacagacagaatgccttccttccaaccgatcgaggcccccaagtgtccgcgctgcggcaagagtgtctacgctgccgaagagcgtctggctggcggctatgtattccacaagaactgcttcaagtgcggaatgtgcaacaaatccctggactccaccaactgcacagagcacgagcgcgagctctactgcaagacgtgccacggtcgcaagttcgggccgaaaggttacggcttcggcactggagctggcaccctctccatggacaacgggtcacagttcctgcgcgagaacggcgatgtgccgtccgtaaggaatggagcccgcctggaacccagggctattgctcgtgcccccgaaggtgagggctgtcctcgttgcggtggctatgtgtacgccgccgaacagatgttagcccgcggtcgcagctggcacaaggagtgcttcaagtgcggtacctgcaagaagggtctggactcgatcctgtgctgcgaggctccggacaagaacatctactgcaagggctgctatgccaagaagtttggacccaagggctatggttatggccagggcggtggtgctctccagtccgactgctatgctcacgacgacggagcaccgcaaatccgtgccgccattgatgtggacaagatccaggcccgtccgggtgagggttgcccacgttgcggcggtgtggtctacgcagcggagcagaagctttccaagggtcgggagtggcacaagaagtgcttcaactgcaaggattgccacaagactctggactcgatcaatgccagtgatggtcccgatcgtgatgtgtactgccgcacctgctacggcaagaagtggggaccacatggctatggattcgcatgcggctctggtttcctgcagaccgatggcttgaccgaggatcagatcagcgccaacaggcccttctataacccggacaccacgtcaattaaggcccgtgacggcgaaggctgtccccggtgcggaggagccgtattcgccgccgagcaacagctgtccaagggcaaggtgtggcacaagaagtgctacaactgcgccgactgccaccggccattggactcggtcctggcctgcgatggacccgatggcgacatccactgccgcgcctgctacggcaagctcttcggccccaagggctttggttacggccacgcccccactctagtgtcaaccagtggcgagagcaccatccagttcccagatggccgtcctctggccggacccaagacttcgggcggctgcccgcgttgcggtttcgccgtgttcgccgccgagcagatgatcagcaagaccaggatctggcacaagaggtgcttctactgctcggattgccgcaaatcgctggactcgaccaacctgaacgatggacccgacggcgatatctactgccgagcctgctacggccgcaattttggacccaagggagtgggctacggtctgggcgcgggcgctttgacaacgttctaaacgagcctattttatgtatatccaatcgaaacccacatccatgtctgtgaaccgttccgatgcatctgtctaatgaccaatctgttttaactaactatccctgaaattagctaacttagtcttcgttttgcttccaacgatttttgatcaacgatgcactgaatgcaattcaattttctttaggttatgtgagattaagtttaatatgaaaacaagaaaaaaagaataaatgccaaaaacataaaacttacgactcaaagcgaaactaaccatcgaacacagactaacgaactaaacgacattgaccacatcgagaaaagcaaaactttctgcaggtgaaactgctgcgagccaaagtcgttattacttttttgtatcttaaactatttattttcgaagaccagccaagtatgtcttatgctccaaatcgaattacccaaaagcatactttgtgcaaatggaaaaattttatacacataaatatactcttacgacgaacaatgatgaaagatatgatgttgtatatttagctgatttagttcttacgatatacttatgaaatctgattatttataatgatgtttgaatgatttctcacccatctaatctcttgcattctgtttgggatgccagccatggcagatataaaatatttatttatatatatatacatcagcgtacatgttctgcatacacacacacacacacataacatccaataatatatgccccagtgggttccatgaaaacaaaatgatttcgaaatggttttcgtagttttaattgatttaattgggtgtgcatacctgagatttctgcatctaaatggttggttggcaatctgattggaatgaccggtgggtggttgggttgagttcaattccgtttgtttcgggatcgttcggttcggattgagccagctcatctggtctatatatagcttgttcggccgacaaacatcgtgaaaaataattgctcaacatacgcacaaagaacgttccctacatatacgtacaggaataaatccttggttgtgtgtgtgtgtggcctctcgagaaaaacatcgaaatgttccataaccgtactgaaatggttttctaaatataaatatgatgccaatatgcctcacacagctgacccgaaagcttttcacagcactcaaaactctcactcaagagaagaacttaagagattgtatttattcgcatatatacttgtgaggaatcccta

SEQ ID NO: 35 - DNA, 1863 bp, DROSOPHILA
tgttaatcgaagctaaactaaaattaaggatatttctcttgcgaacctttttattacgaacgaaaaataataaacttaataagtaaagtaattgtactcgcgtagatcattttgatagcgttaaaaaaaccgaaacacagacagaatgccttccttccaaccgatcgaggcccccaagtgtccgcgctgcggcaagagtgtctacgctgccgaagagcgtctggctggcggctatgtattccacaagaactgcttcaagtgcggaatgtgcaacaaatccctggactccaccaactgcacagagcacgagcgcgagctctactgcaagacgtgccacggtcgcaagttcgggccgaaaggttacggcttcggcactggagctggcaccctctccatggacaacgggtcacagttcctgcgcgagaacggcgatgtgccgtccgtaaggaatggagcccgcctggaacccagggctattgctcgtgcccccgaaggtgagggctgtcctcgttgcggtggctatgtgtacgccgccgaacagatgttagcccgcggtcgcagctggcacaaggagtgcttcaagtgcggtacctgcaagaagggtctggactcgatcctgtgctgcgaggctccggacaagaacatctactgcaagggctgctatgccaagaagtttggacccaagggctatggttatggccagggcggtggtgctctccagtccgactgctatgctcacgacgacggagcaccgcaaatccgtgccgccattgatgtggacaagatccaggcccgtccgggtgagggttgcccacgttgcggcggtgtggtctacgcagcggagcagaagctttccaagggtcgggagtggcacaagaagtgcttcaactgcaaggattgccacaagactctggactcgatcaatgccagtgatggtcccgatcgtgatgtgtactgccgcacctgctacggcaagaagtggggaccacatggctatggattcgcatgcggctctggtttcctgcagaccgatggcttgaccgaggatcagatcagcgccaacaggcccttctataacccggacaccacgtcaattaaggcccgtgacggcgaaggctgtccccggtgcggaggagccgtattcgccgccgagcaacagctgtccaagggcaaggtgtggcacaagaagtgctacaactgcgccgactgccaccggccattggactcggtcctggcctgcgatggacccgatggcgacatccactgccgcgcctgctacggcaagctcttcggccccaagggctttggttacggccacgcccccactctagtgtcaaccagtggcgagagcaccatccagttcccagatggccgtcctctggccggacccaagacttcgggcggctgcccgcgttgcggtttcgccgtgttcgccgccgagcagatgatcagcaagaccaggatctggcacaagaggtgcttctactgctcggattgccgcaaatcgctggactcgaccaacctgaacgatggacccgacggcgatatctactgccgagcctgctacggccgcaattttggacccaagggagtgggctacggtctgggcgcgggcgctttgacaacgttctaaacgagcctattttatgtatatccaatcgaaacccacatccatgtctgtgaaccgttccgatgcatctgtctaatgaccaatctgttttaactaactatccctgaaattagctaacttagtcttcgttttgcttccaacgatttttgatcaacgatgcactgaatgcaattcaattttctttaggttatgtgagattaagtttaatatgaaaacaagaaaaaaagaataaa

SEQ ID NO: 36 - protein, 495 aa, DROSOPHILA
MPSFQPIEAPKCPRCGKSVYAAEERLAGGYVFHKNCFKCGMCNKSLDSTNCTEHERELYCKTCHGRKFGPKGYGFGTGAGTLSMDNGSQFLRENGDVPSVRNGARLEPRAIARAPEGEGCPRCGGYVYAAEQMLARGRSWHKECFKCGTCKKGLDSILCCEAPDKNIYCKGCYAKKFGPKGYGYGQGGGALQSDCYAHDDGAPQIRAAIDVDKIQARPGEGCPRCGGVVYAAEQKLSKGREWHKKCFNCKDCHKTLDSINASDGPDRDVYCRTCYGKKWGPHGYGFACGSGFLQTDGLTEDQISANRPFYNPDTTSIKARDGEGCPRCGGAVFAAEQQLSKGKVWHKKCYNCADCHRPLDSVLACDGPDGDIHCRACYGKLFGPKGFGYGHAPTLVSTSGESTIQFPDGRPLAGPKTSGGCPRCGFAVFAAEQMISKTRIWHKRCFYCSDCRKSLDSTNLNDGPDGDIYCRACYGRNFGPKGVGYGLGAGALTTF

SEQ ID NO: 37 - DNA, 3356 bp, DROSOPHILA
ctggacataaccatgcggtgagttggttgtacctttaacttcaataaatcgcttattaaccgttccgtatctggcagatcgcattgtcagctcatcgaggtcttcatgcggggtccccattcctacagcaagcccctcaagggcggcaccacgcccacaaccccagctagctctagcgacaatgtttactgctgctgcaaggactagaagctttaaccccatagaattagcatcaatcgttggccgtgacatgtagctcttagttttgcgtagggtatccttattcgtatatgtatcgtgttaaagagcgggtctccccgtcattgtttttagcatagctcaataaagcaactgatattatcgactgtattatggcatctgaaagatgcggcagcaacctaaacattcccctcggaagcattatgcacatacctatatatttacaaattgtgtactggtatactggcaataaaaatgtatttatatgtcttcaaatttataattctttattattaatttatatgatcaaatgttatgataaaaaacttcgttgggttcccaaaaacaacaatccggaacatgtgcgtttttcccaccaatatgaataaaagcagaagttttagcaaaagaaccttattccgcttaaaaagctatggagaatcgtgttcgaagggagagaagggagatattggatttgtagattgaccaggataatttccaaacgtcatttacatttattgctctcgattcttatactttaatgaccattgaacggcttaaaatgaagtaaagcaaatggtcattatatattaactaaacatatatttagtttcaaggagtagtaaataccgtagaagcaacgggtatacatgagtcttaatcctaattgagtgaaaagttctttaatttcttatctttcttctccttgatttgtattatcaacgaggattataaagacaaaagtaaaaaaacaaattcagtataggcagcgtggtgttaactgttttacattacttttaacatcaacatctaataaaatgttaaaaagttcacaattaaacttcaaattaatttaatttaacacatgtaaaacggtgtgaccaagctaatagtggattcatctttggtatgtctggtatttttagctaccggttgccgatactggtattgccgcccgcctaaagtctgttcacactgcgctgactcttgattttatttgtgcccgtcattctccggcagcgacaaacatttcaaagtctcgcgttattccagtctccgaataaattagcatgttgaacaactacaacagcctagcgcagcccatgtggcagaacggacccgctcccggcgagttctacaacttcacgggcggacagacgccggtccagcagctaccgcgggagctgaccacaatgggaccctatggaaccaagcacagcacgtaggaactgcggatatgtttatatgcagatgtaccacttgtttacactccttttactattccgcagtgcttccagcaccacgggcacttccgtgcttggcattcgctatgattcaggagtgatgctggccgccgacaccctggtgtcttacggatccatggcccgctaccaaaacattgagcgcgtctttaaggtcaacaagaacatcctgctcggcgggagcggcgacttcgctgacatccagtccatcaagcgcaacatcgaccagaagatgatcgaggaccagtgctgcgacgacaacatcgagatgaagcccaagtccttggccagttggatgacccgtgtgctctacaaccgtcgttcgcggatgaaccccctctacattgacgtggttgtcggcggcgtggacaacgaggggactccgtacctggccaacgtggatctccgtggacgatcctacgaggactacgtggtggccactggttttgcccgccatttggccgttccgctggtccgtgagaagaagcccaaggacagggactttaccgccgtagaagcttccgaactggtaaggaatttcgaactctgatggggggactcttcattatttaactaccctaccattttcttatattctagatccgcacatgcatggaggtgctttactaccgcgatactcgtaatatttcccaatacactgtgggcgtgtgcagcgtcaacggatgcggcgtggaggggcccttccaagttaacgaaaactggacattcgccgaaaccataaagggatactagagcctccgattctgaatgaacttagtttaggtctagctcggcggttttgcattaaaaaaaaacacttgtctaaggatatgtggttacatgatttattaaaaataaatgtggctgaaaataatacgtttaaagttatggttattgtgtgatagaaactatcttcgagttattctttcgttaatctctactgatggaatcaaaaagtaggcgtcaaactaagaagcccaagggagtttccaaatctaacttggactcaccattacggtcttacgttccttattttcccaaattataaccatcaattatcattaaaagttttattttagtggatttgttggttattcctcccggcattcaacttattaattaatatgcaaacactcctgacaaacatattttggtttattttaattaacataaaatctggctaaatatacagataatcaatttgatccaaaggggaatttcgcaaaggataactgcttggaatacgtgtcttaagtcgcccatgcgcctcctaatctccgccagctgcaaaccgaaccccttgttagtttagcatggtatgcctgtcgtagatgtggcgtctctgctcgcgcacctgccgcttccacttgtcctgctggtggcccacacgattgaggacattggctctggcactgagctcctggttgttgacggctggcaggggcggcgttggttcatcctggttagaaaagggtggaaaaatgtggaattagtcgaggtgatccaagatctggccgtgttagttactgtcttaatgaagtgacggtgtgggttagaaagtcaacaaaatctataacgcaaaatgaaacaaaggtggttgtggaaattaaaatctattcaaaagagtggtgcttctttattgccaactagttgagccgcttcggcatcaacatcgtcatcttcatcatcttcgccttgggctgtaactaggaggctatactgaatgcccttgtatctagaaagcttgttatgtacatcttcgttggtgtgctcctggtagttcgccttcactcgcttgttcagcaacgggtccaggcacatcaggaagagcatgtatattactaaaatggagatgatccaaatcacaataatgac

SEQ ID NO: 38 - DNA, 1218 bp, DROSOPHILA
ctgttttacattacttttaacatcaacatctaataaaatgttaaaaagttcacaattaaacttcaaattaatttaatttaacacatgtaaaacggtgtgaccaagctaatagtggattcatctttggtatgtctggtatttttagctaccggttgccgatactggtattgccgcccgcctaaagtctgttcacactgcgctgactcttgattttatttgtgcccgtcattctccggcagcgacaaacatttcaaagtctcgcgttattccagtctccgaataaattagcatgttgaacaactacaacagcctagcgcagcccatgtggcagaacggacccgctcccggcgagttctacaacttcacgggcggacagacgccggtccagcagctaccgcgggagctgaccacaatgggaccctatggaaccaagcacagcactgcttccagcaccacgggcacttccgtgcttggcattcgctatgattcaggagtgatgctggccgccgacaccctggtgtcttacggatccatggcccgctaccaaaacattgagcgcgtctttaaggtcaacaagaacatcctgctcggcgggagcggcgacttcgctgacatccagtccatcaagcgcaacatcgaccagaagatgatcgaggaccagtgctgcgacgacaacatcgagatgaagcccaagtccttggccagttggatgacccgtgtgctctacaaccgtcgttcgcggatgaaccccctctacattgacgtggttgtcggcggcgtggacaacgaggggactccgtacctggccaacgtggatctccgtggacgatcctacgaggactacgtggtggccactggttttgcccgccatttggccgttccgctggtccgtgagaagaagcccaaggacagggactttaccgccgtagaagcttccgaactgatccgcacatgcatggaggtgctttactaccgcgatactcgtaatatttcccaatacactgtgggcgtgtgcagcgtcaacggatgcggcgtggaggggcccttccaagttaacgaaaactggacattcgccgaaaccataaagggatactagagcctccgattctgaatgaacttagtttaggtctagctcggcggttttgcattaaaaaaaaacacttgtctaaggatatgtggttacatgatttattaaaaataaatgtggctgaaaataat

SEQ ID NO: 39 - protein, 268 aa, DROSOPHILA
MLNNYNSLAQPMWQNGPAPGEFYNFTGGQTPVQQLPRELTTMGPYGTKHSTASSTTGTSVLGIRYDSGVMLAADTLVSYGSMARYQNIERVFKVNKNILLGGSGDFADIQSIKRNIDQKMIEDQCCDDNIEMKPKSLASWMTRVLYNRRSRMNPLYIDVVVGGVDNEGTPYLANVDLRGRSYEDYVVATGFARHLAVPLVREKKPKDRDFTAVEASELIRTCMEVLYYRDTRNISQYTVGVCSVNGCGVEGPFQVNENWTFAETIKGY

SEQ ID NO: 40 - DNA, 4551 bp, DROSOPHILA
aagtgtagcaatcagaacatcacaaatagtaaataaattaataataataataatcatatccaaaaatatttttattcctaacctatcgcattgttacatcgagggtgaaattcaaaatagacaaaaagttggggaataaaatgtgaaaaaagtggtaaaatgtttaatagtgtgggcgttactgttttgtcggtgtgaggtgcgtggccaccaaagtgtttttggtataacgatagaaattggtaagacaaacaatattgcgaagaaaacccgaagcatttttaaaaagtgcgaacgtggcagttttaagggtttgtgggcgtggcaataatttttggcaattcgataaaaatgtacaggaccaaatatatgaagaaatataaaatatttttcaaaatgacagccagcaaccatacatatatataaataaatgtcggagacccttccttctacctgtaacatacttttccacgaatctagtattggttgatatataattatgctgtgtataagaccaaaatcagtgtacatttccattggattcaccaaccggatggttccggatggtaatgcaaaatattcatctaagaaacgaaaacacctagaattaaacctgaactgatatgacttatgcacatatcagtgaggtgggcagttcaaagcaatcacgatgctccaagttattatcgcagtgcagtgaaaaattcacagtcaccgtcgccaattgccaataaagatcggccattatacaacagaaccgcgttgaagacgatcgacgaggtcgtgggtcttatcttatcaccacctgaattgaggcatgcctccagaatgacgagggcatccgaagataatgtggcccgctattttcggccgggactggacctatgcgacgacctatgctgatgacgggagtctgccgctgatatggtgcaatgcaaggctccagtcgggggtataaaagacccagtttcggtgcagtcaagacaacagactttaggtgttggtcgttgagcgaaccaaagccggagcagttgaggaaccaaagaatagcagcgagaggaccaaggatgaagttgacccttgttatattggctctcgtagcctgtgtgactgcctttagcgtgcccacgcagaaggtaaagatcgccgacaagaacttcctggagaagcagaagttcctcttcgagatcgttcaccgtattgatgagcctctaatgttcgaggaatggattaagatgggccaaaagctgatcaccgacaaggctcaatacgaggtgagtgcattaagaacatcactttcttcctgaaaccctagccatttccttgtaattccccacagaccttcgatttctacatggagaagctctgggaatcctacaagcttggagccctgcttcccaagggagagtttttcggagccctggtcaaaacccaccacaagcaggcctacggtctgttcaacttcttctactacgccaaggattgggagaccttcgtccggaacgtcgcatgggcccgcatccacgtgaacgagggaatgttcgtctacgctcttaccctggctgtcatccacaagcccgagttcgaaggtctgatcctaccacagatctacgaaatcttcccccagtacttctttaacagcaagttcgtgtacgcggccgagaagttcgattatgaggtcttcagcaagctgaccatgtacgagaaggagtacaaggatatcctttacaaagactacagtgagttcaccggcaatttctatttctacaccaaggactggaagacatggcagtggtacaaaatgatgggtctagaccaggagtggtacgtcgaggacaagtacttcctacgcgaaaacctctctcaatttgtgaacgatccaaagtacgttgatgttgtcaagggcctaaaaaaattctacatgcctgtggactacacccgcgacatcgattttttcaacgatgaaactaagatgacctacttcaccgaagatcttggctggaatgcttactggtactacttgaacatggactacgcctttttcttaaacggaaagcagttcggattggacaaggaccgtcgtggcgagtactggatttacaatgtgcagcagatcctggcacgatactaccaggagcgcctggccaacggttttggcgagatccccgagttcttctggtacaagcaaatagagtacggctacgatccccagctgatctactacaatggcattggctacagctaccgaaagaactactatgacttctacacctacggcaaatttgaaatgtacagccaaatccagaacttcttcagtcgcgtctacaaggtcctagagacaggattttacaaaaccgccgacggtcaggtgttcgaccttcacaagcccgaggctattaagattgtgggcaactacctgcagggcaatgctgacacctttgacaagtacttctttaactactactacttgctggcccatatgtacttcgctgatgtagactacaacgacatggaggtgttccctaacgttttcctgaacttcgagactatgctgcgcgatcccttcttctacaccttctacaaaaagttcaccgatgtgttttacacctttaagtactacctgaagccctacacccaaaaggatcttttctacgagggcattaccatcaaggatgtcagcgtcagcaaactggtaacatactacgacattgtggacttcgatgtgaccaacttgctcaacgacaagatgacgtttgtcgacggccagtacatatgggacaaggctctgttggcccgtcaggcccgccttaaccacaaacccttcaacttcgaattcactattgattccgacaaggtgcagaagggagttgtccgcgtgttcctgggccccaagttcgatgaatacggccgcgtgataccactagactacaaccgaaagaacttcgtgcagattgacagctttgtgtaccccttcattgccggcaccaacactatcaagcgcagctccaaggagttcagctggaccgctgaggacaggattacatacaccgagctctacaagtacgtgatgctggccagcgagggcaagtacgactttcccctggacattagcgagccgcataacgccttccccgaccgcctggtgctgcccaagggatgggagcagggcatgcccatgcagttctacttctttgtctcgccattcgccgagacgtacgaacagttctctaactttgattacacctactcctcgggagttggctccggcacccggttcgtggacaccaagcccttcggctatcccttcgaccgccagatcgatgaatccgacttctttgtgcctaatggcttctttaaggacgtcaaggtctactacgtcgacacctttgccaagtactttgagaagaagtacacccagttcggcaccttcgactactccattgaatactaagccacactggatctagctcttagcaatgtcgcaggcaaaaaaaccaataccaaaaaaatatataaacgaatttaaaataaagaaatactgaataattaaatattcataatcttgttgttcgcatcattaacaagccttgccttttcagatcaccagaaacacaaaatgtcttttgcactaaaagctaagtaaacccgcttagtgccgtaacatgggctaatggcgttcggcggcgcctgagtcacattgaaaccgaaaactggacgctgaaatttttttcttctcctattctgcttgtgggaaaagaaatatgtgtaataaaacgctgagccctgaaggctagtggtcaaatactaaacgcagaagggcgaagtccttgagcaggaaacggcaagggttcgttaaactttcaacgccagctaagcccgatacgagtcctgattccagtctcccttttctgcttagcttctagaaggcgtatggcgatggaagggaggccagctcgtgcgttgctttctggctacgcacataatatcgacgcactttttaaaagtctctggttccaccatttgtatttggtgcgtcactcctgccagcttatgggtatcgtctggcggtgaggcgcagaaaaaaggaaatgtgaaaagaaaaaaacgtaaaaaaaactgcctgaagcaaccaccacatacaacatcagcatcaaatggagtgcagaggggaaggctttaaagtggtataatgtggtagcaacccagtcaaagacctaaacaaaagaaaccccagacgaaatctcgccttttgcccatgtgcgtgtgcgctccactcgtccccccaagagatttgtctaaagctccttggacttcctggtgcgtaacgcgatagcctggcgcacttcaatcaattcaaattccttgagcttgtcttggccccagcgctcacattttaattgcccggcgggcggaggtagcttaacccataaattataaacatttgcctaaacttctcacctatatggtttcttttagcttaacccataaattataaacatttgcctaaacttctcacctatatgttttctttttttccaaagttaaatgtat

SEQ ID NO: 41 - DNA, 2486 bp, DROSOPHILA
ttggtcgttgagcgaaccaaagccggagcagttgaggaaccaaagaatagcagcgagaggaccaaggatgaagttgacccttgttatattggctctcgtagcctgtgtgactgcctttagcgtgcccacgcagaaggtaaagatcgccgacaagaacttcctggagaagcagaagttcctcttcgagatcgttcaccgtattgatgagcctctaatgttcgaggaatggattaagatgggccaaaagctgatcaccgacaaggctcaatacgagaccttcgatttctacatggagaagctctgggaatcctacaagcttggagccctgcttcccaagggagagtttttcggagccctggtcaaaacccaccacaagcaggcctacggtctgttcaacttcttctactacgccaaggattgggagaccttcgtccggaacgtcgcatgggcccgcatccacgtgaacgagggaatgttcgtctacgctcttaccctggctgtcatccacaagcccgagttcgaaggtctgatcctaccacagatctacgaaatcttcccccagtacttctttaacagcaagttcgtgtacgcggccgagaagttcgattatgaggtcttcagcaagctgaccatgtacgagaaggagtacaaggatatcctttacaaagactacagtgagttcaccggcaatttctatttctacaccaaggactggaagacatggcagtggtacaaaatgatgggtctagaccaggagtggtacgtcgaggacaagtacttcctacgcgaaaacctctctcaatttgtgaacgatccaaagtacgttgatgttgtcaagggcctaaaaaaattctacatgcctgtggactacacccgcgacatcgattttttcaacgatgaaactaagatgacctacttcaccgaagatcttggctggaatgcttactggtactacttgaacatggactacgcctttttcttaaacggaaagcagttcggattggacaaggaccgtcgtggcgagtactggatttacaatgtgcagcagatcctggcacgatactaccaggagcgcctggccaacggttttggcgagatccccgagttcttctggtacaagcaaatagagtacggctacgatccccagctgatctactacaatggcattggctacagctaccgaaagaactactatgacttctacacctacggcaaatttgaaatgtacagccaaatccagaacttcttcagtcgcgtctacaaggtcctagagacaggattttacaaaaccgccgacggtcaggtgttcgaccttcacaagcccgaggctattaagattgtgggcaactacctgcagggcaatgctgacacctttgacaagtacttctttaactactactacttgctggcccatatgtacttcgctgatgtagactacaacgacatggaggtgttccctaacgttttcctgaacttcgagactatgctgcgcgatcccttcttctacaccttctacaaaaagttcaccgatgtgttttacacctttaagtactacctgaagccctacacccaaaaggatcttttctacgagggcattaccatcaaggatgtcagcgtcagcaaactggtaacatactacgacattgtggacttcgatgtgaccaacttgctcaacgacaagatgacgtttgtcgacggccagtacatatgggacaaggctctgttggcccgtcaggcccgccttaaccacaaacccttcaacttcgaattcactattgattccgacaaggtgcagaagggagttgtccgcgtgttcctgggccccaagttcgatgaatacggccgcgtgataccactagactacaaccgaaagaacttcgtgcagattgacagctttgtgtaccccttcattgccggcaccaacactatcaagcgcagctccaaggagttcagctggaccgctgaggacaggattacatacaccgagctctacaagtacgtgatgctggccagcgagggcaagtacgactttcccctggacattagcgagccgcataacgccttccccgaccgcctggtgctgcccaagggatgggagcagggcatgcccatgcagttctacttctttgtctcgccattcgccgagacgtacgaacagttctctaactttgattacacctactcctcgggagttggctccggcacccggttcgtggacaccaagcccttcggctatcccttcgaccgccagatcgatgaatccgacttctttgtgcctaatggcttctttaaggacgtcaaggtctactacgtcgacacctttgccaagtactttgagaagaagtacacccagttcggcaccttcgactactccattgaatactaagccacactggatctagctcttagcaatgtcgcaggcaaaaaaaccaataccaaaaaaatatataaacgaatttaaaataaagaaatactgaataattaaa

SEQ ID NO: 42 - protein, 772 aa, DROSOPHILA
MKLTLVILALVACVTAFSVPTQKVKIADKNFLEKQKFLFEIVHRIDEPLMFEEWIKMGQKLITDKAQYETFDFYMEKLWESYKLGALLPKGEFFGALVKTHHKQAYGLFNFFYYAKDWETFVRNVAWARIHVNEGMFVYALTLAVIHKPEFEGLILPQIYEIFPQYFFNSKFVYAAEKFDYEVFSKLTMYEKEYKDILYKDYSEFTGNFYFYTKDWKTWQWYKMMGLDQEWYVEDKYFLRENLSQFVNDPKYVDVVKGLKKFYMPVDYTRDIDFFNDETKMTYFTEDLGWNAYWYYLNMDYAFFLNGKQFGLDKDRRGEYWIYNVQQILARYYQERLANGFGEIPEFFWYKQIEYGYDPQLIYYNGIGYSYRKNYYDFYTYGKFEMYSQIQNFFSRVYKVLETGFYKTADGQVFDLHKPEAIKIVGNYLQGNADTFDKYFFNYYYLLAHMYFADVDYNDMEVFPNVFLNFETMLRDPFFYTFYKKFTDVFYTFKYYLKPYTQKDLFYEGITIKDVSVSKLVTYYDIVDFDVTNLLNDKMTFVDGQYIWDKALLARQARLNHKPFNFEFTIDSDKVQKGVVRVFLGPKFDEYGRVIPLDYNRKNFVQIDSFVYPFIAGTNTIKRSSKEFSWTAEDRITYTELYKYVMLASEGKYDFPLDISEPHNAFPDRLVLPKGWEQGMPMQFYFFVSPFAETYEQFSNFDYTYSSGVGSGTRFVDTKPFGYPFDRQIDESDFFVPNGFFKDVKVYYVDTFAKYFEKKYTQFGTFDYSIEY

SEQ ID NO: 43 - DNA, 4882 bp, DROSOPHILA
tcctgttcggcctcctccgccgacagcgatttgtagcgctgaataggctggaagttgtaccactcggtcaaggggtatgcctcaatggcgccgtctggtgcatgggtgaacacatagaaagctgcattctcgcctacgccgccctcgcggatgcctttgaacttctttccagtcttgccacccactttaaggatccatggctgtgcctctggacggtactttctcgctataatgccaaacttcttgcggcgcgcctcctcgcgctgatcccggttgtactccgatccagcaccaaacttgggctgatcctcctccatgccccggaactccttcatgttgttttcccgctccagtttcacatttctccactgcgcgaaatccacattgagcgtggcgttgaaccgcatcacatggtgcttcttgggcatcttgggcacgcggatcttgaactcctgcacgttggcggatgacgaggcggatcctgaggcgacagaggctgcggcggcggcagctgcggacgtggagctcccgctggcagcgctcggctgcatgaaatcaagcgaagaccgcaaataagtgttggcgccggaagcggcagggtaaagacttaccgtcgactttgacgcgctcgacatggcttaatgtttgctaatcatatgttgcttctatctggatattttatacttttccccaaactcttacaattcgcggcgcgggcagaaaagttggattttctagcgatgtccgataacagaagtgcagttattctttggaagcaagtgtatcgtatcgtttgggcagaaaaataatatttattccaagagattttgataaacaaattggaaaagtagatattataagattgcatattcaagccctacaaggtatttaaaaacttcaaagttttgtaatgttctatcaaaataaagtgacagccgatatccgttcacagtcacggttatcgattacctctttttagataaacgattgtcgccatagcaaataacgataaattcacaaagcgctgtctagtttgtttggatttcatttgcagtttgtcgcttaaatgttagggaaaatgtcgcggaacgtgacgctctcggatgaacaaagtcggcttaatgcgcgtctggaggcgcacatggtttacatatgtccggaatgcggcaaggcgttccgcactcaggcggagtggcgacagcatctgaacacggcaagttgcgggttttgtgcaaatcaagttctgctttaataatggtttgaaatgtgcccacagaaacacgactatctaaagaagacgtactcagatttcaacttcatccagatcgacgagcgattccatgagtgccagctgtgcttcaaatgggtggagaatgcccacaagacaatcgccctcctgcagtaccactactttatgcatctggagcacagtgaaacctaccgctgcgtgcactgccgcatggcgtacacgaggcgccgggctctgaacgtccacctactggacacgcacatgcgggagatcgagaagtacgagaacaagctgcgccagatgaagcggcagcaggcgaaacccactacagcggccgcaccagctggaaatgcagagaagccgatggctgtgaagccgcgtgggcgtcccaaaggttccacgaacagaaagcaaaatgatctgctgcaaaaggcgctgatggacattgatctgaacacagaaatggaaaagtccccagtgacagcactagcggctcctgtaaacgaacctaagcccatttcaaatgtcagcgagctgaatctagatcggtgtttgaatgcctacgaggacatcgtgcgcaaggaggagaaagaggtggtgccgaagtatgacgacgagttggatgcgctctgcaaggagttttttgatgatggcccctccgccggcaaaggagaagctaatgaggagcagcagcaagacgatgcgcacctgcagcaaggaaatcaggaggtggtcatcatcgagatcgatgcactcggcaaggaggaagtggcccagctgaagaaggaaatgaagtcggacccaataagtcaaccgactaagcgtcgacgcatctctacgacgcccagccgcgactcagacacggaaatgtccaccaacggcctcacgaagctcatatcgtacttgtgtccgaagtgcggcaaggaaatcgcctcgatggacggttggcgggcacacgtattcaagaagcacgacttcgagcacataatcgagaacagttttaagatcctggagtccgggcgcaaggccatgtgcctgcagtgccgtgaggtgcaaccaacgaccgtgcgctcacaactgcagaagcactgcttcaagcatctgccctaccggtcgtacctcaagtgcacactctgcgatcgcaccaagaccagcacctcaaagatcctcaatcacattcgctacaaccaccaggaggagctgcagcgtaaaaacaagacgcagctgcttattaagccggagcccatgtgggccagtcccaacaagtccggtcaagcggccatggcggatgacgccggatccgaggacgatcagggcgagcaagctgtgtgcgagcactgtgacagagtctttaggagcaaatggcgctacgaacgacacattgcctcttgcaggagatctggagctggcaagtcagtcgaagggaccgttgaagccttgttgaaccatctgcgagaagggcacatgcgaatgaacgccatctggaagacgatgcaacgtgaaaagccttaggtatagtctagttaaagttaagtcggtccatcgttttgcaaatatcatcaagtgtaaaatatacgtaagttttcaaatccttgtgcaaatattgtgctaggaaaagatcataattaacacatacgacttacatgcctatgaaacatgtatcaatctgcatttaagttgttatatgttaactatatagcgtatacaactaaataatatatagatattttaaatccatttctcataaatatgtttttcaagaagtacatttatattttttttttttttgctgtgaattataggacaggatcgataaaggcatttaaattcatgggcacgacctttgacagtgtctcaaggagcagtagcgattctggttgccgccacatccgaggtacttcatcttgaggcacttcctggttctctggttatagtaccacatttcgtccatggcagttctccggcaatgccttcccccaaatccttcgttcttgccgccttcgcaactcagacgacctgtgtgaaagtgtagatcagctataaaagtacacttactaaatgctgttattaaacatacccctaggacgaccatcgcagcgattctggccacatgcgagagatacgtagagcacaacgcaagctagaaccaaaagtaacttcattttcaacggattgctctttggagggtcgacttgatatgactgatctgtaaaacgatggacttatataggggcggctgccaacatttttcccagttccctagaacgagtaaaaaacatcttgacaatcgactctattgttaaatgttttgaggctatcagataatagtataaaaaaggggcttaaattaaactttttaaaggcataagatgtgggatgaaccattcaaaaacgttgctggaatgaaaatgtattttccacttttaacttaaaaaaaaaagctgcaagatcgatctttcgctcaatcctattgatttcgtatcagggcaaaaacacttgtgctgaatgtaaatatgatttaaccagaattatatttacccaattaattaacattcttttcgttagtcactttgtattactaatacgaggaatacttttctgactaattcattttataaatcagattaaggattaaatttaacatgacgattatttattatgtttaatttaaaacatttcactttaaagcaattgttattcagttaggtaagcttcaaggcatagctatccattgcggagcccaaaagccacttggcttacgactgcgcatgtggctacctatcgagcgtctcattattgctctgcgtctggagaaagccctttccatggttctaatagttgcgtcgccttctgcgccttcctgttgcacgcggtcatcatccacctcgtgattgctggatatgaccacgatcttccggcgaccatggaacatctcagcccgctttatcagcgccaggaagcgggcgaacttcttctccagcgcagccctgtccagaggctttggcatgggttccagtagcccttcggcatgagcttcttcccctcctggcgattcggaagcgggtgtccctccagctgttggtgcaggagtggagccttctccctccaccggggtgactcctggagtggctcctggcgctgctccgtcgactgctggagtggctgcagcttctccaggtgcagctgctcctccttcggcggcaggcgctgctgctgctccatcggctgctggtgctggtgccccaccttcagctggcggcgttccatcagcgttttcgccgttgagcatgacgaagtcccgttttccaagagttctagttttaatttcgggactggacgcgtttcctgctttcggcgtaaccttctcgtagacctcggactcggcgcagagatgtgcatatttcgggttcgctccggtcttgcaggactccgccgcctttttcccgggctcgtagacgggcgagcccacaaccggggcgtggccatagttgcacgcgaaaaacgtctgaatccagccatgccgggactgctgaacgatggcacagcccacggattcagcgttctccagcacgatctgtaaaaagttgtacttcggcgacctgatagatgggaacacaagttgaagttgattaa

SEQ ID NO: 44 - DNA, 2528 bp, DROSOPHILA
aaataacgataaattcacaaagcgctgtctagtttgtttggatttcatttgcagtttgtcgcttaaatgttagggaaaatgtcgcggaacgtgacgctctcggatgaacaaagtcggcttaatgcgcgtctggaggcgcacatggtttacatatgtccggaatgcggcaaggcgttccgcactcaggcggagtggcgacagcatctgaacacaaacacgactatctaaagaagacgtactcagatttcaacttcatccagatcgacgagcgattccatgagtgccagctgtgcttcaaatgggtggagaatgcccacaagacaatcgccctcctgcagtaccactactttatgcatctggagcacagtgaaacctaccgctgcgtgcactgccgcatggcgtacacgaggcgccgggctctgaacgtccacctactggacacgcacatgcgggagatcgagaagtacgagaacaagctgcgccagatgaagcggcagcaggcgaaacccactacagcggccgcaccagctggaaatgcagagaagccgatggctgtgaagccgcgtgggcgtcccaaaggttccacgaacagaaagcaaaatgatctgctgcaaaaggcgctgatggacattgatctgaacacagaaatggaaaagtccccagtgacagcactagcggctcctgtaaacgaacctaagcccatttcaaatgtcagcgagctgaatctagatcggtgtttgaatgcctacgaggacatcgtgcgcaaggaggagaaagaggtggtgccgaagtatgacgacgagttggatgcgctctgcaaggagttttttgatgatggcccctccgccggcaaaggagaagctaatgaggagcagcagcaagacgatgcgcacctgcagcaaggaaatcaggaggtggtcatcatcgagatcgatgcactcggcaaggaggaagtggcccagctgaagaaggaaatgaagtcggacccaataagtcaaccgactaagcgtcgacgcatctctacgacgcccagccgcgactcagacacggaaatgtccaccaacggcctcacgaagctcatatcgtacttgtgtccgaagtgcggcaaggaaatcgcctcgatggacggttggcgggcacacgtattcaagaagcacgacttcgagcacataatcgagaacagttttaagatcctggagtccgggcgcaaggccatgtgcctgcagtgccgtgaggtgcaaccaacgaccgtgcgctcacaactgcagaagcactgcttcaagcatctgccctaccggtcgtacctcaagtgcacactctgcgatcgcaccaagaccagcacctcaaagatcctcaatcacattcgctacaaccaccaggaggagctgcagcgtaaaaacaagacgcagctgcttattaagccggagcccatgtgggccagtcccaacaagtccggtcaagcggccatggcggatgacgccggatccgaggacgatcagggcgagcaagctgtgtgcgagcactgtgacagagtctttaggagcaaatggcgctacgaacgacacattgcctcttgcaggagatctggagctggcaagtcagtcgaagggaccgttgaagccttgttgaaccatctgcgagaagggcacatgcgaatgaacgccatctggaagacgatgcaacgtgaaaagccttaggacaggatcgataaaggcatttaaattcatgggcacgacctttgacagtgtctcaaggagcagtagcgattctggttgccgccacatccgaggtacttcatcttgaggcacttcctggttctctggttatagtaccacatttcgtccatggcagttctccggcaatgccttcccccaaatccttcgttcttgccgccttcgcaactcagacgacctgtgtgaaagtgtagatcagctataaaagtacacttactaaatgctgttattaaacatacccctaggacgaccatcgcagcgattctggccacatgcgagagatacgtagagcacaacgcaagctagaaccaaaagtaacttcattttcaacggattgctctttggagggtcgacttgatatgactgatctgtaaaacgatggacttatataggggcggctgccaacatttttcccagttccctagaacgagtaaaaaacatcttgacaatcgactctattgttaaatgttttgaggctatcagataatagtataaaaaaggggcttaaattaaactttttaaaggcataagatgtgggatgaaccattcaaaaacgttgctggaatgaaaatgtattttccacttttaacttaaaaaaaaaagctgcaagatcgatctttcgctcaatcctattgatttcgtatcagggcaaaaacacttgtgctgaatgtaaatatgatttaaccagaattatatttacccaattaattaacattcttttcgttagtcactttgtattactaatacgaggaatacttttctgactaattcattttataaatcagattaaggatt

SEQ ID NO: 45 - protein, 514 aa, DROSOPHILA
MSGMRQGVPHSGGVATASEHKHDYLKKTYSDFNFIQIDERFHECQLCFKWVENAHKTIALLQYHYFMHLEHSETYRCVHCRMAYTRRRALNVHLLDTHMREIEKYENKLRQMKRQQAKPTTAAAPAGNAEKPMAVKPRGRPKGSTNRKQNDLLQKALMDIDLNTEMEKSPVTALAAPVNEPKPISNVSELNLDRCLNAYEDIVRKEEKEVVPKYDDELDALCKEFFDDGPSAGKGEANEEQQQDDAHLQQGNQEVVIIEIDALGKEEVAQLKKEMKSDPISQPTKRRRISTTPSRDSDTEMSTNGLTKLISYLCPKCGKEIASMDGWRAHVFKKHDFEHIIENSFKILESGRKAMCLQCREVQPTTVRSQLQKHCFKHLPYRSYLKCTLCDRTKTSTSKILNHIRYNHQEELQRKNKTQLLIKPEPMWASPNKSGQAAMADDAGSEDDQGEQAVCEHCDRVFRSKWRYERHIASCRRSGAGKSVEGTVEALLNHLREGHMRMNAIWKTMQREKP

SEQ ID NO: 46 - DNA, 4662 bp, DROSOPHILA
taaactaaaattaaggatatttctcttgcgaacctttttattacgaacgaaaagtaaatatcagtttttgtcaatggaaaacgaaaaccaaaaccaaaaccaatcacgcataacccagtaaattccaatattttgtgttgtgcttgtctaaaaaatatcggttcaagctctgctacaaaccaaacgcgaagcgatgaaaatacagttttgtcaagcgatcgtttaaatttagaacttgtgcgtaatttggaccataatttgacccacaaatgagaggaggaatgtatggctccacacaggaagcatttttcccacacactattattaatagattccgttttttcgagtgtgaaaaaactttacggaaactgtctcactcaataaaatgagaactatttgcgaggagtttttttttcaatcgagttttattcaagtacaaatcgatcatcttttcatcagatcaaatcgaatagtcactatccttgaatagagaaaaattaaagatacagtccttactcgacgtaaaaaacacgtacattttgatgagttttataatcttattgcatgcaaaaagtattatatttagtcgggaatataaacaaactcccagatgcctgaggtttccaatgatatgcaacttttcgatcatctttgataatctcccactgggataaatgtgcatataatatacacaaaagttagcaaacatccaagaatgagatacggtcaagaaaaaacgagtgaaggatatggaataaaaaactttttcgaagaatcgaaaaagtttaaaaaccgcagatgcataccaatatgtttccatcccactctctggcgttatttgatgaaaactgaaataaaacgaaggaaaactgctccgtgttgccgcatcttaagtttctcaactcggtgtgctgagcaggaaaactcagtggcagcggcgaaaagtcgaccgcgttgccgtgccgtgtgcactcacaattatatagactagtttgctttgagcaatcttccagttcagtactcggcgcttccgtgtgtggttttagtgcgttgtaggttccgttctatcttggctataatacactcacacccaacggttggatatcgccagctcttaaccgatttttttgcacgcagcaaaagaccattgcaaagcacctgactaatccatcgcaaccgctagataaccagattaccggccagggacgatgctcatctgatggtggtgctttagctctgactcagttttagaacacccagatatgtacatatatatatctgccacagttattttttgtgtgtgcttttcccaaatctatctacctgtctgcgttatttttatacaacattttctgtatagatagatacacatttattgctcatgtttttctctgtgttctgtgatttgaaaaattcctcctttattttttgttgtcatgagaaagatgttattttctgatcattaacataggaatcttcaatatgaattacgtatacatacgtccggttgggtaattttctggcacgggcgatgacgtctcgactgacagataagaatcttgatagatgatctacataatgcaaattgaggagaaattcgcgactgtcaagttgaatttgtaatagttcattgtaaacttaagataaaacaagcgtcttaatcgtccaaataggttaacatgtagattagcttgaattaactagttgggcttagaataatttggaaaccatttaacatacaaaaatgacagatgcttacctcatcgctttcatcgccaccaaagcttccactctgctgcatttcccagcaggacttacgccacgatcccatcgactctatgtgttcttctattttgctatttcagataataaacttaataagtaaagtaattgtactcgcgtagatcattttgatagcgttaaaaaaaccgaaacacagacagaatgccttccttccaaccgatcgaggcccccaagtgtccgcgctgcggcaagagtgtctacgctgccgaagagcgtctggctggcggctatgtattccacaagaactgcttcaagtgcggaatgtgcaacaaatccctggactccaccaactgcacagagcacgagcgcgagctctactgcaagacgtgccacggtcgcaagttcgggccgaaaggttacggcttcggcactggagctggcaccctctccatggacaacgggtcacagttcctgcgcgagaacggcgatgtgccgtccgtaaggaatggagcccgcctggaacccagggctattgctcgtgcccccgaaggtgagggctgtcctcgttgcggtggctatgtgtacgccgccgaacagatgttagcccgcggtcgcagctggcacaaggagtgcttcaagtgcggtacctgcaagaagggtctggactcgatcctgtgctgcgaggctccggacaagaacatctactgcaagggctgctatgccaagaagtttggacccaagggctatggttatggccagggcggtggtgctctccagtccgactgctatgctcacgacgacggagcaccgcaaatccgtgccgccattgatgtggacaagatccaggcccgtccgggtgagggttgcccacgttgcggcggtgtggtctacgcagcggagcagaagctttccaagggtcgggagtggcacaagaagtgcttcaactgcaaggattgccacaagactctggactcgatcaatgccagtgatggtcccgatcgtgatgtgtactgccgcacctgctacggcaagaagtggggaccacatggctatggattcgcatgcggctctggtttcctgcagaccgatggcttgaccgaggatcagatcagcgccaacaggcccttctataacccggacaccacgtcaattaaggcccgtgacggcgaaggctgtccccggtgcggaggagccgtattcgccgccgagcaacagctgtccaagggcaaggtgtggcacaagaagtgctacaactgcgccgactgccaccggccattggactcggtcctggcctgcgatggacccgatggcgacatccactgccgcgcctgctacggcaagctcttcggccccaagggctttggttacggccacgcccccactctagtgtcaaccagtggcgagagcaccatccagttcccagatggccgtcctctggccggacccaagacttcgggcggctgcccgcgttgcggtttcgccgtgttcgccgccgagcagatgatcagcaagaccaggatctggcacaagaggtgcttctactgctcggattgccgcaaatcgctggactcgaccaacctgaacgatggacccgacggcgatatctactgccgagcctgctacggccgcaattttggacccaagggagtgggctacggtctgggcgcgggcgctttgacaacgttctaaacgagcctattttatgtatatccaatcgaaacccacatccatgtctgtgaaccgttccgatgcatctgtctaatgaccaatctgttttaactaactatccctgaaattagctaacttagtcttcgttttgcttccaacgatttttgatcaacgatgcactgaatgcaattcaattttctttaggttatgtgagattaagtttaatatgaaaacaagaaaaaaagaataaatgccaaaaacataaaacttacgactcaaagcgaaactaaccatcgaacacagactaacgaactaaacgacattgaccacatcgagaaaagcaaaactttctgcaggtgaaactgctgcgagccaaagtcgttattacttttttgtatcttaaactatttattttcgaagaccagccaagtatgtcttatgctccaaatcgaattacccaaaagcatactttgtgcaaatggaaaaattttatacacataaatatactcttacgacgaacaatgatgaaagatatgatgttgtatatttagctgatttagttcttacgatatacttatgaaatctgattatttataatgatgtttgaatgatttctcacccatctaatctcttgcattctgtttgggatgccagccatggcagatataaaatatttatttatatatatatacatcagcgtacatgttctgcatacacacacacacacacataacatccaataatatatgccccagtgggttccatgaaaacaaaatgatttcgaaatggttttcgtagttttaattgatttaattgggtgtgcatacctgagatttctgcatctaaatggttggttggcaatctgattggaatgaccggtgggtggttgggttgagttcaattccgtttgtttcgggatcgttcggttcggattgagccagctcatctggtctatatatagcttgttcggccgacaaacatcgtgaaaaataattgctcaacatacgcacaaagaacgttccctacatatacgtacaggaataaatccttggttgtgtgtgtgtgtggcctctcgagaaaaacatcgaaatgttccataaccgtactgaaatggttttctaaatataaatatgatgccaatatgcctcacacagctgacccgaaagcttttcacagcactcaaaactctcactcaagagaagaacttaagagattgtatttattcgcatatatacttgtgaggaatcccta

SEQ ID NO: 47 - DNA, 1849 bp, DROSOPHILA
agcaatcttccagttcagtactcggcgcttccgtgtgtggttttagtgcgttataataaacttaataagtaaagtaattgtactcgcgtagatcattttgatagcgttaaaaaaaccgaaacacagacagaatgccttccttccaaccgatcgaggcccccaagtgtccgcgctgcggcaagagtgtctacgctgccgaagagcgtctggctggcggctatgtattccacaagaactgcttcaagtgcggaatgtgcaacaaatccctggactccaccaactgcacagagcacgagcgcgagctctactgcaagacgtgccacggtcgcaagttcgggccgaaaggttacggcttcggcactggagctggcaccctctccatggacaacgggtcacagttcctgcgcgagaacggcgatgtgccgtccgtaaggaatggagcccgcctggaacccagggctattgctcgtgcccccgaaggtgagggctgtcctcgttgcggtggctatgtgtacgccgccgaacagatgttagcccgcggtcgcagctggcacaaggagtgcttcaagtgcggtacctgcaagaagggtctggactcgatcctgtgctgcgaggctccggacaagaacatctactgcaagggctgctatgccaagaagtttggacccaagggctatggttatggccagggcggtggtgctctccagtccgactgctatgctcacgacgacggagcaccgcaaatccgtgccgccattgatgtggacaagatccaggcccgtccgggtgagggttgcccacgttgcggcggtgtggtctacgcagcggagcagaagctttccaagggtcgggagtggcacaagaagtgcttcaactgcaaggattgccacaagactctggactcgatcaatgccagtgatggtcccgatcgtgatgtgtactgccgcacctgctacggcaagaagtggggaccacatggctatggattcgcatgcggctctggtttcctgcagaccgatggcttgaccgaggatcagatcagcgccaacaggcccttctataacccggacaccacgtcaattaaggcccgtgacggcgaaggctgtccccggtgcggaggagccgtattcgccgccgagcaacagctgtccaagggcaaggtgtggcacaagaagtgctacaactgcgccgactgccaccggccattggactcggtcctggcctgcgatggacccgatggcgacatccactgccgcgcctgctacggcaagctcttcggccccaagggctttggttacggccacgcccccactctagtgtcaaccagtggcgagagcaccatccagttcccagatggccgtcctctggccggacccaagacttcgggcggctgcccgcgttgcggtttcgccgtgttcgccgccgagcagatgatcagcaagaccaggatctggcacaagaggtgcttctactgctcggattgccgcaaatcgctggactcgaccaacctgaacgatggacccgacggcgatatctactgccgagcctgctacggccgcaattttggacccaagggagtgggctacggtctgggcgcgggcgctttgacaacgttctaaacgagcctattttatgtatatccaatcgaaacccacatccatgtctgtgaaccgttccgatgcatctgtctaatgaccaatctgttttaactaactatccctgaaattagctaacttagtcttcgttttgcttccaacgatttttgatcaacgatgcactgaatgcaattcaattttctttaggttatgtgagattaagtttaatatgaaaacaagaaaaaaagaataaa

SEQ ID NO: 48 - protein, 495 aa, DROSOPHILA; identical to SEQ ID NO: 36

SEQ ID NO: 49 - DNA, 8542 bp, DROSOPHILA
taggtatcgcgtttcctgtctgcggaagacgcaattatcttgcacttcgtcttgccatggagaagtaattttatcagatactcacattctgcctagtccaacgccaagtctggtggaggcgttccatatcatggccgtaaacctgtaatactttgtgttctcggcgaagcctcggtaatgaaaccaaattcgaacacattccctaggcaaggcctcccggaaaacgcagacgacttgaaggtgctttgctgatattgggtccgttgcatacaggtattccaagtagttctctgtatatacaccttcattcctgactatttcctagaggacgatgaagactgttcaattttaaataatttaggattttatactgaggctgaaatacttgcatctgcgtattctgagcactctgtacagagttcttcgtccagaaccatgggctgattaccgtacttggccctccttcgattgtgagcctccaggattaaggagcgaagacctatgccgattgtctggttgcactagaaggaaatgggttctcagactgaagaaaaatgttagatcgtactacctcgatggcgattaaaaacaaaataatttttatgctcattgcttgttacttatttcgcagaaagattttccagaatatgacaattttcacatagtattattaaatacgcaaggtttatggaaactttattaatatgatttacaatttcgagaattcgagatttcatgctgtgaatgaacatgttacgtttttgccgcaaatggtaggtttaggattcatagccagtgttatttttgaattattattaaattaaatttaaatttgacactttattgtcattctacaaatttaaaaattgaatttttaaactatttcgataactgtttaaagttcattcattccacgacccaaaacagtgaaagtattcgataagatatcggtctccccatgcgtcatcgatggtatcgaaatggaactgatgcgcttccacctctaacaacttttgttcactagggttattcgaagttgtgtttgtgtccgacgaacaacaaacgaattgttaacagaccgagtggggtgacttgtggtccgcgtttcgtgtgtgtgtcattccagacgaaaacgaagatttgcttcgacaagcagagaaaagaagggaccagctccaatcgataatcgaaagaaccgttccgagttggaagaaagtggaaagtaagtggagagtggaaactattttggttcggtgcgttttttcaatgcgggtcactgggaaatgcagacacattcacggtgccgagcggatgacgtgagcagaagggagagagagcgaaagcttgttctctgtcttttctacagaggccgaatgtgcgttttggattcttgctcctcaaggcttgtttacataatcaccgtctcctgctctgctctgctctgtttattccccgcgacgaacagctgctgcgctgccaccgcttatcgattttttccttctcgctttttgcagccggcaagacgacgccattaattggccgtcgccacgtcatgcttgtcgtatgatttttcgtgtccgaacttgcagtaggtgagcacccgccccacgcctccgctctctcaacatctcgctcgatgacgcgtcattttggtggcgtactttaccctgcgatcgtacgatttccccagcggcagcgtcattccaatggggcaagtgttagtcacgctacgtgctccactttcccaagcgcctttttaccgttgcgttgcgtggtcgctcttttccagccaaacataacagagtggcggagagcgagagagtgcacgcgcgtgtttggagagatcacacgcactatcagagtcagctgtttcggcttctcaatgaacttcgtgttcggtgcgtaggcgactgagaaaaagagacggacatatacatatttatatatgaacaacaatagttatagggcattgtgcaatttttctagacaatcttatcactcgccttggagccctaaagcgctgtaaatgctaagtagggtgccccagaaaaacgtgccagtgtgttaactacagttcctactcccagaccgatagttcccagagcgttctcacacgtagcatccgaaaatcacagttgacgtcaactgggtttttcggcttattccgttaagtccattattgataagcccacgccccaaggttatcaatgcaaattgcttgtgtgcaccatggagtacaccccacgatcagtctataattgtactccgatcgtagcttatcaatggcgaaagcactcgtacgcacgcagatttgaataaagcccgaggtagtctttgatactcagtgggcttgggctcacacacagaactgtactttcgaccttttgctgttggccaaaagcgaacgaacatccaataggcaaactccaaaatcatctcttactttgccgtgagattcggcagagttcttcggcctgttaggaaatgttagccccaaactatgaggtttgaaacaatagttaattgtattaaaaaatgtgtttatctcctcacgcttcccgcatgatctaatttaatttgttgtaccgagttatctgaacacatccggttttcgtagtgacacgaaaaacgtaactaaataattatatcaaccattaagggtcaattacggttacatttttagaacgacttgcttttgttcttagtgtaaattttccatttgtgtaaatatttgcaaagattctctatgtttgttgagtgcttttgagataatggaagtggttccaaggattttatttactagaaaatactattaagcagcactttatggccagcttcttcaaaactatattatagatttaagaacatggcttcaactatgtattcatttattgtatatgattgaagtagtagcagctaatcacgtgatttaattacgatcttgctagtagtttcccacattccccgatcgcagggttagcctgacctctgtctgaagaaaatacgtacgatgtgtagtccgtagaagtgtattataatgaaataagtccgtgctgatagcgaacttggcccgccatacgttttgccaggctggcaaagatcaggcggtgtgattgtcagacatgcagggtgtttgtcgagtgctaaccataattaaaggcgaatttgtcttatcgctggaaacagtgaaacatggctcgtttccgccaaacgcatttatcgtgtttccagatacccgcgattcgcgattcgagtgcagcggaagcggccgtcaggcgcagaaatattgttcttctccgagataagttagcagcaggtagttcaggggatcttatctctcacctgcttttagtgcccggcaatttgggaatcgattttacgggttccacacttgtccacttcaaatggaaatctcccctggctttgtttacgtttggattcgcttcaatggaggtggcacttcgtcaccacagtttaaaagccaaagtaattacagtaggcactcgccagtgagattagatatgtttgacttgctttgctattacttaagatatttgtttccaaaaatcatcgtgatacgaattcatttattatcgcaaattgttaaatcacttatatttttaatctaaactagtggcacagtgatttgaaaaaaaaagaaactatagaaatcgtgagtcattactgctatgttttcagaaaacaaaggaaatcctagtaattattagattaagcaatcaaggaaacaacataacttttgtcattattcatattttcatacatttgaagaactgaaaggtttcttatagcgagcagtgactgtagatcgtacgactctgacttatgacgtacgacagctgaagattgccgaaggtgcccgaaattcgacttggcaacagaattagcatgtccacggggaaggtacaataaattcgttaaatttcaaacagcgcttacatcagatccgaaattattcagaaaatctctcggattttatttttatggcttgaacttgaactgtaagcggcttccaagtgactcacgtccaaggcaaatcttgaacacaaaatcaagcactctgctcccctttggagtcgccaggagggactcctccagataaggtgtagaaatctctgacgtattcccaatgccaagaaatatgcagacgctatccacacacgtagatacatatgtaaataggcatgtgtgccacgatgaataaacatgggaaatcgtctacctaaaattattgttagccacgcacgagacagctgaccgcacagtgggcctatttacaatattatcgaaagaagcatttaaaaaatgaggaatttctactttttctatgacgtattgtatatttattatgaacaattatgtagttccaagcaaatgccccaaaatacgcaatgctaattatgtacatatgtgcacatatgacgatcttgtttaattatttcgcacgcagcatcgttttttttttttggcacaaaaactgatttagaacgaccttcgggaaattcgtcattgaaaattcccggtagctgaaataatatgtacatatgacttaactaatcccaactgtaacttcctgcgtgctgcttttgctgggtgtgccatggagcacgagaggattggcgcccagctctcggggggaatgggtcatcgtgtccggctcacgtgttccgtctgcacttgtttacgtaaagtggcgctgcatactcggaactagttctgcgctgggttggccgcccaccctgctgccttccccgccagcgcttcacttgctcatcatcccgctcctatcgagagtactacgtgtctctgtatgtctattattaccgacaccgagccgtgttgttgtttacccgctgtttcagttgcgttttttttttctgcggaatttctctggtgcgatgcgcgtggcgaattgaatcggccatttggcaattaaaactgaaatcgatttggccgtggctcaacttcgaagaaaaggggcgtggctgggggcgcggggtcaggtgtcacgtgtcgtcagcgcaaaacagtcagaactactgccacccgagtcataaatatttgggttaatgaaaagggaatatctgattacataaaaatggtttcacaagaaagtatctttccattagctgcgcgaatgtgtaatatatttttgcttatgcaccaatgcattaaattgtagttcaaaaataactttgtttatttcgaattgtttactgctttattggattttatttataaattgcttggtaaacaagtgcatatgtgtcgattaaacaaaacaagaatacaacttgtgttggttcattgaagtaaaattgttattcctttttgagaaaacttattaaccctttggctaaaagttacaagttggagtggtggaaaaattggcaaagggaaatttgaataaaatccagcgaatgaagaaatttgataaatgatgcttgcaactacatataaacagaatgcaaagctaaccaaatgcggtttcaaagaaaaactttataatttcataagactaaatgtgatgtaaacgaaacgtaacacacaaaatatgggaaagtaatgtagagcattgatggtaaccaatctgtttctcgatctcttccagctgaaagtcaattgaatctctgttcctccgtcaccgcgtcgcgaagccgttaaaactgccgctcccaaacattcgctgcgatggccacctcatcgatactcgccaaaagcacaattaatagcacatcgccaccggccacgcccagcagcagcgcgtcccccggctccacactgaccacccggaagcggacctacgagatagccattgccatgccctcgtccaccgcctccagcagcgccacaaaggtatcggaagttcaggatcagcgcacaaacagccccggcaagtccaagagcaggcccggccagctggagagtgtcttggtggtcggcgagggagccagcgagcccaccacctcggccaccacactgcgggacagcacacgcaccatctcacaaagcgacgccgacgatggcggcgaagcggcagccgccgaggacctgctgcccccacagtcggattacctcaacggcgtcaagcggaagtacgtcccgcagcagcaggcgtcgccgaatcaccgggtggtgcccgcatccacctcgcagcaattcttcagcggggcctccgattttgcggtaagtagtcaagagttaggatgcaaagttagtctaaatcgtagtagctgaaatcgtttgaaattgatgttcgagtcgtgagtcgtatatttccgacgatgtgtgataagatcgagaaagaatgtgtagaccaaggacacaatcgtccagttgaatagcccaactaatcgggaacttttcttcctgcagacaatttgcaagccggcgccctactctcacgacgaggaggccatgctggagcgggatagatgtgactacactcaaaggatcacctaccagatggcccgctccggacagacgacccgcagggtgagggtctacgccgatggcatctacgatcttttccaccagggccacgcccgccaactaatgcaggccaagaacatctttcccaacgtgtacttaattgtgggcgtgtgcaacgacgagctcacccaccgcatgaagggacgcaccgtgatgaacggcttcgagcgatacgagggagtgcgtcactgccgctatgtggacgaggtatgttctgcccggcactgattagagatctttcagtctatagcatcttactctgtcttgcagatcgtccagaatgcgccatggactctgtccgatgaattcatcgccgacaacaaaatcgactttgtggcccacgacgacattccgtatgtaaccgatggcatggacgacatctatgctcctctcaaggcgcgcggcatgtttgtggccacggagcgcactgagggtgtgtccacctcggacatcgtagcccggatcgtcaaggattacgatctgtatgtgcgtcgtaatctggccagaggctattcggccaaggaactcaatgtgtcgttcctgtccgagaagaagttccggctgcagaacaagatggacgagctgaagtcgcgcggcaagcgcgagctgagcaaggtgaaggtggacatcatcaccaagtgggaggagaagtcgcgcgaattcatcgacaccttcctgctgctgttcggacgtgagaacctgaatcatttgtggaacgagtcgaagggcaagctgctgcaggcactcagtccgccgggcagcccgtcgggatcagtgaacggtgatgacacggagggcggcgaggactacagcgaaactattgacgagtacttggagatggccgagaagttgagcgggggcagcggcagcggcagcagtggatcgctgaacggcaaacagaggccgaagcagaagcgctcctcgctggcccgccgcagttaccagagtctgcagagccaatcacccgacttggaagcggatggggacgaggatgcggatgcggatgcggagtacgagcgtcgaagcaattgattctattgcggggcagcccgatcttttcttcttctcttaatgtctttaatgctattgtaaatggacttgcttgcaactagttcgacggcacactatagatgccccaggatcgccacgcaggctccacgaacacacacttatatttactctagccctaagtggtattgtaatcccaatgttttagttggcactcgttctcctcctgcctcaactccacctgcccatctccatctgtgagaatcgagggaatcctgtagctaatttagctgtgtgtgtgtgtgtgtgggacaagcaaccaccaacgcggaaaagactcatttttgtattaggcactcgacggactgtgcacgaaatcaatcggcagtggcggcagattcaggtgccgaaaatatctagaaatatttatattaaattatttcgcataacattaaactaagttaacaacaccgcaaccagaacaccaaccaatatagagaaatccaaacaaacaaattacgaaatacattcggaaaatgcaaaaaacaaaaacaagtaattagtaacagttggcaatagcggaactattgcaaatgctttgttaaatattttttgaaaaataaacattgaatcgaaaggaaatagaagtaaagcgagtggcttgtgaatcagtttgctatctcatacgtttatccagcaattgcgcatccgattcagcagccatccatggcactgctggaattcttgagcgcgcgccaccgatgatgatgaaaccgtttgccttgattggacacccattccctcgcaattagctgcccattcaccggcttgaagcggttcactgatttgtttaatggcgctgcggtttatatatagatgcgcacccatcgcctgatcgaatcggcggacccgtgccaagtcaggcgaccgacccgttgcttcctatttgcttgcgccgcaatttgcggcaattgaagatgagcgatgaatccgagccagagacttgggcctgagactgctagag

SEQ ID NO: 50 - DNA, 1883 bp, DROSOPHILA
cctctaacaacttttgttcactagggttattcgaagttgtgtttgtgtccgacgaacaacaaacgaattgttaacagaccgagtggggtgacttgtggtccgcgtttcgtgtgtgtgtcattccagacgaaaacgaagatttgcttcgacaagcagagaaaagaagggaccagctccaatcgataatcgaaagaaccgttccgagttggaagaaagtggaaactgaaagtcaattgaatctctgttcctccgtcaccgcgtcgcgaagccgttaaaactgccgctcccaaacattcgctgcgatggccacctcatcgatactcgccaaaagcacaattaatagcacatcgccaccggccacgcccagcagcagcgcgtcccccggctccacactgaccacccggaagcggacctacgagatagccattgccatgccctcgtccaccgcctccagcagcgccacaaaggtatcggaagttcaggatcagcgcacaaacagccccggcaagtccaagagcaggcccggccagctggagagtgtcttggtggtcggcgagggagccagcgagcccaccacctcggccaccacactgcgggacagcacacgcaccatctcacaaagcgacgccgacgatggcggcgaagcggcagccgccgaggacctgctgcccccacagtcggattacctcaacggcgtcaagcggaagtacgtcccgcagcagcaggcgtcgccgaatcaccgggtggtgcccgcatccacctcgcagcaattcttcagcggggcctccgattttgcgacaatttgcaagccggcgccctactctcacgacgaggaggccatgctggagcgggatagatgtgactacactcaaaggatcacctaccagatggcccgctccggacagacgacccgcagggtgagggtctacgccgatggcatctacgatcttttccaccagggccacgcccgccaactaatgcaggccaagaacatctttcccaacgtgtacttaattgtgggcgtgtgcaacgacgagctcacccaccgcatgaagggacgcaccgtgatgaacggcttcgagcgatacgagggagtgcgtcactgccgctatgtggacgagatcgtccagaatgcgccatggactctgtccgatgaattcatcgccgacaacaaaatcgactttgtggcccacgacgacattccgtatgtaaccgatggcatggacgacatctatgctcctctcaaggcgcgcggcatgtttgtggccacggagcgcactgagggtgtgtccacctcggacatcgtagcccggatcgtcaaggattacgatctgtatgtgcgtcgtaatctggccagaggctattcggccaaggaactcaatgtgtcgttcctgtccgagaagaagttccggctgcagaacaagatggacgagctgaagtcgcgcggcaagcgcgagctgagcaaggtgaaggtggacatcatcaccaagtgggaggagaagtcgcgcgaattcatcgacaccttcctgctgctgttcggacgtgagaacctgaatcatttgtggaacgagtcgaagggcaagctgctgcaggcactcagtccgccgggcagcccgtcgggatcagtgaacggtgatgacacggagggcggcgaggactacagcgaaactattgacgagtacttggagatggccgagaagttgagcgggggcagcggcagcggcagcagtggatcgctgaacggcaaacagaggccgaagcagaagcgctcctcgctggcccgccgcagttaccagagtctgcagagccaatcacccgacttggaagcggatggggacgaggatgcggatgcggatgcggagtacgagcgtcgaagcaattga

SEQ ID NO: 51 - protein, 526 aa, DROSOPHILA
MATSSILAKSTINSTSPPATPSSSASPGSTLTTRKRTYEIAIAMPSSTASSSATKVSEVQDQRTNSPGKSKSRPGQLESVLVVGEGASEPTTSATTLRDSTRTISQSDADDGGEAAAAEDLLPPQSDYLNGVKRKYVPQQQASPNHRVVPASTSQQFFSGASDFATICKPAPYSHDEEAMLERDRCDYTQRITYQMARSGQTTRRVRVYADGIYDLFHQGHARQLMQAKNIFPNVYLIVGVCNDELTHRMKGRTVMNGFERYEGVRHCRYVDEIVQNAPWTLSDEFIADNKIDFVAHDDIPYVTDGMDDIYAPLKARGMFVATERTEGVSTSDIVARIVKDYDLYVRRNLARGYSAKELNVSFLSEKKFRLQNKMDELKSRGKRELSKVKVDIITKWEEKSREFIDTFLLLFGRENLNHLWNESKGKLLQALSPPGSPSGSVNGDDTEGGEDYSETIDEYLEMAEKLSGGSGSGSSGSLNGKQRPKQKRSSLARRSYQSLQSQSPDLEADGDEDADADAEYERRSN

SEQ ID NO: 52 - DNA, 4794 bp, DROSOPHILA
tcgtgcagttcctgaagatattattggtaacaagttaggatagtaacgcattttggaaacaaaaataacccagaacttttagtatgacattttgtaacgaaggtatacctctcaaaagccaatcaattcgaaattaatattcgtcactaatcaattttatcaacaaattttatgacattgaaaatttgaaaaagtcctaaattaatttatatttggctttctttcaaccatttataccttatatagtgtatgcgaacaaaaaatgttgttttgttaatttgaattagttggttgttatcacgtggcacacattttagtttagtaacttacgattgatgcgttgcaagccacatgtttgagttctttgtggcacaaggagggatcgcagtagtccggtagttccgttgaggagctgtttcctggctcctcttgaccttgcgaacctccaggagatgggtgaccagcttcggtgaccgctggacttggtgtcgtagtggctgccgtttgaatggtcaaacaactggcaatcagaaaaacgacaagggccaacatttttcatccagagaccgtggcgtattaacgttagtttttcaaaacgtagatcaaacggttcggactgtgaaatcacaatttgcaaagatcaaatgatacagcaaaaccaatggtagaatttttagcagattaaacattatattgatagtttggttcgtctcataaaaagccggaacaaattattgggcaaagttttttaaagcttaattttggatttccaaaaaaaaaaaattgaaatcttaaaagttcacgttattctacttaataatattaacgttttgagattatcattcgtgccgaaaatttactaaagtaatttttctgcaaagaacccccctagttttttatgaatactagagctgggaattcatcgatattattcacaaaacgtacgctagcttatcatgaacatatattgcatactaatagtattgcttgttttctaaatattagctttaaagaagttttggaattgcttgtgattttaatcgattgttatccattattgatagcacagttaaaccaacaacagggagtgcttatttacttgttgctgtttgacaacagctgtttcttgttttgatttgaacatacaaacatatataaacatatatgtttatatagaatctatagatgttaattaaccggagcaaaacaagagtgaggtaaacttaaattctttatttgaactgatgggcaaggacagtcgaaccagttaaggattatataaaaagtggttatatatctagatggtaatcatcgtgtatttcgctggtatggtatggatattaagagacgcactcttgggagagcgaaagtaaataaaccggtcgctgatagcatttaagttgggctccactccactcccacccttctgcctacgtggactgctctttcgatggccagttgattggcaactgccgttttgcttgcacttgcctcctccgctggctgctaatcgtgagccattagtttatcgctccttatagctagaagtagattatgtacaaatatcaaaggttaattcagtgccacaggcacaccaaccggtggttggactttaaagtaacactcgaataccatttctccgttttgcagcccaacgtctgagcgaatcctcgagaaaaccgaagccgagatgaagttccgtggcaatggaaagcttttgtggaatttggtagtgctccatatggaatgcttgtgattctccgttcggtaatctgtatcccattcgatttccagaccaagaactccttggcccagcagtctccaaatgggatcgccaagaaagtgctgcccgctagcagctacagcaccgtccagaagaccattcccttggagcagccgaatctgctgaagtaccacgtcctgccgctggaggaaacgctgaaccgcttcatgaccactgtggaacctctcctgacgcctgaggagtttcaacggcaaaagggaatcacctccgagtttttaaaaaagcagggacgcgaactgcagctgctcctggaagaaaccggcagcaaggagaagaattggctggcccaccgctggctgaaggctgcctatttgacctatcgagatccagtcaccgtgttcgtgagtcctggcatgacctttcccaagcaaaacttcagggactcacgtgctttcgtggactataccgccagggttatctatggactgggagaattcaacgacatggtgcacgccaacaaaattccgatcgttaaaatgggcaagaacgagctggacaacagccagtttggcaaggtattcggcacatgtcggattcccagaaggggcaccgacgagatcgtgtacaatcccgactccgattatgtggtggtgatctacaagaatcacttctaccaactgaagatatacagtaaggagggaaagctcattgctgcaccatgtctagctgctcaactcgagaatatcgtcttgaaggaaacgcaagtgggagttccttatggtattctgaccaccgactccagggacaattgggcggaggcctacgaatatctggttgagactcctggcaaccgggatgccctcaagaccattcagggtgctctgttcaccgtctcactcgatgagggtactatcctaaaggaaggcgaagagaccgacgaacttatcctatcgctgatccatggcagtggcagcaagataaacagcggcaaccgttggatggacaagactattcagctggtggtaaaccccaatggaaacgtcggattcacttatgagcactcgccggctgagggccagcccattgcgatgatgatggactacgtggtgcaaaagatgtaagttgaatagggcgcatgtggttaaaaacaactttatatttataatttatattattttaggaaggaagaccctagcttcgggcaatctggctcacaggactttgctcctgcacagaaaatacagttctcttcgagcaataaaagtctagagaaatctttgaacgtcgcccaggaaaacgtggataaacttgccgatgctctccaaatgaaggttctgaaattcaacggctttggaaaggatttcataaagaaacagcgtctgggtccggacagctttgttcagatggcgctgcagctcgccttctacaagtaactagatgatcttcctacagattttcaatatagccgaatacatttacgttttgcagaatgcactcggaaccacctgcgcaatatgagtcggcgcacttgcgcatattcgacggcggacgaaccgaaactatacgctcttgctccaacgaatccctggccttttcccgcgctatgcaggacccaaacgttaccgatcaggaacgcgccgccaagcttcgtgaggcagtagtgtctcatcagacgtatgctaagctggctcttcagggaaagggtgtggatcgtcacctgcttggactgaagctgatggctctggagcacagcaagccaattcccgagttcttcaagtcgccgggctttgttaagtccagtcacttccgcatgtccacctcacaggtagccactaaatacgatgctttcatgggatacggcccggcgactgacgatggttatgcatgctgctataatcctcgggataatgacatcatattggccatatccgcttggcgccattgcccaataacggatcacttgaagttcgttaagaccctcgagcaatcctttttcgaaatgaagaatgttctcgagaagaacccgcctgagactaagtcgaagttgtaaaaatgtaccagaataataaaatttagcagggatcaaactttgaaggacttgatttaacagatgaaaggatttggactagaatggacaaacacttgctgcacttgaaaactaaatatgctttacattttagctatggaatcaatcgatctattaacgcttttttaagtggaaaacttgttagtcgaatattaataaatacaaaagacatgacaattaggaagttacaaatttaacagattttttctgtttctattatcgtcgacaaatattttggcatgcttaagaactaaaagtattgttctctgaaactagacaatagctttaattagtggtcatgttaatttattttttacagttcttattaagataaaaaacaaagcgtgaaaaattagtcttcactgtttgcactgtggctcgtcgctcctttagctcccgtcgctgctgccgcagtttagacttgaacaactcctctagtgcctggacacgatcgcacatctccaactccgcgatgatctgcggccagtcgtccactgcgaaaatgtccattagtgcatctagtccttcagacagggcccacaggtcatcttcctgggcacagtaagtcaataggaagagcactattgccttaaccaggggctctgagagcagagaacccagcgtacccagcatgcggttccagttaacgcgaatatttatatctgtgcacttgctagcgccctcgataatcatgttgagatcattctcggtcatctggccgaaaagatccttgcgagacttgagcaaactcagcgaggagcgcattagtgacgtaatggcctccataacggatacatcttcacttcccctaaatgcttgttgacccaagatcatccacatgttatagaggttgctgcagccccccaaatcttcagggggcagcacattgcataggttctggaggcaaatcaagtatgatactcttaatttttccactttctccttgatattctcttgctgggac

SEQ ID NO: 53 - DNA, 2174 bp, DROSOPHILA
attagctttaaagaagttttggaattgcttgtgattttaatcgattgttatccattattgatagcacagttaaaccaacaacagggagtgcttatttacttgttgctgtttgacaacagctgtttcttgttttgatttgaacatacaaacatatataaacatatatgtttatatagaatctatagatgttaattaaccggagcaaaacaagagtgagcccaacgtctgagcgaatcctcgagaaaaccgaagccgagatgaagttccgtggcaatggaaagcttttgtggaatttgaccaagaactccttggcccagcagtctccaaatgggatcgccaagaaagtgctgcccgctagcagctacagcaccgtccagaagaccattcccttggagcagccgaatctgctgaagtaccacgtcctgccgctggaggaaacgctgaaccgcttcatgaccactgtggaacctctcctgacgcctgaggagtttcaacggcaaaagggaatcacctccgagtttttaaaaaagcagggacgcgaactgcagctgctcctggaagaaaccggcagcaaggagaagaattggctggcccaccgctggctgaaggctgcctatttgacctatcgagatccagtcaccgtgttcgtgagtcctggcatgacctttcccaagcaaaacttcagggactcacgtgctttcgtggactataccgccagggttatctatggactgggagaattcaacgacatggtgcacgccaacaaaattccgatcgttaaaatgggcaagaacgagctggacaacagccagtttggcaaggtattcggcacatgtcggattcccagaaggggcaccgacgagatcgtgtacaatcccgactccgattatgtggtggtgatctacaagaatcacttctaccaactgaagatatacagtaaggagggaaagctcattgctgcaccatgtctagctgctcaactcgagaatatcgtcttgaaggaaacgcaagtgggagttccttatggtattctgaccaccgactccagggacaattgggcggaggcctacgaatatctggttgagactcctggcaaccgggatgccctcaagaccattcagggtgctctgttcaccgtctcactcgatgagggtactatcctaaaggaaggcgaagagaccgacgaacttatcctatcgctgatccatggcagtggcagcaagataaacagcggcaaccgttggatggacaagactattcagctggtggtaaaccccaatggaaacgtcggattcacttatgagcactcgccggctgagggccagcccattgcgatgatgatggactacgtggtgcaaaagatgaaggaagaccctagcttcgggcaatctggctcacaggactttgctcctgcacagaaaatacagttctcttcgagcaataaaagtctagagaaatctttgaacgtcgcccaggaaaacgtggataaacttgccgatgctctccaaatgaaggttctgaaattcaacggctttggaaaggatttcataaagaaacagcgtctgggtccggacagctttgttcagatggcgctgcagctcgccttctacaaaatgcactcggaaccacctgcgcaatatgagtcggcgcacttgcgcatattcgacggcggacgaaccgaaactatacgctcttgctccaacgaatccctggccttttcccgcgctatgcaggacccaaacgttaccgatcaggaacgcgccgccaagcttcgtgaggcagtagtgtctcatcagacgtatgctaagctggctcttcagggaaagggtgtggatcgtcacctgcttggactgaagctgatggctctggagcacagcaagccaattcccgagttcttcaagtcgccgggctttgttaagtccagtcacttccgcatgtccacctcacaggtagccactaaatacgatgctttcatgggatacggcccggcgactgacgatggttatgcatgctgctataatcctcgggataatgacatcatattggccatatccgcttggcgccattgcccaataacggatcacttgaagttcgttaagaccctcgagcaatcctttttcgaaatgaagaatgttctcgagaagaacccgcctgagactaagtcgaagttgtaa

SEQ ID NO: 54 - protein, 638 aa, DROSOPHILA
MKFRGNGKLLWNLTKNSLAQQSPNGIAKKVLPASSYSTVQKTIPLEQPNLLKYHVLPLEETLNRFMTTVEPLLTPEEFQRQKGITSEFLKKQGRELQLLLEETGSKEKNWLAHRWLKAAYLTYRDPVTVFVSPGMTFPKQNFRDSRAFVDYTARVIYGLGEFNDMVHANKIPIVKMGKNELDNSQFGKVFGTCRIPRRGTDEIVYNPDSDYVVVIYKNHFYQLKIYSKEGKLIAAPCLAAQLENIVLKETQVGVPYGILTTDSRDNWAEAYEYLVETPGNRDALKTIQGALFTVSLDEGTILKEGEETDELILSLIHGSGSKINSGNRWMDKTIQLVVNPNGNVGFTYEHSPAEGQPIAMMMDYVVQKMKEDPSFGQSGSQDFAPAQKIQFSSSNKSLEKSLNVAQENVDKLADALQMKVLKFNGFGKDFIKKQRLGPDSFVQMALQLAFYKMHSEPPAQYESAHLRIFDGGRTETIRSCSNESLAFSRAMQDPNVTDQERAAKLREAVVSHQTYAKLALQGKGVDRHLLGLKLMALEHSKPIPEFFKSPGFVKSSHFRMSTSQVATKYDAFMGYGPATDDGYACCYNPRDNDIILAISAWRHCPITDHLKFVKTLEQSFFEMKNVLEKNPPETKSKL

SEQ ID NO: 55 - DNA, 25461 bp, DROSOPHILA
cagagacagattttacttctccaaactcccaaaatgagtcccagagtcttgattttatcccaactagcccaaagtacggagttcgaatgtttatgatttggtcccccgaaatcgatctcacacggacagtgtcggtgagaacaataagactttagtcgcagttcgaaacatgattttcgaactaccgagtaacgatctctctcaataagaacttgttcgaaacacgcgagagcggtgcttttcgaactaccgctctttcgaactcacacacacacacaccgatgtgtcgtattcgtatccgtgagatacaatttgtgggaacgaatttctggtttggcggttgattcgaaacgttcttcgcgtccgcaaaggtagtttcagcacatgcctgagagcgagcgagatggcggagcggcgcaatgcccgttgtctctctcgcacacttttcgaataatgaacactgcacttggacgacgatatgtagctgtatagccatatagccttacttgctcgtactcgcagatacaattggacgggggaaatggagcagtatgagtgagccagagcgctggcgtatctgtgttttttattgatgctcagaaatttgaattatgcccgagcagtcaaagtgagacattggcgcttcgagcacgtatccgcggatacaccggaataacagaaaaaaaagcacaaataaaaaaactcaaacaatccaacactcagctgttccgcgtgtaaagaccctcgaatactgttcgattttagcgaaagatggatggactgcaaagtgcttgcatcgatgctggcgctgatggacagtcataaattcggcgtgaaattcgcgcagatacttagatactccgtcatagcgcatatacttatcgtgatctgtaacaaattgcgcgtgtgcttgtgtgtttgtgataccaaaagccgtccaaatccgtcgcttagccctttgcggccaattacccattagaaccatccaaaacataagcctgcaggtaggacgcaaaagtctagccagtttgccctcaggatgccatcggattaatttcccagatatccggctggttgtgacaattctaccttcgtaattgtgcacgttgatttccgcactcagcacaagtgaaaatcgtggttcagtgcagtgaaaatcagaaaacaaactcacttgaacggaggtgaacgccgtcggctaactaaaattgtgagtaaacgagtttaacggctgaaaatattttaagcgctttggaacaggtgaaaacagtcatggaaaggatatttattcgttgtcagtttttgttttgtattttctagtgtttttttttttgatgtgttaagaacttatgtagcaatatttggtctaaagcaatttaattatagttttttcttaacaatttgatgcgattttatttatcaaataatatttacaataaaaaagtgctttgttcgtatgtacatatttttttaagtaacaatatttctaccaccttaaattttatttttaatcttacaatctttatcttgtactttgactttcttattgaagaaataataccaacactagtaagttaaaaaaaaataagaaatttttaatttctttaataaatcaatttaatattctttgaagaaatcatcaaaggtgcgtaataatttcccctgtttgcttcttaagacactccatatcaaataatataatttgaaaaaatcaatgaaatatattttgatacctagtaaccgaacccagaaaatacattttatatatttccctatatcggggctttgtttctgtattctgtttaagcaatttttcataaggttgcgtgtgcggtatcaacgcaaggaattttcacttcattaaagcgaaatgcagccgcttttgaaataattaagaggcacaaaggcgaaatgtcacagcgaatgaaaaatgcctaacaagcgccgcatatagaaggttaatccagacacatagcgttatataccgagcccaagctgggatagggatgaagaaatgcccacgatataggcttggctactatccggggaactcgaactcatgctggccaagacgccatggggcgaacatgaaattatgtaaaataaaagaagacgcactgggctggaacttcatgggactttgccaatgaccgagtaaaggcgatgctcctgggcagtattctacatcccggcatggcatcccacatgtgctctagtcgtaagtggatgaaattccacttgatgtaggtcactttcattcgcccatctcgccaagggtgggccaagatcaaagagctggagagctggctgcatcgattgcataatatgggcacaacactgagacagttgcaggcccagtaacaattccactccgaattgcagtctatacggctaattggagggtaggggccagtccaaagttctacgagtgtcttcagcagcgctgtaatttatttggcctgcgcctggcggagacattcatcatggcctaaccccggctcttcctgacgcccccctcaaatatttcaacaatactcgttcatatttataaatcaaaatcgcaagcacgcaagctgaaaatttgtgctagagtcgttgatctattggccgcaaaaatggcaggccgttctaacaggaatagaaaagtctacaataaaagctagagtagcaaaacgaaaagatacaagaccgaaagacaaaataatacaaaagaggttggaacagcatatattgaatgccatttgtttagaattaaaagaaatttattgaaccatgaatgctgcgagcatatacaactaatacttgtcttaaaaacccgcccctctacctaaatttatcctaatagttgtccgacaaaactgctctccaaaaatatgactacaaattaagttggccaaggattacccataaacagtggcaagaccaggatacattacacaattgagatgtccttgaccagaaacaggactacttaaaatgataattccgactcgaccattgcgcaaaagatcataaattatcgcagtggagaggagaggagatgacaagctgaaccacaaatggccgcttgcagcgaggatcggaatcgatgattggttttcagttgggaaaacaattggagaactcataaaaattatgagagccatgacaaacaaacaaacaaaccacaaacagcaactgtgacgagggttgccacggcagaagaagatgcatgtttggggagtgagaaaaaagacacaaaaagatgaagaggaataatatttatgactatttttatgaggtgcttacaaatttttatgactttttaatgggtccgcacacagtgtctggccctctcgcttcctcgtgagccaccacatgggtagcgtgagcgggacaacaagtgttgccaatgagtgtgactgcgcgtgcgcaaataccttttatttatcatttttgttgttttttttttttttgagacttaaactcgtgcgtaccgcagattgtggttctagagcggcgtgtttacatgcacacaagctacgcccctgttgacaacaaatgctaaaaattatgatttatggccagggctcgtttgggtacaaaatccgtaatggtgacgacaaacagctcggtgacattcgtaggagaaataactgctttgggcgctttgttcgccccataattaagatggtggccttagggccggtgacgtagatgatgacgatgacggagtgttcagaaatgaatgacggttccacgtcggttggttaggagagtctttgggtcaaaacggattatgatactagatgaaactagatgagctgtgagtagaacttgtaagagtggttaagcttttggataatgtacaaactattgtttagttgcaatcaatactcaatacaatcggaaaatggaaattattagcagtaaacaatggttcacgatactttaaatgcttctcattttaaatgcttctaagatgccttaatttttatttttcatttctctgaaatgaaaatccttatttaataagatcaaaatatcaggcaaaattgttcatatgctaatcccaacgacatctattgattattcaaaagttaatcatcttaattgggcagatgctcagcggcttgctcacaaaaagttagaataaaagattcgaacataccgtcaatgtcttgaatgagggccgggatagaaaacccttttcagctgtcgcccggaaatatttccccaattgatttatggcatcggcggacgcatgtgcaactcaattgctgtttatttactctgactctggctgactcctaccctcctgtgtagcttagataggaccagatcctacctgtggcaatgtgaattgaaaacgctgaggacgggaaaaggaaattcgttctgcggtttaagtatcggggcaaaagagaaatttcactcccatttggaggcatattaaaagtgtttatataacaaaggaggaacaaaagaaaactctgttgcccgagtccaaaatgtcgcttagttcgatcccgaaagaattgccataatttatgggtttcttatgagctcgaccgacgatcgccaatctaagacaacgtctgtccctccctctctttctcttctcctctcctcttctcttctctgtctctttcgttgcccgcaaaattcgcctgtgtttttttattattcatggatttaattaacaccaattgaaccgcttgtcggttcagcgccgttttaaactatttggaaaacaattttcgaactcgtttaatttatggcttctgcttgtcttcccctctcacagtttttggaatttttaatatgctcaaaattgaacagtaaatcgaagatggcttaaaaatgcatcttgagaaagaaagccaataaatttgactatagctatagcaaaataatttcagtatatcactttaccttggtatgaaatgaataggtaatactctagcacgttaccctggtaaatttatctacataatgaatgttttgatgaaaactttgaaaattaatgtaagatggaaaacttttgctgctctcagtacgtttgccatccaatcaattgccaccaaatcgattcgaccccaggttgttcaaatatctgcctgtcaaaggttcaaagtcagccaagacgctgatcctataatttcgctgatttcggccttgttcggcttaaacacgggcgcttgtctacaactataattctcatattgccaggtcgaaatggttttctccaaagcaccgttaccggggccttaaagcctataatcggtggagatcgagcaaagccatgaggagggggcagagacctgggggcaagtttacaatatttccttaatttttattttttgttgtgttttccccgagaaccctgctcatcaaataaatctctgtccaaagttgagcattcgctccttggccagtttcgaatggcgtacggcgttttaatttaagcccaagttgagagctcctttcatttggccaacatgctaaagggttaaattgcccactgaatcaaaattattggtttcaagcctctaaaaagggcagggaagtggggggcttgcatttgctgcattgtttttagccaatgttcttcgttctctgctgttgttgcttatttcgataccctttaaggtaggtattatctactcacatatacagataagatatcttacaacagttttccgactctcgatacaattttctcagccatgcccagccaagttcatcttcaagttctacatatatggggtaaacataatatttagaacagatcgaaagggtattttgtaatatattgaagcgtattttaaattcggcattttgccatcttcgtttttagttttgggcatgttcatgtgcagcggcctcgcttggcctcttttgccttattgcctttttgcactttttcggctctggggcgattcgagagctcctttccttcagctcctttggaagcggagggtcaatgcttttgtttgctatctgcgcagcggagaatacgagttttccgccattgaacaaacatgcccaagaccaaaccaagactgcaatatctgcgatggttgcaccgagaggagtgggtctggccagcaagtgcagccgcaagaagtttccgccaagtgtgtccagaagagtgggcggtccctcggcattcctcggccaaaagctccagtacgtatatatatagtatccacttcggcgggtaaaattgcacgcttaggcggccccagctctctccaccagcggaaaataagctcaaaaaaaaaaaagaaacgactctttaccgttctcaaagaaataataataataaccaagtaaaaggcaagtgaaattatcagcggttaagaaaacactttgagggagtaacaaatcaagaggcctgagtgggaaagaggcttttgggctaagtttctataaaatactgaaaacagctcacttagcttgcctgttcaacaggtattcctattctgttgctcatagtcttaaaaaaaaatgtcatcatattttataagattctcttaaaattatcataggcttaaaaatggatcatgcaaataaatatacatgagaatttatgacctcgggcctcgtatagcgatccctttcaaataagttggagcctggaactggcttccacttgaggaggtatctttacttaaatggaagtacttaatcccccgcagcttttccaatacaatgttgccaatcgcaaagtgagatctcaacgcaaaagtgaacagcaagaaaaatatatttgtattttctgagtcttcttatcaacttctgatcattttattcaatttgatttttgaatttatggcaaaggtatataagcctttaaaaagtttacaattgcattatattttgttttcaataagttcccatttaataccccatcctctcatttccagactccaatccacgacaacgacccctggctttaaaatggatcccgactgttttgcgatgtcctcgtaccagttcgtcaactcgctggcctcctgttatccgcagcagatgaatccgcagcagaatcacccgggagcgggaaattcgagtgcaggcggcagcggtggaggggcgggcggtagcgggggcgtggtgcccagcggcggaacgaacggcggtcagggcagtgcgggggcggccactccgggggcgaacgactacttcccagccgcggcggcctatacgcctaacctgtatccaaacacaccgcaggcccactacgccaatcaggcggcctacggcggacagggaaatccggatatggtggactacacgcagctacagccgcagcgactgctcctgcagcagcagcagcaacagcaacagcagcaacatgcccatgcagcggcagcagttgctgcccagcagcagcagcaactcgcccagcagcaacacccgcaacagcagcaacagcagcagcaggcgaacatcagttgcaagtacgccaacgatccagtgacgccgggcggaagtgggggcgggggtgtttccggtagcaacaacaataacaatagcgccaacagcaacaacaacaacagccagtcgctagccagtccacaggatctgtccaccagggacatatcgcccaaactgtcgcccagctcagtggtagagagtgtggcccgatcgctgaacaagggcgtcctgggcggaagcttggcggccgccgctgccgccgccggcttgaacaacaaccacagcggatcgggagtgtccggaggacctggaaacgtcaatgttcccatgcacagtccggggggcggggattcggactccgagagcgatagcggcaatgaggcgggcagtagccagaacagcggcaatggaaagaagaacccgccgcagatatatccgtggatgaagcgagtacatctcgggacgagtgagtactaattaaattacgataataaatggcaaaacaattccttatcaaaaaatcttagaatatgttcttagatgagatccgtaattcttaagtaaatcgttttttttttttatgtactgtatcactttactgacgactcacggcaacttaagatcgaataagctagaaatgagctctttaaatcaacatccatgcaccttaatcggtgcgtcattgagtgctcattaccacttctgcgagacacttgcctcactcaactgcaactgccaaccaccaatcttcattgggcagcaaaacttgccttgtgcttagcaccaaattgtctggcaaactgtgcccgcggtgaatcttgtcaaaatacataaacaataacaacatttccctcgcacttacgctctccggattttctccagatcgaaggagggtggtggaacgaaggaacgctgcgtgaaaactcgaccgcgaaaatcgtagctcgtgaaaattgtaaacaaacgtgaagcggtccgattcagcagctaaggcctgccgactcccacaataactcataataccgccgcagatacagatacagatgccgatacagatacgattatatatataggtatctgggcagacagatactgcggcttgatataaatctcagcacctcgctcggtttatatttaaatttatatttaaacagaacaaatttccacccgaaacttgttgggctggaaaattgtgaacgaaaaattgttcggtgatttttcatcatgtctctggcgcgcacaaagatttttctttctgccacccccacctccgttggattcccccatatttccaccttttttgacccatcgacaggcaactcacgaagttgttttggggatccaaagtataatcaaattattgagaaaattctttaaattcggcggtggttgggagagattaattggattgcaaatagtttgacatttccatggatctgcctggctgcaatcttacctgcagctcgtttattattttagttaaaaaataattaaatatttctgttcagttacaaatcattacattcaggttgtgggaaatattttggcgagtctcagcgggtgtcccataaatcacatagagcactcattagctcatcgaagtacaacgaacgacacgtgaatttattcaatgaaggaattaaatataggggatttctcccgatgaaacggttaattgctggccagtattttgcatttccatatatgcttatatgcttattcaaccagctcttgacaacccgaaatcacaacatgtcagccaattaaagagtcgctgaagtgctgccacatgtactgcatatttatagatagtcgcaacgccaacaagtcaacagatacagattcatattgactaacaacttggctgattttccattccgattcgccgggaaaactcgttctccattcggctccaatcaatggggcacattgttattatttatgtatgtatctgttactcatggcagccgggcaatagcaacaagaacggcgcgcatttgttatgcaaattgcagcaagtggaagcgtggaaggaattgattgcagcggggtgaagtaatgaagagcatgaacttcaagagaaatgaatgaagtcggctcagttgcagatacatttgcagatcatatgtatggaagacgcactcagagatctgaacgcaggaaatcgtgtatttctgccgggggagagctcgtgtatctgggcatctccgtctggctctgccattttccatgagttttcatgcatcgccgagatttaattactttcttaatcatattcggttgagggcaatgtgaaaggcagccatctatacaactatgtgcagttatatcttttaatatataattatatctccgggaaacagaaacaactgtaattgatctttgagtctattatgttaaagatacattgaagccgtgcaattaagtgtaaatatatcgtcggacttaatttcaattctaggtgtttctctatggaatatagaaccatgtgcagttatagcttttggtaaccctgcacttaattgccctattatttaggaacacaaaagtcaacagcctgctggacaattaggctagcctcttttatcgtcccagagcacaacttaattttcgacggaaaatgtctttattagaatttattgcagggtgtgttggcatgtgcaggatgttctataattgcagccgaactaaaaatccctattaaaaaacgttgttgcaggtgccaagcagcgcaaatgccaataataaagggcaatcttgagggtagcatctaaaaaacaggcgctgattaaagtccagtgaatataacagcagcagcagcagcaaaggcaacaccaacatcatgttaacaattatgcaaatttcgagtgcatgttgcccgtatggtcaggagaggaggggaggaggacaggaggggccgtgggccagggggagtggcaggggccgggctgattgcatataatcacgtcaagttgttactgtggcaaccattttataatgcaaagaaaaaacgccagttcagacgccatcttcagagcgaggagatcgaggcgaggctacctgaattctgcgaaacacttttcgcaactatactttttaagagctcctggcataaagtatctgccaataagcacatgaagctgcatgtttggttaatatcgcatgcagccttgtgaagtcgtttggcattcatttgggaaattcattccctaattgacaagaccaaagctggcagacctccaagcagatcatcaaaagatgtcagccagcggatacctgccacacagattacagatacagattcaacgatactcatgctgcctgccgaaatgtcaaaagcctttttaaccgccgctcccttctttcatatgcatattgacaatttgttgatatttctccccaattagtgggctgctttatatttatacaatctgccaggctatacatttaaattattccccccaaagtggccccagcagagccttaagttagcggctaattgcacataaaaatatattcaagcttgcatgtcagttttgcttttaaaattttcataaattgcacataattcgtgtaattaccgaatatcgtgtcaataatggtaaccaaacagtagaatgaaaacagaagctgtaccaaaaatggagcgtccagaaaaataaatctaatgtgctggaaaacgcaaccagctaaaagtctattttataaatctaaattgcaaatatctgtagttctatttcgcttgccgatcgtgccattcaacccgaaggctttggccactcgttgccgcagatgccaggatgctgcacaaaattaatagtttgcaaacgagttgaatgccagatacaagatacacgacggtcgctgccaggcaggagaatgcattagcctcttagactgcaaatacactgatccaaaaaaccaatttgaagcgtaatcctccagattcaagactggattcgtttcaggaaatgaagcagcgacattagaaatatcttgcttctaaggctcgaaacaagtgatattttcttaaatcaatatagtttgttcagaatttaaaacgatattaagagaactgaatgtgtttggtatatttttcgatgcctttacattattatgcattatttttacagcttataacagagcaccatgattttcgaaattaattgaaagcaattgaattaaagctaattcgcatatcaaagatctgcataacataaagtgattgttttaaaaagttcttgaatggggactgcgtttttctctgtatgggaactggggttgagttcccgatctcggaaatggtccggtgtctggtctggggtgtcgctgtctgctggtggacctgctgttgcagatccagctctccatccggagatggagaagttgaagatgcagagccaggaacgaaaacgcgcacggcactcgctgctcaattacattttcattaacttgggacacgacttttcaaatagctgcgtttaatcataatgattgttattacttttatttcggtgctctgcgctctgcgttctaaggtccacgaaaatgaaaatgatttttataatgcccaccgcgcgaggtgaatgcaaaatgccagacatcggcgcaaggtgctgaaagtgcagtagaacataaatttatttcgccgctcctccggctcccagatgacgatgatggctcatgcccaagccaaagcccattattagccaactctgcggtattctgggccgctattaggagcctgaaaacagaagtgcctgtcgaattgtttcgcaccaagcgtcacattttggcacacgaaatacagagtatacagtattttgctggcgattgttcttaatgaattcggttccccattcatttttcggggggatgctgctgagcgaactcatcactctgcttgaattgaaattcattcggctttaagttggtcagatacgggcactgacagagaagaaagccctacaacacagggctacataaaaattgtaataatattgattaaaattacctcgacggaagagatacatcatttctgtagagaaaatgttatatttgaatataaaaaatttcatttaagcaacgctagaagatataaatttaattgtagtggttaacagaatgtcaaccaaatgaagtttttcaaaatattcaaattatgataatggaataaacaattcgaattttgtatatatatttatgtaaaaataaatatgtagtacagtgtgattaaaatgagctgctcattagcgactagatttagctagatatccccacatcatttaatttgtttgtaggtcaactctagtgcagttctatatatacttacctagttcgtacccgaaggcattgtctgccttaaaaatatcactcatcggatggctcaaatcagtctgtgaagaaaacgcttttaaagcgtcttcaactcgacacacacaaaaaaagatgaatgatgggccgaagagcttgttgtttatgaaacttagttgtccattgatgccttcaagtggcagtcagccacattttggccaaagttaataaaagcgcatagaaaggggagaggagagagtctagaattcgagggagacagtaacaatgggggccactcgccgcaacaaagacggcaatatttaaggagccaacaatggcgccactaatgactgatgatgtgccagcgctgatagatacagatacatctgtggatgcagctcaggaacatacaaacacatatagatacggcttttacagaactattttactttgataagacattctaatggacttgcacagcatccgaaaactgtttactcttacttcattgtttagagagccactggatcggtcagtgcatatatccatatctgccagatactcgattgccgactggggaaggggaatcttaaattgcgaatcaagcaaagtaattgcgatttgaatggtgaaaaagtgcgagccataaattcaacggagtgtcacggcagcgctgcaatgcgaatttatcaaattcagtcgtaaattggcgcacatctgcagatggccacggattcccgtatccacttctcacccagttaccgttttcccctttttcttggccatcttcgccgagatacgcatagaatattaatctctttgcgcattaacttaaatgaaatgacgcaatggcgataagcgaaccggacacagtgggtcgcaggggaatattgggtgctcaaatctgggaaataccaggaaagcagctggagagttcatttcctatctcacttatcctaaaatttccgaaattaggaaacggtatttatcttaattttcaaatttgttaataatattgtttgcaatataagacaattgatcaatttaaatttgttcatttgcgcagacaaacgaagtttagataacacaagtaaataacaagtttagaatagactccttcaaaaaattgtatattccataaaacttgtcagaacgttgtacacactttcttatttattttttaaaatgctttaagttaaccacatcgcaacttagctgcccactgtcccaaagcttaacctggaactggtacagtgggacctggtctcgagcgcagacctttgctgggcagcaaacaaaaccaaagctaaacgaaaaccatcgcaaatcgcatacaatccgagatgaaattgtgaattattaatgcaggcggcaaaactatttggctgagtagacaaacccacaagtgagccgggtttttggatcccctcgccggattttgccgactgcggcctgaggagcgtgtgctgccacctcctccattgaaaattgagttacacgcgtggtacgggtgtgtgcgaatgtatctggcagatacatatgtatctgctgtctgcggctacgtgccccacgaactggcttacatttcgcagattaaaaccgggctgcccgttgtgtgccacctgaagccaattcgatttaaatgtctggcacttccacttggcttttcctggccatatttcgtaccaggcattgaattggggctttcttcctgtgcatggcatactaaaatcaccggggttcaagggtcagctacacggctttaccacgcctgtgtgtgtgtgtgttgtctccctttcgcagtgacagctcgaatgcaatggcaacaattgcaatttgttggcaacgttctgccctgaggcccaggaccacttcactctggctggctttactttcaatacgctcaaggaagcaccgaaaaaaaaagaaatatagtttttctaaattaaattattaagttataagtatgtttacatgagcaaatcaaattcatttagatcaaaaagaaaatgaaaaatgaacacaatcacgtgctttttaaggcgatgctgcattgcttaacagaaatctttgaaatatatatcttattattaagttcaaattccaaatacattttcttttcgattctaaagaccattttacgaatatacttttgatggaatacttaattgatattatttgaaaacgtaatcgatatggcttaaaatgaaacaaatatataacgttttctgatagagcctgaacaatgtgaaccgaatcgtgagatatttcttcttgtgcagtaagagatacaaatacattttctgcacttcgcgcttcattaaaaggcgggcggcgactcccagctcccaggcgctttggagctccttctcaagctccattttcagttgcccactgacgacagcaaatttgcactttgctcgaacgggcaaaaaagaagggtgaaccgtcgggggaaggagtcgaaattaaaagatttttaaagacacctttgtagcaagttttgaaaacttgttccgcgcccagacttcaccatcttcatcttcatcaccgaagcctcggtttcagccttcgcttcgcctccgtcgctgactcgtttcctctggttttaattttgtttctttttcacttctgtatgcttttttcgtgttcacatcttctctgacatgtttgttgggcagccatgttgaatacttttgttttctaaaaacgaagcttgcaaatacatcactttttccgtcaagttaggtttcaagataatttggcagagcctgctgtgtatcttgtatttccatttaactaactaagcggtaatatttagacgtgggctgagaatttatttatacaagaaccggtagaaatagtcagtataaaaataaatgaatttaatgaatgtcagaaatcaagagacgcttgacgaaaaaataccacacaatctacagatctattagaagaaattcgaacataactttccgtttgattaatggttctaagtagatcggctaatgccttgtgtactatacttaatcttagccaattgacctaggccacatttaatgcctcaatttcaaatctgtttgcttaggattgctgttatgcaacccagagccaatcagataactggatttaaatgcatcatcaagaccgcattaactaacaaattaagtagcggagaatccggggggcaatacctcaaactcaaatgcaaattgtttgccatccgtctgacgaatcgcaaatgaattgccctgcctctgggtctcaagaaatatggaaaataattgaacctaacgccattgacagtagcttttagcccgctcccgccgcactttgcattaataaagaattcatcacaattacaacaattgccacaggatgcaatttacaaaggaaattattaatggaaagtcaatgagtgcgacgcgagtaaatcaaaatcgcagagcaaaaaattcttcaacgtgcccgtgattgattacagatctgcggtcggatgtctgggggcctggacctggtccagaaccagaaccagaatcagacctaaaagcaggacctgtggtcatcagcgccagtcaaagaccccgagcagttaatcatgggactgcgggaaaatgaaaatgagcgagaactccagaagccagacgacgacaatgccgcattttgtagcgcgttcattcaactgcagacgacaggacactcattaaaaatgggtgcaccgctaccgagcgcagggtatctcgatccagaggggtatatcggttgacgcggtcttttcacggggggagagcactcgaaaacacagaacaggttttccgcgcagctcggctaatttatgtgcgcatgcgcgacgctcgctccctactcgggagccccataattaactgaggtagtcattttggattcgaacacgaacacactccccatctcggatgtgtatggtgtgtgtatggtggtcagcatctccttctggcgggagagaactctttaaatcagagataaacgataattatctgagcgaaaatgcgcgcataaataatttgcaagaagtcacattaaaattgtatctaaaagatacgccaggcctgataaccacgctgcttggttcctcggcgagttttatgtggctctcggtccatttgccagctcggaccctgggagcctgcgccgcgccattaaaaattaaaagctcattaattatgcagataattcatttattatattttcaacacaatacaagctacaagcggcataatttgttacccagctcattatgccagcgcaggattgaggaatggtgttcggggctggcaactgtctcgaattgaaaacaattatggaaagctctccaagggttgattgtctattgccggggatatacatacataacagctcagggggcggggactggtgaagggggttggttggggcgtcacgtgtctcccgggggcgtttgcttggcttaatccccgaaaagcacttaagtcctgagtgtccaatcaacaggttgatttcgatggttagcttaattggcttttgattcgctggaaggaggaacttcgagtccataacagaaagggattaattatgaagttaaagtttgactgtgctacgccgctacatcttaaactttaaattttaaacaaatattgaactagggatctagtactttcaagcaactacttgaaattcaaataattacttgaataaaataaagcaaaataaaaaatttaaacatcctttaaatttgtgaagcaatgcatcgtttggcatgacaatagcttattgcttatttaattttctctcgtataaaaggcaatttcatttttttcttcccgttttatattgcatagaaagattgtcctaatacaaatttaaatttaagccctgctcatctacgccttatattcaattttttttttttttttttttttggctatgaaatgttgaagaagtctatgccaccggaaaccatatgcttcactatctgggcaaacttatcccctttccctcggtataccttcaaggttcggatcgttcaatttgccaacgaaccgcatcagctgttggccaaaaagtcgagaactagagcttgtggcacatgatgtcatttcagttgaatggctttgagtaagtggagaaaacggcgaaaaggagctggaaatgaaatgctgggcattgtggcggctgtcgggctgacgaaactgaatgtgttcgtgttgacaacaaacacggaatataaattgaaaaatgctttaaagcgaaataatcaatttacttcttgacataatttccatttttcacgaaaccaagccaaaagcagccacgcgaatgcccagaaagaattggtgggggggggggggggttgggtggtaagtgggagggcgcagagcaaggccacgcacaattcgcaccacaaaacaagaaacaataaaccaaaaaacaatacaaaaacttccccccagggtcaccagaaattggctgcatcccatttcttggagtgtttttaatattcttgccatttctctgaccgccatcctgcgactgcatcgcttcctttatttgaattgtgattaatgatcaagctgggctggtgttctactgtatctgctccttttttgcttggaaattcccacactatccatccctcattgccagccaggttgtgacaaatatatccagacagaggcagacagtagttgtgactacgatttaatagcgctttaatggtctgtggacatcgatggaccccgaaacacctgttgtccagcacgtgctgaatgccacaatgtgggtggagttagtggtggaggggggtaacactttcattatcacaaatgtcacatcatttgtcgcctgcccccaaaaataacacacacaaaatgactcaagcctgcgggcagcatcatttatcacctaaggaatgcaacgcgcagcgcaagatacagcctgccgaatagagggccagatacatgctcagatagcccggcgaccgcatacttgattaattttctttttccgaaagaaattaacccaagcacagcacatgtcccttcgcgaccccgcggcggcccctttgactcctccatataccttctatatccctccgatcgggtcggtcgcagggtccaagatttatctcttccagcagacctcaagcgtgtcacctctggctctgcgtctgatttatttctggaactgctcgagttcgaaacatatttttgaggcaatttccactttcagggagccgcaaaatagctcggaattctttgtcaattcaagcgatcttggccgagatcacttgttgtctttaattagttcaatttgtgacagaattcttctctgactcgctcgcttcttatgagtaatgacccgcggctggaattgtgacattgataatggttttcggttaaacgattcattagccaggggttccggagtagccaacgatgatcggaagtgcgttgatttatgaacctgtcatttggacaccaacctgactcaaccgatctgcacatggagtgaactcttgtgttttttattaaaactttttagtatatatttcttatcaagaaattcgtactgtcagtcaattcattaatagggggactcgcgataatactgccatgcttaaagtttacaattcgctgtaaaaagtacaacaagttcaaagttgtttttgcatgataagatcaaaactgaggccgccagatgatcatgatcccgccgctctcctcacttccaaatacttccattccatcggatcccaggtgctgggatcttggagtgccgcacacgttgctgactacgatgacgatgttgaagcgaagtgtttttttttttcgcctgaccagacgccggagcgttgacaaatgaccagtacaagtgtttgtgacaagccgcaagtatgtttttgtcgtattttttttcatttctatttgcgcctagcagaatggctagcagaaaacaattaaacttcggctcgaaaggccctggtgtctgacctacgccaaaggttttcagcttaactttgaacctggcagagatcgagccgtatgctaatcccgtgtcaatcacagaactataggggagtatgcaaagagacactggcgaaacatcgaagggaacacgaacatcccggccagacaatggcaatttgaattgcagaatcgatcccgatgacattgcgatcgacggagctccgagccgatcgtcacttaataaattctgaaacagattttgcatgcaggccgaaatggcatgcaccaaaaatttcaaatttccaactgatatgttaagcggctgtcagcagaagctctcttagccaagtacacttgatgtcatcttatgcgaaatgcaaatgaagtgaccaacaacgcagggatcttccagtcaatacgaagtgttaatgctctctaaaacaacgtgtaaaaattcatttacaatggtgaaaattctttaaactaagaatgaaaattcgttcataaaattgatccatagataccatttaacttatttttcatagttttaatttataaaccttacatataacgtccctacctagaaatagggtaatagtacaaaggcaacgccacaaatttacacacaagctgactcttcattcttggggcgatatgtttgggaaatatgtgcacatatatgtttgtacatgcaaaatccaatatgtctatatagtatttcacaaatgcccagacacagacacagatacagcgcgagtctgaggcgctggcatcccgatccgaatccataccatcccatcccatcccataccattgaggtggcagggaaatgggaacaaacttgtaaaacgcttcgaatgttcgctcattggcgctgtcaagagatctggcccccttagatgctccccctgcaagtgatataagcaccagtgatatgacatgccaggtgccgttggatccgaatgcgatggggctgcttttggatgatgctctgccctgtcaactcgttgggggctttcgccttagatattgcgcctggccatgacgacagcgatgcgctacttactcgcatgtagttaaccaaaaaataaagaaaaacatacatacacgtacgtagtcagaagaccacgagagaagggccaatagagatcgcagtgttgacattctgctgggactcaacgggttgcggatgtgtgctgatctttagtcggaaatcaaaaaaatctgagtggaaattagtggctgatgatgcctgtgatggtgaacttctatggaaggaggattaattgagataatggggttaatttagatataatgagcggagatgcaaattttctgaggaaacgattacggattatagttttctagaattatgtttatgattttattttatatctataaagctaggatactaaaagtatattatacatcttgtaacaggaaagtagtccattttttaggtaatttcataaaactttaggcgagcaaaagtcttgcagatagcagcacgcattcgaaagatacatttagccatgctgatactttcccctccattcagcctttgagtggtgtaaacaaattgctacatatgacagaagcatttgacaattgtaaatggttggcggcagtgcaagtgttcagcttgtcttttgttgtctccctgcctggcagaccaaagaaaaaagatgaaaaaagaaaggatgttggcggcgacccttgtggagaactatggccaccggatgtattgatttggcaggacgcgtgggcaaggtcaggattcttgcttatcaaatagtaaagggcactcaaaaacgtctgcacatcatgcatcagtcggaagtctgccaagtttcggaagaagtttgcaccagaatacagaagaccaagtcccctaatggtaaagtagaaatattacttgcggtatcaattttgatggcctgactgacagttgcagcatatcgaaatgggtcaagactagtgcaattcaatttgtggccacggccacagcagttgtccaagtagaaagagtccctctctgttgccggctgatccggatgactgatggagacgatgccggttgtctggttactgtctgctcgctgtttacttggtcattagtttaagcccgttcagaatggcagccagccggggaagtgcaggagctttgatgtcggcgctatccctgcgctttggccacactcaacacactgaaactcgctttaattaaatgagcggtaattaatttcaactttaatcagaaattccatttagattttggccgctgattgatgtggcccgacatcttccgccaacgtcacatcgaagaccactaaactgtgacagcggcaacaacgggggaaaacttttggaagtgtgtgggcggttttcttttttgcgtgtgtgtgtttttgttttgtttttgttaaagaagcaacagttgcaatatgtatctttaagtaggcaacatgaataataaactaacgtacaacatcagttttataggagacaaagctctacgaaatagaattgcagaataggtcttttgaatatcagttgcacaaatatacataactattacatagagtcaattgaagggaaaaccattgacttaaactcttattaagaataaacaacctgttctaagcagtaagcctaactgcctttcatttagcatgtattccatgacccatataaactatgaaccaagcgagacaacaatacccaaaaatcaaagagagacgcactagcagcaagtcagcggttgccgtctatcacattgactgactgccacacattttgcagatataaatactagaaatacagatacagtgtctatagccgaactgcctctgtctcagctcaactctttattggaaatccaaaacaaagcgggcgggccaattgagttggccgtaataacacgccacggtaaatggcttttaaaagtctactttgccacagcacgccccctcattacgaacgacgcgcttcgaacgccctcctgcggttcgcctcgaataaaagaggaaaacccgatacagatgacagaatagttttcgggggcgacttgcaaagaacggtaaattgtcattatctaccgacgattgcagatacaagttttcagcaagcgacaaacatctgtccggggtgagataccttcgctgaactcctcgggccaaacacaattccaggcatgaactttttcgggtgccaccaaatggcagtttggcacgtcatatttatgaaaatgaaatgcgcaacgttgcagaaaatcacaatataaatgagaaaattaactgcctcgaagcggtgagaaacataggggaatttggggatatgatggtggtgtccacttgaacgtttgacgattgcctagatacgccttaaaatagtttgctgcagaaacaaatggcttacataaaagagtaaggaacgagtgtttaaacaaaaattgttttacttaatatattcaatttaattgattttcgtttattatgtattgatattgtacacgtttgaacttcccgtctagtctataggtattccaagcactgttaaaaagaaaactcctttagagcgccaaatacttgatcgacgcgttaactacgttattcagaaacttcatttctaattgtttcctttaaattattaatattaaataagcacctctattcctgtattgcaacagcaactgacaaaactattccggtttttcctccaggtactgtgaatgccaatggcgagacgaaacgacaacggacctcatacacccgctaccagacgctggagctggagaaggagttccacttcaaccgctacctgacccgccgccgcagaatcgagatcgcgcatgccctgtgtctcacggagcggcagatcaagatctggttccagaaccggcgcatgaagtggaagaaggagcacaagatggcctcgatgaacatcgtaccctaccacatgggtccatatggccacccgtaccaccagttcgatatccatccgtcgcagttcgcgcacctaagcgcataggacgcgtggcacttttcgggtactggttagagactcaatcagttgtatcaggaaccatatcagacggcggcggcggcatcggcggccagtggttatcagtcgcaggacggcggtccaattggtggcggctcggtgggagtgggtggtggtgcgggggggccgggctcgctggccaacggtggcagcaatggcagcggtcccaactctctcttcgcctccgccgcctccagctcccaggctcccgactgcatcaagtatccgcaggagttctgatctcaggttatcatcaggcagcagcatcagcagcagcaggataactccatggatcggaatcaggagcgggacctaaaactgcttttggaaacggactgtgagcccgatccagagctgcaactggagttcaaggcggacattgtcgaatgcaacttgttctgctgctgagctatgtccgcctgccacgcccctgccgcctcatgcctgccgcctaccgcccatcgcctaccgcctgtcgccgcccgtcgatcaaccaacatccatagatgtttcttgtttgcaactgattcgtgttaagctaagaaacgagccatatccgcatggttcgtttgggtttatgatactggagatggaaccacgagcaatcgacgtcactctttaagatattaatcatcaacctttaactagaatttgtgatacgctgagtctaacatatcatgatcatattattcacgtcgatttgaatcaatgacattagtatgtgatgttagtttgctgttgaatgatatgtatatgattgatattacttgataatgtcaaagttaggtgttatccctcactcactttctaaacctttctatgcgaatgctcgagggtccttccagtatgatgaatctctttctctaagcagtattcgaaaagccgttagtttgtaagcctagcataattttagcacgtaagctgcacgatgagcagacaaagctgtcgagttgaacaaatctaatatctgcaataatttcaaagtgatttctaattaacattaggtcttcgtttgtatcgcccaatctccaaccttgatcccaaccaaacccccaaccagcaccctccagggagtcctaaagagtgtacttaattcctagctagtagagaatataactctagttacccacataaggctttgtttagtttgtaaatagcagagcgccccagatcggggatcgcctttttatgtttgtgtttcgtcttgaagagaaaatttgaaagtatctgcaactgtttaattcaatttattttgagtgtttgcgtttatgttgttgaaattgctctagcagcttggaaaatgctttactaattttatcaaaaatcaatcgttttttattgccactgaagaacaaattcggaagataaacaggaagtaaaataattcaaaaatagcatagaccttgctatagttaatcagagttttctttagaacatcagccgatccttcctctttatttattcaaaggcctctcaacaatgtctgtaaatttaattcggtagttaatcgatacagtgtaagccaacgaaatttgattaaagtgtgaatcgttaaagcctaaagctaaaggaaacccataaccgtaatgtaaagtaattatttatgctgtacttttcgctaagctaaggttagtgcattctagaactatcggtagtatatgtcaacctagatcgtaagcctaaa

SEQ ID NO: 56 - DNA, 2215 bp, DROSOPHILA
gcaggtaggacgcaaaagtctagccagtttgccctcaggatgccatcggattaatttcccagatatccggctggttgtgacaattctaccttcgtaattgtgcacgttgatttccgcactcagcacaagtgaaaatcgtggttcagtgcagtgaaaatcagaaaacaaactcacttgaacggaggtgaacgccgtcggctaactaaaattactccaatccacgacaacgacccctggctttaaaatggatcccgactgttttgcgatgtcctcgtaccagttcgtcaactcgctggcctcctgttatccgcagcagatgaatccgcagcagaatcacccgggagcgggaaattcgagtgcaggcggcagcggtggaggggcgggcggtagcgggggcgtggtgcccagcggcggaacgaacggcggtcagggcagtgcgggggcggccactccgggggcgaacgactacttcccagccgcggcggcctatacgcctaacctgtatccaaacacaccgcaggcccactacgccaatcaggcggcctacggcggacagggaaatccggatatggtggactacacgcagctacagccgcagcgactgctcctgcagcagcagcagcaacagcaacagcagcaacatgcccatgcagcggcagcagttgctgcccagcagcagcagcaactcgcccagcagcaacacccgcaacagcagcaacagcagcagcaggcgaacatcagttgcaagtacgccaacgatccagtgacgccgggcggaagtgggggcgggggtgtttccggtagcaacaacaataacaatagcgccaacagcaacaacaacaacagccagtcgctagccagtccacaggatctgtccaccagggacatatcgcccaaactgtcgcccagctcagtggtagagagtgtggcccgatcgctgaacaagggcgtcctgggcggaagcttggcggccgccgctgccgccgccggcttgaacaacaaccacagcggatcgggagtgtccggaggacctggaaacgtcaatgttcccatgcacagtccggggggcggggattcggactccgagagcgatagcggcaatgaggcgggcagtagccagaacagcggcaatggaaagaagaacccgccgcagatatatccgtggatgaagcgagtacatctcgggacgagtactgtgaatgccaatggcgagacgaaacgacaacggacctcatacacccgctaccagacgctggagctggagaaggagttccacttcaaccgctacctgacccgccgccgcagaatcgagatcgcgcatgccctgtgtctcacggagcggcagatcaagatctggttccagaaccggcgcatgaagtggaagaaggagcacaagatggcctcgatgaacatcgtaccctaccacatgggtccatatggccacccgtaccaccagttcgatatccatccgtcgcagttcgcgcacctaagcgcataggacgcgtggcacttttcgggtactggttagagactcaatcagttgtatcaggaaccatatcagacggcggcggcggcatcggcggccagtggttatcagtcgcaggacggcggtccaattggtggcggctcggtgggagtgggtggtggtgcgggggggccgggctcgctggccaacggtggcagcaatggcagcggtcccaactctctcttcgcctccgccgcctccagctcccaggctcccgactgcatcaagtatccgcaggagttctgatctcaggttatcatcaggcagcagcatcagcagcagcaggataactccatggatcggaatcaggagcgggacctaaaactgcttttggaaacggactgtgagcccgatccagagctgcaactggagttcaaggcggacattgtcgaatgcaacttgttctgctgctgagctatgtccgcctgccacgcccctgccgcctcatgcctgccgcctaccgcccatcgcctaccgcctgtcgccgcccgtcgatcaaccaacatccatagatgtttcttgtttgcaactgattcgtgttaagctaagaaacgagccatatccgcatggttcgtttgggtttatgatactggagatggaaccacgagcaatcgacgtcactctttaagatattaatcatcaacctttaactagaatttgtgatacgctgagtctaacatatcatgatca

SEQ ID NO: 57 - protein, 417 aa, DROSOPHILA
MDPDCFAMSSYQFVNSLASCYPQQMNPQQNHPGAGNSSAGGSGGGAGGSGGVVPSGGTNGGQGSAGAATPGANDYFPAAAAYTPNLYPNTPQAHYANQAAYGGQGNPDMVDYTQLQPQRLLLQQQQQQQQQQHAHAAAAVAAQQQQQLAQQQHPQQQQQQQQANISCKYANDPVTPGGSGGGGVSGSNNNNNSANSNNNNSQSLASPQDLSTRDISPKLSPSSVVESVARSLNKGVLGGSLAAAAAAAGLNNNHSGSGVSGGPGNVNVPMHSPGGGDSDSESDSGNEAGSSQNSGNGKKNPPQIYPWMKRVHLGTSTVNANGETKRQRTSYTRYQTLELEKEFHFNRYLTRRRRIEIAHALCLTERQIKIWFQNRRMKWKKEHKMASMNIVPYHMGPYGHPYHQFDIHPSQFAHLSA

SEQ ID NO: 58 - DNA, 5584 bp, DROSOPHILA
gatatttacacaatattcttcaacgctaaacatatcgaattttccaaatatggagcctgaaaataataattgccaatcctagcttaacatcagaaatgagtagaacaacttaaaaaaaattaacaaaagaatcgaacgctacagctaattaactcgacaactggttaccttttattcttctaatacattttataatgcactgcctaacaggtacatatagcaagcactatatgctgtcttacaaaacgattatatgatattttctttcgtacgtagccgtttgagatcatttggaaaaacaaactcgatctccaccatccttattctttgtcccaagtccttatatatctcgcgatactaagattgaataatgtagttattaatagcggaagtatgtaacagaataaactacaaagtgcacattttgttcaattcaggctggactggactggagcatattaatattataatattaacaaaaattcaaattaaacattcgacacttgtctaattgattcctaaatttggggtgcctgtttgttaattaaatgttaatattatgaagttccaaacagagcaaagagtttaagtttaattggttctacttatttgttacaatattcaagcttttttttattattattctcaaatgcaaatctctacaaataaataaacctccgacgttttagaacattcaccttttgtcagtgagcacaacctttcaatacagcccgacagggggctctctactgctgtctcttcacgccccctggtgaaaacgctgtgcactcaatcggtttgcagctttgccgtactgttcgattaaaaacttttaaattagaggcaaacatttaaaaataaaatgtccaaatatttgtctaaaatgtattgtagacgcttattgatttttaaattactcaaaagaatgaacatcgagggagggccgccaattgtgccatctctacatctcttcgctcatccctaaataacggcactctgcagatgcgaagcagtggatcgcaaaaacgcaaaatgtgggcgaaataagttcgcgagcgtctcgaaagtaaccggttactgaaaatacaagaaagtttccacactcctttgccatttttccgcgcggcgcttggaaattcgtaaagataacgcggcggagtgtttggggaaaatggcgcaaccgccgccagatcaaaacttttaccatcatccgctgccccacacgcacacacatccgcatccgcactcccatccgcatccgcactcgcatccgcacccacatcaccaacatccgcagcttcagttgccgccacaattccgaaatcccttcgatttggtgagttcccatcgcagcagagaagggctcttgtcccaggaaagctacagtacagattccctatggtgaacaaacaaccagtgcgatcactgatgaccataaacatttattgagccgcagcaaatgtgtttctagaacataaggcgaaatcttctattatcttgtttgtgactttaaaagtatcgtagcagaatctaaataacaattgatattattaatcgttacagttagtatagtatataattgtatatgaattgtggggcaacatgttattagtgatttgccgaaatgttctaaaaggtgtttcattgaaatggacgaatgttaaacctgttgcactcacaccgacaatcagtaatgtctatttttcaaaagccacatctatggccactgggtatacattattgactttatacacttcatacaacatattttctaaaacaagcattgttgtcctgcatgatgattagtgaaagtaatattgcaagattcggtccccgaagcgaatcgtcctttcacgtttttatataaagacagtgtaccccttgattctttgaagcttttcgatgagcgaacgggagcgataaactacaactacatacgtccgtatctgcccaaccagatgcccaagccaggtgagctcaaagcgaacaaagtcagccatcgccttatcagatgtctttccctcagaggagctgcccgactctctggtgatgcggcgaccacgtcgcacccgcaccacttttaccagctctcaaatagcagagctggagcagcactttctgcagggacgatacctcatagccccccgacttgcggatctgtcagcgaaactagccctgggcacagcccaggtgaagatatggtttaagaaccgtcggcgtcgtcacaagatccaatcggatcagcacaaggaccagtcctacgaggggatgcctctctcgccgggtatgaaacagagcgatggcgatccccccagcttgcagactcttagcttgggtggaggagccacgcccaacgctttgactccgtcacccacgccctcaacgcccactgcacacatgacggagcactacagcgagtcattcaacgcctactacaactacaatggaggccacaatcacgcccaggccaatcgtcacatgcacatgcagtatccttccggaggggggccaggacctgggtcgaccaatgtcaatggcggccagttcttccagcagcagcaggtccataatcaccagcagcaactgcaccaccagggcaaccacgtgccgcaccagatgcagcagcagcaacagcaggctcagcagcagcaataccatcactttgacttccagcaaaagcaagccagcgcctgtcgcgtcctggtcaaggacgaaccggaggccgactacaacttcaacagctcgtactacatgcgatcgggaatgtctggcgccactgcatcggcatccgctgtggcccgaggcgctgcctcgccgggctccgaggtctacgagccattaacacccaagaatgacgaaagtccgagtctgtgtggcatcggcatcggcggaccttgcgccatcgccgttggcgagacggaggcggccgacgacatggacgacggaacgagcaagaagacgacgctacaggtcaggcatgagtccacaaccttttttgatctcttgattctgagtgtggcgtttataaattgaagctttaagctttgtaactttcaaactgtctggtttgagatgttattctgaaagtacttctatttccgatcgatgagatttgggagttctccaatatttaacatttaacttattaagtttttgttttctaaattagacatggcatttctgaaagggaagtacaagtgttaaagatgtattttaatatagaatttgtatcaaaggttaagatttcaaccgtttgaaagcccttagttttcagggttttttacttttttattcatgtaatcactcttaatacactgcaagttaaaatagcatttctttgaccagaaaaataagatctatgcattttaaaagtgaaaacagactcatatgctgatgaacatttttagctataaattgtaacaataatttagcaatttcaatcgaatttatttatgttctaaatgcgttcgctctctccctagatcttggagcctttgaagggtctggacaagagctgcgacgatggcagtagcgacgacatgagcaccggaataagagccttagcaggaaccggaaatcgtggagcggcatttgccaaatttggcaagccttcgcccccacaaggccctcagccgcccctcggaatggggggcgtggccatgggcgaatcgaaccaatatcaatgcacgatggatacgataatgcaagcgtataatccccatcggaacgccgcgggcaactcgcagtttgcctactgcttcaattagcctggatgagaggcgtgttagagagtttcattagctttaggttaaccactgttgttcctgattgtacaaataccaagtgattgtagatatctacgcgtagaaagttaggtctagtcctaagatccgtgtaaatggttcccagggaagttttatgtactagcctagtcagcaggccgcacggattccagtgcatatcttagtgatactccagttaactctatactttccctgcaatacgctattcgccttagatgtatctgggtggctgctccactaaagcccgggaatatgcaaccagttacatttgaggccatttgggcttaagcgtattccatggaaagttatcgtcccacatttcggaaattatattccgagccagcaagaaaatcttctctgttacaatttgacatagctaaaaactgtactaatcaaaatgaaaaatgtttctcttgggcgtaatctcatacaatgattacccttaaagatcgaacatttaaacaataatatttgatatgatattttcaatttctatgctatgccaaagtgtctgacataatcaaacatttgcgcattctttgaccaagaatagtcagcaaattgtattttcaatcaatgcagaccatttgtttcagattcggagattttttgctgccaaacggaataactatcatagctcacattctatttacatcactaagaagagcattgcaatctgttaggcctcaagtttaattttaaaatgctgcacctttgatgttgtctctttaagctttgtatttttaattacgaaaatatataagaactactctactcgggtaaattgtgactaactacacataactacatacttagcccatatttccgtccctttctagaatgaacgaaaacagtatctggttttcccgaaaatcttatgaatttaaaaatgcactttattgcacatactcacacatgcctgccataaaatatgattcgcgatttttccgcgaacacccgcggatcataaaacatttgcaccagctgcctgtgtttattcacctacctgaaacccatactcttatcgcctgatcctcgcgcggtcgcactatttaggtagacactgtacaggcagcactcgcggggcgccgccaggcaacttgttgcccctattttctttgatataagttttgggaaatccagaagtccaataacggggcctatatgaacgaatattgattgggtttctcccagttatagagtttttattgatcttgggcgcgttttagtaggtggattatggatgtcctgggaaaaccaagctctgaatccattcttacttatcacaagacttgttttcctgtgcccttcatcacacctagtttaactactataattaataaactactttttaatccgccatttatgaagataatttatagcatctatgcatctttcaaatatcgcgagatatcgcaaagtattcataaattagttttttattgatattgtaaagctttttaatttggttcaggtttttattgtaaatacttttcacaattgtgcacagtgacccattaacatggttgcgatattaacttaagacttaaacaagttaattaagagttttagcacttcttttcaaaagatcatgttttaattatgtttttaaatgaatcttttcgacaattctaaaaatattatttcgaaaatgttaattttcatatataacctaagtaaagatattttcaactgtacctcactctcgccgcgacatttccacacggttatcctgttatgacttttcctttgttccaacgtatttttagcgaattctcgga

SEQ ID NO: 59 - DNA, 2397 bp, DROSOPHILA
agatgcgaagcagtggatcgcaaaaacgcaaaatgtgggcgaaataagttcgcgagcgtctcgaaagtaaccggttactgaaaatacaagaaagtttccacactcctttgccatttttccgcgcggcgcttggaaattcgtaaagataacgcggcggagtgtttggggaaaatggcgcaaccgccgccagatcaaaacttttaccatcatccgctgccccacacgcacacacatccgcatccgcactcccatccgcatccgcactcgcatccgcacccacatcaccaacatccgcagcttcagttgccgccacaattccgaaatcccttcgatttgatgtctttccctcagaggagctgcccgactctctggtgatgcggcgaccacgtcgcacccgcaccacttttaccagctctcaaatagcagagctggagcagcactttctgcagggacgatacctcatagccccccgacttgcggatctgtcagcgaaactagccctgggcacagcccaggtgaagatatggtttaagaaccgtcggcgtcgtcacaagatccaatcggatcagcacaaggaccagtcctacgaggggatgcctctctcgccgggtatgaaacagagcgatggcgatccccccagcttgcagactcttagcttgggtggaggagccacgcccaacgctttgactccgtcacccacgccctcaacgcccactgcacacatgacggagcactacagcgagtcattcaacgcctactacaactacaatggaggccacaatcacgcccaggccaatcgtcacatgcacatgcagtatccttccggaggggggccaggacctgggtcgaccaatgtcaatggcggccagttcttccagcagcagcaggtccataatcaccagcagcaactgcaccaccagggcaaccacgtgccgcaccagatgcagcagcagcaacagcaggctcagcagcagcaataccatcactttgacttccagcaaaagcaagccagcgcctgtcgcgtcctggtcaaggacgaaccggaggccgactacaacttcaacagctcgtactacatgcgatcgggaatgtctggcgccactgcatcggcatccgctgtggcccgaggcgctgcctcgccgggctccgaggtctacgagccattaacacccaagaatgacgaaagtccgagtctgtgtggcatcggcatcggcggaccttgcgccatcgccgttggcgagacggaggcggccgacgacatggacgacggaacgagcaagaagacgacgctacagatcttggagcctttgaagggtctggacaagagctgcgacgatggcagtagcgacgacatgagcaccggaataagagccttagcaggaaccggaaatcgtggagcggcatttgccaaatttggcaagccttcgcccccacaaggccctcagccgcccctcggaatggggggcgtggccatgggcgaatcgaaccaatatcaatgcacgatggatacgataatgcaagcgtataatccccatcggaacgccgcgggcaactcgcagtttgcctactgcttcaattagcctggatgagaggcgtgttagagagtttcattagctttaggttaaccactgttgttcctgattgtacaaataccaagtgattgtagatatctacgcgtagaaagttaggtctagtcctaagatccgtgtaaatggttcccagggaagttttatgtactagcctagtcagcaggccgcacggattccagtgcatatcttagtgatactccagttaactctatactttccctgcaatacgctattcgccttagatgtatctgggtggctgctccactaaagcccgggaatatgcaaccagttacatttgaggccatttgggcttaagcgtattccatggaaagttatcgtcccacatttcggaaattatattccgagccagcaagaaaatcttctctgttacaatttgacatagctaaaaactgtactaatcaaaatgaaaaatgtttctcttgggcgtaatctcatacaatgattacccttaaagatcgaacatttaaacaataatatttgatatgatattttcaatttctatgctatgccaaagtgtctgacataatcaaacatttgcgcattctttgaccaagaatagtcagcaaattgtattttcaatcaatgcagaccatttgtttcagattcggagattttttgctgccaaacggaataactatcatagctcacattctatttacatcactaagaagagcattgcaatctgttaggcctcaagtttaattttaaaatgctgcacctttgatgttgtctctttaagctttgtatttttaattacgaaaatatataagaactactctactcgggt

SEQ ID NO: 60 - protein, 67 aa, DROSOPHILA
MAQPPPDQNFYHHPLPHTHTHPHPHSHPHPHSHPHPHHQHPQLQLPPQFRNPFDLMSFPQRSCPTLW

SEQ ID NO: 61 - DNA, 7546 bp, DROSOPHILA
acaaaaagatattgcattgcataatcactattacattttgttgatagttttttcctcgtcgcctgctttttgcccacttctattttccttgcacaatattgtgtgttacatgcaaatttgctgctgccataaccctggaaaagagttgcctttgacgtgactgtacctaactaattaccgaatcaaccattttgatgcaggcgctgcatttaaagtgccttttggcgtttaatcaatgttccatgggcatacggtttttcgaaatttcagaggttcccagacgaaactttgagttacggatgtgcgccaaaagaaaaagggaagaaatccattaaaatgcgcatggcgttttgaaactgggcaaccaactttgttcggaaaggaagatcaaatgccgcttagtctcattcgtgtataaattgctctcttttcgcttaatcgtctagtgcaaaaaccttttaaatttaaatttagcaatccgagttgcagatctattgaaaccatcgcggtcgaccgaaagctttttacctgtaagtcaaaccaggaaacaagagagagattaaaaacctttaatatagtatcaaaaatattttttgccagataaattaaacaaaaacatctggttttttagacgtagagtaagatctctctgtgtaatctaaacagttgcacatcactccgattcattaaaaaatggatcttaaattctttactgcggtaatgactgccatgaaactgagcgaagtttacgcatggttcggaaacattccacctttgtcacgtagttccgcagccgcgtcaaaactttttaattgccctcaaaagaaacttactccggctcgtccacttccccagtgcgaataacacaatgacaatttactcttacacatttcctcttttcgttttctatacaaactttcgctacctttctgcccaaaacaaaacatggccaacaaaacaacccggtgacaatcaactaataacaaatggaaaatacacaaacagaaccttgacaattggaaatcatcgagacgaaaacgtgtcgaacacatcatcgatcgagcggtggagaccaagaaactcgagctggaggagcatgatcggttgcgccgaaagtcgaaaacattcaccgaaatgatggaggagaggcaagtacaactcccagttcgcaactagtgtctaacgtgctgaaagtgttgattgcacaaaatcgagtcctgccacggacgacacgttcttttgaaatgcttgatacaagtgaatccaaatccaagtgctattatccaagtgaaatgaatattgcggtgtttctttgcgaaaatcgctataagatatcagactacatagtaatcttttacattgtttgtcatcctaaaccacccgatttcattttcagcacctgtggtgcacctcctgaatgtaactttaactttattaaaacacataaatttccccacagggctgaaaggggcggacctcgggggcgtgccaagctggcttccctggccgtatacaacgaggatgagacgaacgacctgagtgatttggggatcggaaccagcagtgccagcggaaagagcagcctgtccggggactatgacaataacagtgttatggtgagttccaaccaacgaagcacattgccatagtagcatggacctatttagcacccatttctagtaccagtttctccgtcttaatttttttgtcgttattaagactcatttatggtgtcactgcgcttataagctattacagtaaattaataattaaatctaatttgtattttgctgccactcaagctcagacttattggaaagtgttgcaagcaatgcgatgcgacacaaatagattattaatcaaatgcccgcacatgcaccaccttattgtggttatcaaaataccaatcataagtaataatcaatgcaccacaaacaatcgaaaatgtgcagacgatacaaatatttcccttaagattgaaactgatcgaaagatgtagcttaggattgataaggattaggtgcgctggtcgccacacctcaaaataatcagttttgaactgaaaaaaaaaatgcttggaaacggggatcctgtagatttaagtggaaaatattgaataagagcattttagcaaacgctaaggaaatacaatttgagtttgataaatagaacagctgtgaaagggaaagaattacaatcgatggagtgcacaaaacatttacagaacctacaaatataggataatatttattcaattattcttatcaagttttattaatataggtacagaaacgctttcttctatctcttttatatttataaggaatacgctttaaaaagatacactactacaactagtgtgttagtggatcctcatatttccattaccatttaagtatttatccaaaatttttaataaaaatgacaaattctattacctccacagagcgaccatgcggcggagctggataaggcgattggagcagctagctctgtagctgctggagtaaccgcccaaaacgtggatgagcagctgaatcacataaaccgcaacggtagtaatgggaaccacgggaacggagcggctgttggccagacaggaccatcaaattcctccaagtcagcagggcggcaatacatctcctcgccaggatacgatacgtcctccagtaacgcgcaagccagttctccggatctctgtgaatacacctacgaaggagccatccaggactacaagcaaagagttcaacgggccagcagcaatggcaatggaaatgccaacggcaagttgattggagaacatattgcttatcccacgaggcgaggctctaaaattgaggatcgattgagtggttttgaggtgacatcgccaagcgacacgcaggagggtgtagagaagcaaaaggtggacgtgcccaaggttgacatatccaaacgcaaggagatcttcgagcaggccaaggcggaagtctcaaacggtggtgctccagctgccccaaaactcgtatttcgtgatggtcttaccaatggaaattcagctaccactgctcccaaatcggaggtgaggcgtctttctggtgacatctccagcattcgagatcgcatgcagagtttggaacagcagcggaaggctttcagttccagcaagagtgtggatgtgccggtgccgccccttaaacagcgtctgaatagtctgcagcagtccgttgccaaagaggagcagaagaagccaccgttggtggcgctcatcgatgccagacaactggagatcatgaggggagaagaggaacgtatgcgccagcagcaacaaaaagagaagcattcaccaagccaaactacattgtgtgcacctaagccagctcctcctgcccttattattgaggaaccgccggtggcagacaccaacgacgacagcggcattcaggaggacaccgctgatgaactgcagcagcagcagcaactcaacgcagccatcgccgccttggcgctcgaggagcgccagttggaggaagcagccaatgcggtcaaccaaattgaagcggagttcgatgagctgactgatctgcatccctcgccattgccaccatctccagctcttccggcggttcaacaaagcctccaacaaccgacagtcgctcaggttccagcacaagcggtcaatcaggcggctgctcctccattgcgggacatggaatttagtgtaagttgtactaacaattttatcgaacccgctaagataagtccttgtgatgttaatgtagtagctgcttcagcggtgtcggtgtccaaatctggccccactcccaatcccacatccactccaaatatggtatcctcctctcccaattgtaacttgcgtagaaagccctccaatgaaatggtccatcatcgcaatttgcttaaaatgttcaaggaaacctttcaaaacgacgacgatctgaaagaggtctgcgagatagtcacttcgcctggtcagtttacccagatcattgacttttccaagcggccaagtaatccccccataccaatacctactctactacctacctctactccgattcctacccagataccgcgaccactgggcaagccgcccatgtcgcccaaggctgtgaggttagcgtccagtcctaagggacatataaatcctttaagttcgcccacgaactccgggttttcacccccccaattcagtatcaatgggcgtgtggagatttttaattcacggcaactggacaagccgcccacgccaccagctcctcccaagaaaactgtaaggagtgagcatcctcttaaggaagcggttccttcaccagaagtggtgatgtgcgctcctcctatgaccatcgttgatcccgacgagctgcccaaaccaaatactgtaaaggccctttcaaattgcttcagccagagcgattccaagtcgctaacatcacccataatgtcgccgaaacctttgcccagtggtcgcattccccagatcacaccacctgcttctccaaagcccccgaaacgagttcagcttgacgaggtggatcgtagctctggggactatgccccagttgttggtcaaaccaaggcaattgtacacacgccccctagcaaaataaatgcccgggcaaaccaaactcttgatcccctagcacccaacgactcactgtgcctgcacacatcttcgcccagcgagataccttccttgaaagcctgctccccgaatgaatccagtttgttcaagctggcttcgtcacgacccacctcgccttcagtggatgtggcttcgtgtcagaaatttttgaatagagaagcaccaaaggatatccaactggccgaagaagaccgcaagagaatggatcagtttgctgtggaggagatgccctgtgataagatcgatgtgaccaaatcaccccagcccaatactggtttccagattgtgaccgaggatctagtaaaaaaatgtgatggcaaaaacatatccgaagcggtaagggatctagacgtcccacccagccaagaagatattgccctgtgtgcgggactactagactgtttggctccagctcaggagcctatttgtgacagcatcgatgtgaggaatggtccagtgccggcaactggatttcaggacatcagtgaggaggaggtgaaaaagtgtgaaaagcataataaaaattatgttatcacaaacaggccaagctcacccattggcagtgtcagagcagctcactcgaaggctttgatggacacttgtgagcagatcattgcagaggagcgcaaagctagcagtcagatgatgaagacttcgctgccggagtcggtggagaaaccgtcgacacccctcccaggtcgcaaatccaagattcccatacccaagccttgctgtatttcggcatctggaactgattcaataagtagagcgggctatgtaccaactgcaccgtcacacctctcaggaagtgcccagcagccgttaatagcacgcacccatgtggtggaaacagagatcaaggtcaaggagatctccccacccagtatacctaagacaccggaacaaactcagctccatgcatcaccaactaaggagaagaaagccaagaacatatttgatttcctgcgcagaaactttgggcatcaggaagagccgcagcatcattccactctgaatgagacccttgagaaaaaggtggtgctcaccagcaccaagagtggagtagatgtggtcaatgccgatgagtttgttcgggtagacaattcaaagttctatttggcaagtgagctggaggacgtaccagtgccacctcctctgcccaagacacctgctcctgtcaacattgagattcgaaaaaagatcactacaaatgagatattagaggaaaatacaacagaacaggcgttaacccaggaaataagcgatttgctagacgacgagatcatgaaactggagaattgacatcccataatctacacgattgggtgtttaaaattccccagatttcggagtggtatgtgatctctccagcgcttttgcgacactagaatagctcagaaaataaccaagctgttcatcgaccttaaatggctctctcaaattaatgtatatcgaagtggtacttgaacattttacaatgaaaatgataatcaacgaataataatatcaatcgaatttatttttactatggtttccaatcttttttgacattactcagtttttgtttacattttgttatgggctcaagctacgtaagctacagtttttctttatttaattaaatactttactaaacccaaaaattatgtacgaatagaaaatttgattttatataaacaattgttaaacatatgttttatggttatatattttatacacaaacatacacacgaaaataaaaggtaaaccgtaaatttgtcgctctaacacagaagtacacagaaaggattaataaaaaaccgcaaaagcataccaaataaattaaagtactataaaaattaataatacaatcgagatataactgttgttcaattttgttaataaacctcaactaaaatcgaaatcaatctgataaaattgtagtattgataactgaaaattcttttttctacatgccgctgataaacttacgtgtcgccgctagaaattcaactgctttcactgcttgtcaggtttcttactcgcggtgtagaatgtagatatcattatgtagatgcaaacggtgtatcaaatacgcgtagaagtgaaatgatcatcttgtgaaaaattaatttatatatgaaaatcgtcgacagtcaataatggatgtggacgaaccaatggaatcttacttttcccatgtctacgaatgccgtttcccgatcctatccctattccataggttgagggtttttatttaaggcttaattcaaaatgctatctgatttaccttctgacataatttgtgtgtacatatatttctcttacatgccttgctctcatttgttggctaaataatgtaaaatatgacctatcttttaatgcagttacatagtttacatgcttactgccagcaaaagttgttgcaagtatacaatttccgaggtaagcggtctctcaagctcatattcccctgttttgtgccttttgtgttttgctgtttgtactcttctttttaattttctaccctttttttctatctgattgtttggttgtctcgcctgtgttcgttttaacgctccaagttgcattgcatgttgcgttttacccacttagcacttgtataaaatgccaaaagtcacccatccgcctagttgggtttcagttcagctttagtttggcgctgcatactttggggggggggggggtcgcagatgtatccaaccaccgcagttttgcagacccatataccgcctcccttggtatctaaacaaatagttgggtcgatttgactctgcagcgcctaggtttagtgtacttaaagccctcgacgatattggttctggcgggacagttccgtatattcttggtcccacacatgtgtctgtggcgcgttatctttacggcacaccgtaataataa

SEQ ID NO: 62 - DNA, 4406 bp, DROSOPHILA
aacagaaccttgacaattggaaatcatcgagacgaaaacgtgtcgaacacatcatcgatcgagcggtggagaccaagaaactcgagctggaggagcatgatcggttgcgccgaaagtcgaaaacattcaccgaaatgatggaggagaggggctgaaaggggcggacctcgggggcgtgccaagctggcttccctggccgtatacaacgaggatgagacgaacgacctgagtgatttggggatcggaaccagcagtgccagcggaaagagcagcctgtccggggactatgacaataacagtgttatgagcgaccatgcggcggagctggataaggcgattggagcagctagctctgtagctgctggagtaaccgcccaaaacgtggatgagcagctgaatcacataaaccgcaacggtagtaatgggaaccacgggaacggagcggctgttggccagacaggaccatcaaattcctccaagtcagcagggcggcaatacatctcctcgccaggatacgatacgtcctccagtaacgcgcaagccagttctccggatctctgtgaatacacctacgaaggagccatccaggactacaagcaaagagttcaacgggccagcagcaatggcaatggaaatgccaacggcaagttgattggagaacatattgcttatcccacgaggcgaggctctaaaattgaggatcgattgagtggttttgaggtgacatcgccaagcgacacgcaggagggtgtagagaagcaaaaggtggacgtgcccaaggttgacatatccaaacgcaaggagatcttcgagcaggccaaggcggaagtctcaaacggtggtgctccagctgccccaaaactcgtatttcgtgatggtcttaccaatggaaattcagctaccactgctcccaaatcggaggtgaggcgtctttctggtgacatctccagcattcgagatcgcatgcagagtttggaacagcagcggaaggctttcagttccagcaagagtgtggatgtgccggtgccgccccttaaacagcgtctgaatagtctgcagcagtccgttgccaaagaggagcagaagaagccaccgttggtggcgctcatcgatgccagacaactggagatcatgaggggagaagaggaacgtatgcgccagcagcaacaaaaagagaagcattcaccaagccaaactacattgtgtgcacctaagccagctcctcctgcccttattattgaggaaccgccggtggcagacaccaacgacgacagcggcattcaggaggacaccgctgatgaactgcagcagcagcagcaactcaacgcagccatcgccgccttggcgctcgaggagcgccagttggaggaagcagccaatgcggtcaaccaaattgaagcggagttcgatgagctgactgatctgcatccctcgccattgccaccatctccagctcttccggcggttcaacaaagcctccaacaaccgacagtcgctcaggttccagcacaagcggtcaatcaggcggctgctcctccattgcgggacatggaatttagtgtaagttgtactaacaattttatcgaacccgctaagataagtccttgtgatgttaatgtagtagctgcttcagcggtgtcggtgtccaaatctggccccactcccaatcccacatccactccaaatatggtatcctcctctcccaattgtaacttgcgtagaaagccctccaatgaaatggtccatcatcgcaatttgcttaaaatgttcaaggaaacctttcaaaacgacgacgatctgaaagaggtctgcgagatagtcacttcgcctggtcagtttacccagatcattgacttttccaagcggccaagtaatccccccataccaatacctactctactacctacctctactccgattcctacccagataccgcgaccactgggcaagccgcccatgtcgcccaaggctgtgaggttagcgtccagtcctaagggacatataaatcctttaagttcgcccacgaactccgggttttcacccccccaattcagtatcaatgggcgtgtggagatttttaattcacggcaactggacaagccgcccacgccaccagctcctcccaagaaaactgtaaggagtgagcatcctcttaaggaagcggttccttcaccagaagtggtgatgtgcgctcctcctatgaccatcgttgatcccgacgagctgcccaaaccaaatactgtaaaggccctttcaaattgcttcagccagagcgattccaagtcgctaacatcacccataatgtcgccgaaacctttgcccagtggtcgcattccccagatcacaccacctgcttctccaaagcccccgaaacgagttcagcttgacgaggtggatcgtagctctggggactatgccccagttgttggtcaaaccaaggcaattgtacacacgccccctagcaaaataaatgcccgggcaaaccaaactcttgatcccctagcacccaacgactcactgtgcctgcacacatcttcgcccagcgagataccttccttgaaagcctgctccccgaatgaatccagtttgttcaagctggcttcgtcacgacccacctcgccttcagtggatgtggcttcgtgtcagaaatttttgaatagagaagcaccaaaggatatccaactggccgaagaagaccgcaagagaatggatcagtttgctgtggaggagatgccctgtgataagatcgatgtgaccaaatcaccccagcccaatactggtttccagattgtgaccgaggatctagtaaaaaaatgtgatggcaaaaacatatccgaagcggtaagggatctagacgtcccacccagccaagaagatattgccctgtgtgcgggactactagactgtttggctccagctcaggagcctatttgtgacagcatcgatgtgaggaatggtccagtgccggcaactggatttcaggacatcagtgaggaggaggtgaaaaagtgtgaaaagcataataaaaattatgttatcacaaacaggccaagctcacccattggcagtgtcagagcagctcactcgaaggctttgatggacacttgtgagcagatcattgcagaggagcgcaaagctagcagtcagatgatgaagacttcgctgccggagtcggtggagaaaccgtcgacacccctcccaggtcgcaaatccaagattcccatacccaagccttgctgtatttcggcatctggaactgattcaataagtagagcgggctatgtaccaactgcaccgtcacacctctcaggaagtgcccagcagccgttaatagcacgcacccatgtggtggaaacagagatcaaggtcaaggagatctccccacccagtatacctaagacaccggaacaaactcagctccatgcatcaccaactaaggagaagaaagccaagaacatatttgatttcctgcgcagaaactttgggcatcaggaagagccgcagcatcattccactctgaatgagacccttgagaaaaaggtggtgctcaccagcaccaagagtggagtagatgtggtcaatgccgatgagtttgttcgggtagacaattcaaagttctatttggcaagtgagctggaggacgtaccagtgccacctcctctgcccaagacacctgctcctgtcaacattgagattcgaaaaaagatcactacaaatgagatattagaggaaaatacaacagaacaggcgttaacccaggaaataagcgatttgctagacgacgagatcatgaaactggagaattgacatcccataatctacacgattgggtgtttaaaattccccagatttcggagtggtatgtgatctctccagcgcttttgcgacactagaatagctcagaaaataaccaagctgttcatcgaccttaaatggctctctcaaattaatgtatatcgaagtggtacttgaacattttacaatgaaaatgataatcaacgaataataatatcaatcgaatttatttttactatggtttccaatcttttttgacattactcagtttttgtttacattttgttatgggctcaagctacgtaagctacagtttttctttatttaattaaatactttactaaacccaaaaattatgtacgaatagaaaatttgattttatataaacaattgttaaacatatgttttatggttatatattttatacacaaacatacacacgaaaataaaaggtaaaccgtaaatttgtcgctctaacacagaagtacacagaaaggattaataaaaaaccgcaaaagcataccaaataaattaaagtactataaaaattaataatacaatcgagatataactgttgttcaattttgttaataaacctcaactaaaatcga

SEQ ID NO: 63 - protein, 1167 aa, DROSOPHILA
MSDHAAELDKAIGAASSVAAGVTAQNVDEQLNHINRNGSNGNHGNGAAVGQTGPSNSSKSAGRQYISSPGYDTSSSNAQASSPDLCEYTYEGAIQDYKQRVQRASSNGNGNANGKLIGEHIAYPTRRGSKIEDRLSGFEVTSPSDTQEGVEKQKVDVPKVDISKRKEIFEQAKAEVSNGGAPAAPKLVFRDGLTNGNSATTAPKSEVRRLSGDISSIRDRMQSLEQQRKAFSSSKSVDVPVPPLKQRLNSLQQSVAKEEQKKPPLVALIDARQLEIMRGEEERMRQQQQKEKHSPSQTTLCAPKPAPPALIIEEPPVADTNDDSGIQEDTADELQQQQQLNAAIAALALEERQLEEAANAVNQIEAEFDELTDLHPSPLPPSPALPAVQQSLQQPTVAQVPAQAVNQAAAPPLRDMEFSVSCTNNFIEPAKISPCDVNVVAASAVSVSKSGPTPNPTSTPNMVSSSPNCNLRRKPSNEMVHHRNLLKMFKETFQNDDDLKEVCEIVTSPGQFTQIIDFSKRPSNPPIPIPTLLPTSTPIPTQIPRPLGKPPMSPKAVRLASSPKGHINPLSSPTNSGFSPPQFSINGRVEIFNSRQLDKPPTPPAPPKKTVRSEHPLKEAVPSPEVVMCAPPMTIVDPDELPKPNTVKALSNCFSQSDSKSLTSPIMSPKPLPSGRIPQITPPASPKPPKRVQLDEVDRSSGDYAPVVGQTKAIVHTPPSKINARANQTLDPLAPNDSLCLHTSSPSEIPSLKACSPNESSLFKLASSRPTSPSVDVASCQKFLNREAPKDIQLAEEDRKRMDQFAVEEMPCDKIDVTKSPQPNTGFQIVTEDLVKKCDGKNISEAVRDLDVPPSQEDIALCAGLLDCLAPAQEPICDSIDVRNGPVPATGFQDISEEEVKKCEKHNKNYVITNRPSSPIGSVRAAHSKALMDTCEQIIAEERKASSQMMKTSLPESVEKPSTPLPGRKSKIPIPKPCCISASGTDSISRAGYVPTAPSHLSGSAQQPLIARTHVVETEIKVKEISPPSIPKTPEQTQLHASPTKEKKAKNIFDFLRRNFGHQEEPQHHSTLNETLEKKVVLTSTKSGVDVVNADEFVRVDNSKFYLASELEDVPVPPPLPKTPAPVNIEIRKKITTNEILEENTTEQALTQEISDLLDDEIMKLEN

SEQ ID NO: 64 - DNA, 4338 bp, DROSOPHILA
ctggatggatggctggcttgcggtgggttgccaagccggtaagacagtgatagttatcggggctgggatcggtggctcaggggcttcagtggtgcggtggttgcagtgatgctccattcgggtaaacagctggcaatggagcgtgtctgtaacggccagtggcagcgagataagctcgaaactatggaaatcaggaggaggagaccatcttcatttccaccttatcacgtcgagaatttcacatatacatatatatgcagcacattcagcatttgaaccacaaccacttacacatatttatcaactgcgcagcaccgaaattattcatcactcgagtttatatagtatttgatttgctgctagactagagtgtgtaaaatacatcatttattggtcatggctcaccgcagacagctgcaaatgttttgctaccttagcaccacattctgaaggctggtttgctgaactcatctgctgctgggaatcctggacaaggactacttcgtgcagatccacgccagccaaccaaactaaggtgtatgtaaggtagtcaactggctgtgacgtcagcaggtggtttttgtccggaattgtttaagaaatggcgtttgtttttacggctgcaaatccaacgactttgtttttgttgactgcgcttcgttctgtgtttggccttctgagcgtctggctttgcctttgttgttgttatgttgttgttagtcagcacagctgatggcaaaacgcgttcgctgctcggtcctactataaatcgatttcaaattacttaaaaataaatgttatatacaaataaactttaaaatgtataaaactagattttaattgaaaattaaatttacataaaagtattattccgttattttatttaattaaatgcaattgttgcatcttttacaaacagctgtttcatggaagttatcgaactggttcgatggaaccagctgacttggtacctgttgcgctcctcagctgttttcgtttcattctggcttgtgttgatccgccgagcagtttgctttagtttaaatacgtttttattactttaaatacacttaagttaaaatgctctgccgactggtgggaaacaggagtttgggtgcacgatataccgcctccatcaaggtaaaatccgcctctcataaaaatataaccacgatatttctggagaatatcttccagatatatgtagatagtttgcatttctctcggttatctcttcaaagattaagtcctttattaatcatgtgattatacagcgataaaccagttctccagcaaaaacatatcaacaggtgttaattcaaaaagttccagaaatatatttataaatatttgttgttttgatttagtgttttgctgccaattgagataagaggcactaatttgacgaatccgcacgagccattcactctaaaatcaccccactgataccattaccccccctggagcaatccaagcgaattaaaaataggcaaacttacgtaacgactttgcacaaacaatccacacgaacgctcacttataccagggaacacctgcgtatcatggacaaaccgctttttatgctaatagtccgattatttgcaggctattgcgtgctactccacgtcgggaaaacagcggaacggcaagatctacgagtcggccatagatgctgtggccgatgtgcaggatggtgcccagatcctgttcggcggattcggaatctgcggcattccggagaagatgatcaacgcgctcaagcagaaaggagtcaagaacatcactggcgtttccaacaatggaggtatgcatgaaaagaatatataatgaatgctcttattaaaccgaattcctttccaggtgtggacgacactggtctgggtgtcctgatcaagcagaagcaggtgtccaaggtaattggctcctatgtcggcgaaaacacggagttggtgcgtcaatatctggaaggagaactggccgtggaactgactccccaaggcaccctagcggaaaagatccgcgctggaggagccggcattccggccttctacacgcccactggctacgccactcttgtccaggaaggcggagcacccattaagtactccaaggatggcaaagtggaaatatccagcgaaaagaagcccgtgaaggagttcaacggaaagaactacgtgatggaggagtccatcttcgcagactttgcctttgtcaaggcccagaaggccgatcccttgggcaatctggtgttcaacaaagctgccagaaacttcaatgcacccatgtgcagggctgccaaaatcaccgtggccgaagtggaggaaatcgtgcccatcggagccctttctcccgatgagatccatgtgcccggcatctacattaaccgcatcttcaagggcaccaactacaacaagcgtgtggaacgcttgcgcatcacggaacccaaggatcccagcaaacccgctcctccaccaaatcccgcccaggttttacgtgagcgcattgcccgtcgagtggctcttgagttccacgacggcatgtatgccaatctgggcattggcattcccgtgctctcctccaactacatccccaagggcatgaacgtgatgctgcagtcggagaacggaatcctgggcctgggacccttccccaccaaggataaagtggatccggacttgatcaacgccggaaaggagagtgttaccgtggtgcccggagcctcatactttggctccgatgacagctttgccatgatccgtggtggtcatgtggatatcaccattttgggcgccatggaggtgtcggccacaggcgatctggccaactggatgattcctgtaagttaatccattatcatccattaagcttaatcacttgcaaactcattctttttagggcaaactggttaagggaatgggtggagccatggatttggtggctgcgcctggcaccaaggtgatcatcaccatggagcacaatgcccgcgatggttcccccaagatcctggacacctgctcccttccgctcactggcaagggtgtgatcgacatgatcatctcggagaaggctgtcttcacggtggaaaagggcgtgggcctaacgctgatcgaggtggccgagggttacaccgtggacgacatcattgccagcactggagccaagttcacagtgtcgcccaatctgaagaaaatgggtcaaattccggtctgatgagccacgtgcttagtgcccagagaagctgcaatacctccggttgagtgataaacgagtgcatttattttttgttgaccgtgtgacaaaaacatttgtgttaaatatatggaccatatcaaatcgaatctctcccagcttatccaattgccttggccatgtccttcagcgcctcggagcgatgtgcgttgcgcatctgcttgttaaggatatcgaagatgcggttgtacttgctgtcggtttccgtgcggcagatggcgcagaactgcgaggacagcacgttgagtggactacggaagtacaggctcttctgcatggtgagaccgttcctgtggtgggacatcatgtgcaggacgatctcgatgagggccagcgtggctccaatgacgaagttgtagcagaagagcgtgggcaccaggaacagcaagtaggggttgcggttgtagcccaggattatgttctgcaaggaaaactcaattatttagcatactcataatcccagtttggaatggtaacctacgttgctcacgccatccatttgacaatagtcctcgcgttcgtagcccggagtgacctttttgggtgccctgttgggaatcgcggtggctgccccatatctcaccgtattggccagctcgtcgtctacctcatcgcatatggttccgcggagatagtgcttgggtacatggaaattcgtgtgtttgcggaagtgaaccttggtcacctggtcgtggatcggttcaccggtctcctcatcgaaggccggtctattaacgcggacggtgtctgtgtagaagtactccaactcacccgtttcgcagttctgtcggagattggatcgaatcagataatatagtgttaagagagtggtctaagagagcggtctaagagagagcgaaagagagcgctgggcggcactcaagaatcgcgtgatcgagattttgttggtaatttatgggccgaacctggtggaatttgcaagtcagatttataaagcaaacatgcctgaagttgattaaaggttttgaatctacatttctatcttcgaatgccatttaaagcagatgactctgttcatctattgtctggctttctaatgtgttttacgaacagcgggtatacaagatt

SEQ ID NO: 65 - DNA, 1759 bp, DROSOPHILA
attctggcttgtgttgatccgccgagcagtttgctttagtttaaatacgtttttattactttaaatacacttaagttaaaatgctctgccgactggtgggaaacaggagtttgggtgcacgatataccgcctccatcaaggctattgcgtgctactccacgtcgggaaaacagcggaacggcaagatctacgagtcggccatagatgctgtggccgatgtgcaggatggtgcccagatcctgttcggcggattcggaatctgcggcattccggagaagatgatcaacgcgctcaagcagaaaggagtcaagaacatcactggcgtttccaacaatggaggtgtggacgacactggtctgggtgtcctgatcaagcagaagcaggtgtccaaggtaattggctcctatgtcggcgaaaacacggagttggtgcgtcaatatctggaaggagaactggccgtggaactgactccccaaggcaccctagcggaaaagatccgcgctggaggagccggcattccggccttctacacgcccactggctacgccactcttgtccaggaaggcggagcacccattaagtactccaaggatggcaaagtggaaatatccagcgaaaagaagcccgtgaaggagttcaacggaaagaactacgtgatggaggagtccatcttcgcagactttgcctttgtcaaggcccagaaggccgatcccttgggcaatctggtgttcaacaaagctgccagaaacttcaatgcacccatgtgcagggctgccaaaatcaccgtggccgaagtggaggaaatcgtgcccatcggagccctttctcccgatgagatccatgtgcccggcatctacattaaccgcatcttcaagggcaccaactacaacaagcgtgtggaacgcttgcgcatcacggaacccaaggatcccagcaaacccgctcctccaccaaatcccgcccaggttttacgtgagcgcattgcccgtcgagtggctcttgagttccacgacggcatgtatgccaatctgggcattggcattcccgtgctctcctccaactacatccccaagggcatgaacgtgatgctgcagtcggagaacggaatcctgggcctgggacccttccccaccaaggataaagtggatccggacttgatcaacgccggaaaggagagtgttaccgtggtgcccggagcctcatactttggctccgatgacagctttgccatgatccgtggtggtcatgtggatatcaccattttgggcgccatggaggtgtcggccacaggcgatctggccaactggatgattcctggcaaactggttaagggaatgggtggagccatggatttggtggctgcgcctggcaccaaggtgatcatcaccatggagcacaatgcccgcgatggttcccccaagatcctggacacctgctcccttccgctcactggcaagggtgtgatcgacatgatcatctcggagaaggctgtcttcacggtggaaaagggcgtgggcctaacgctgatcgaggtggccgagggttacaccgtggacgacatcattgccagcactggagccaagttcacagtgtcgcccaatctgaagaaaatgggtcaaattccggtctgatgagccacgtgcttagtgcccagagaagctgcaatacctccggttgagtgataaacgagtgcatttattttttgttgaccgtgtgacaaaaacatttgtgttaaatatatggaccatatcaaatcgaa

SEQ ID NO: 66 - protein, 516 aa, DROSOPHILA
MLCRLVGNRSLGARYTASIKAIACYSTSGKQRNGKIYESAIDAVADVQDGAQILFGGFGICGIPEKMINALKQKGVKNITGVSNNGGVDDTGLGVLIKQKQVSKVIGSYVGENTELVRQYLEGELAVELTPQGTLAEKIRAGGAGIPAFYTPTGYATLVQEGGAPIKYSKDGKVEISSEKKPVKEFNGKNYVMEESIFADFAFVKAQKADPLGNLVFNKAARNFNAPMCRAAKITVAEVEEIVPIGALSPDEIHVPGIYINRIFKGTNYNKRVERLRITEPKDPSKPAPPPNPAQVLRERIARRVALEFHDGMYANLGIGIPVLSSNYIPKGMNVMLQSENGILGLGPFPTKDKVDPDLINAGKESVTVVPGASYFGSDDSFAMIRGGHVDITILGAMEVSATGDLANWMIPGKLVKGMGGAMDLVAAPGTKVIITMEHNARDGSPKILDTCSLPLTGKGVIDMIISEKAVFTVEKGVGLTLIEVAEGYTVDDIIASTGAKFTVSPNLKKMGQIPV

SEQ ID NO: 67 - DNA, 5920 bp, DROSOPHILA
agctcttgaattggcgctgcaagctattgatcgcgaggcgacaaccaagccaatggacaaggcacaacatccacagaagcgggaacagaaggaggagctgggaggtaagccggaggagaaggagccaatttgcgaggagcagcacgacgaagagtccaacgagcagggggaaacacacaacgagggtggggaaatgccaaataaaaccgataagcaaatgcaggggggacgagagcccatctatgagaatgtcagctcgactatatctatgcatgaagtagataatgaacagatagcaactatgacgataaccacacagacccaagcgacgcgaataagtcacaggagaagcattccaagccagcaaaccagcaacagtaacgagaataatcaaagcactaatcaaaccagcaacagcaggaatcaaaaagagagcagcacagcagcaacatcggcagcgaaccccgtgccaccaacaacaccgggggaacaagcagagccctactaccaagtgccgaaggccacggagccctactacgatgcccccaagcatttaaggccggtgccggtatacgaaaatgtcgagatcttttactcgggcctggagattagtcagggatctgtgggagcgccagtagggctgatggagccacccaaggaaaagccaccaccaccgcccaccgagagtccgattccgctggacgagggccatgacgacgagctggatggactgggcaacagtctgggccacaacacagacacctggtcatcggacaacacctacgagaccatatcgaacggcactcgccggcaccttcagggacaaccggaacccgcccaaccctcgccgcccatcaagaggatgaactcgaccaaacggatcaagaaggagttgcgcaacaagcgctccagcttcctgggcatcgaaaacgacggcgatcttgacgacatggagacctatctcgagctaacagtggccccgcctccggatatggcgcagctcttgcaggaggagcggcgactggagaagcagctgtacatcaaggcgggactctgcgacagttccgacacaggttagtcgatataagtttttgcatagcctgtaagagcaacgatgggtgtggaagaaaaccgataccaaaagccaacacggcataaaaccgaaagacgagagtaatgagcaaatcaccagcatggaaagaagggggttagggtgtcgactgggccagagggtatagggtggcccccatctaccccgcgaggttaagtataaataatccgtttagtgtgcgtgacccatggagctgtcaaagctttgactgcaattttctcccaattttgtgtttaaagaactaacgcaaacgaatcataccgataaaaacgtaacaaaagtattttatgagattatatggcaaaatgagtacgttttatatactcatagatggaagtacataaatagttattgagcgaagtatgaaaagtttagaaaaaaaaacctataatgtctggacacaaatgcgggtactaaactttacgttaattttttttgttttatggattagccttttccattgctcctaaatatacatagttgacttttgctgtcaatattaaccacacaatttgtctaattctatcgaaggtgaaagccgcgattctggagtttctgaaaaccactctcgccagagcagtgagcactacacgaactcctctgaggagaacgatacacagtcagaggccacaccgccgccattgcctccaccaccatcgaccgcccaagtgggtgaagtcatataccaaaatgagagcctcctggctgcccagacgccgcttctccagacggtaaaaggaaactccgccgagtcctggaccgaatcagcaacggccgcagcggcggccacgcaatcattgagcgaagccacagcaacggccaatgccaagatgcagtccatcgaggataagatccgggagcagggagagatgttgcgggtggaacgcgagctactgcacttctcggtaaggaagaggttcaagttttaggaccataaaactcattaaaaaatgtggtcacagaaaactatgattagcaaagaaaaaggtcaataatttaaacttttccttcacagcaagaggaactgaaacggcaacgtgaaaatcttgtgcttcgagaaaatattgctcgacgagagttgcaacacggagccaagatgctgatgtcgaacaaccggcgctcactgcaggatctgcaccacggtctaggaatcggaaacggaatgctcagtgccttccagccaccgcaacaccaccaggttcaaatgccaccaccgcatccgcaacagatttacgccaatgtgccgcagcagcagcaacagatggttctgcatgcatatcaccagatggacacggactaccgcaagtccatgtcggatctaaacgagttctccaactgcctgatactgccgccaacgccgcccacaaagccattgagggctatgcaattgaacgccaatggccatggcctggagccagattacgctgttagcacgaggcagcgccaaccaccggctccgtacggtggctctctggtaaagattgctggagcaccaatgccgccacggctccccggtcaaggatatcccattcaagcgccgacagcgccagcataccatcaccagtcggcccaaaacttaagcaatatgtccagaaacacattgctcgctttgagtgccacccccaaaccaaaatacgcggacggatgggtgcaggtgcagcagcggaagagttatgacagccaacagaccagcgatgcggcttggctggccgctcagcagcaaaagcgcaaatccatgcctgactacggcggagcactctacaataacaaccactggctactgcaggaggcggagcagcgacgcatcgagcaacttaatcggcgatctataccagccagcaagtcgatgggcaaaccgctgcccgattccatcatacaaactcttacggagcgggtccagagcaaaggaatcggcgatcgaaagcggtaagtagtaatatataggtgacaagggaaactctactttactacatcttacatagatgatcttttttcataccttatatttaatgcaattttaattcaccaacagcttcgatagcaacgggaactatagccaggtaaatggcaacaacatctaccagcagcaacagcagcagaagaatgtgacgaatggcagcagcatcaatggcaacagcagccaggggcaggagaaggtgctcagcgttagtggcaagaagaagtgctcccattgcggcgacgaattaggtaaactttgctactacgttggttgtgagtgttgtggttgttctactacttttgaatacccccatacccctcttactcttacatcgtccatttttgggaacatcttttaggcttgttgtcacagagagagatcatgaatagaacacacttggattcactagtctcatggttgggtttggtcgatcatttaatgctttctccttcccattggttataaactctttatcaataagtttccattctcacttacatgtctgtgacagatctgggctgcactcacggcaattgtcggcaggtgcacaaagcgctaaaatatattgtttgggtgtaaatttaaaaagactgcccaacagtttcgaatattttaggtatattagtaaaatcttggaagcggaatataatatctaagtggtggggttatttataatctacgtcacttctgttgcaatttttgttgcttataattttaactttcgttaacttccgcttcagtgactcctttaatccggcaactaagctgaaagattccttacctaattccacaggtcgcggcgctgccatgatcatcgaatcgcttctgctgttctaccacatcaactgcttcaagtgttgcgtctgccacgtccagctgggagatggcctcaatggaaccgatgtccgggtgcgaaaccacaagctgcattgccaaaactgctactccagcgatgacggcattaagttcagctgcgtctaactgagccctcgccatggaaacggaagtggattattgaatagaactggggttgttgctctgttgcttttgcaacattgattgttgttgttgtactagtaatacatagatattaaatagagatgataattcgtacgttcacatatatacaatacatatatctacatatgttgagaacaaagtcaaatccaaaacgtttcagattagtgttaatcgctttaatatgcttccctacgaaattatgtaatgttttaactcggatttaaaagttttatacaacgcattctacatgttataaatcaaactctatacattttacatgtttaaatgccaagctctctaacattgtaacaaagtaatgtgtgttgaaacttaaaaaaaaaaccaaaaaaaggattaactttaaacgaagtgttaaaattttgaaattgttttgaatttatatttacacctctactctacacatctacacaatctactatttctatccgaaaattcgcttttaaattagttagtttctaactttttgtacccgctacagcccacttaaaatacctaacgacgcatccaatgtacctaaaaaaaactatatacaaacacccatccacacgcaactcactaacataattattatatacatacccttaaacttgcatgaggtgagcatatatcgcgaaagatttcatttcttatatcccttatttttatttattgtaatttcgcataaagttgaaaatttgtatattatatacacatcttggattgtatgattaatttttaaacatgatcggtatatgaataatttttctgtataaatacatcaaagaagatatagtttagttttttaataaactatttcaatgaagaactatttcatattttgatctgcagaacgcttaaagttaaaaggtgtatggtatgttggtggtaatacttcaatgactaggagatacagtccttcaatgatgaaacaatcattttacgtttctgaacttatcattgttaattaaattgttctaaaatgtataacttacctgtcctgtcgcatttccgacaaatatgctaacaaagtggatgtcaattcgacatgcttaataaaaacttacaactgagttcataaatttttgggaggaaccagtatctgctaatgtaacactgtaactaatgttattgatttaaaaaaaaaacttccgcattctgagatttaaatttcgcccaaaagtatgcattacgaatatatttaaattggccacacaaactttcatatgaaaagttttttttttaattaatttatatattaaggcatacggggaaatcttggagcccctttgtgtccttctttcatatgaaaagtgtgtttttttatgctctttagagtaccttttattcttcaccaggatcaagaatcagcgcagtcgatctggccatgtttgtccgcatgaacgtcaagatctcatgaactataaatgctagaagattaaggatgcagattgcacagaaaagtgtaggcgtagctcaagtttatcctggtgctaccaaacaattgaaagttaagtaacgcatatgatgcaacgaggtgctggttataaaatgtaagaaactagtttttaatagaatgtgttgtcatatttcgtcacaaaatttgatattataacttttgtgtgccgaaggtacgatcatcaaagtttgatattaaagaatataaatattactattcttacaataaacccagcaccgatgcgactccctgaaaccctatagaatagtgaagctcaccaaagactgaaacacaacattttgttttagcagttgggtgctaaattttcagttgcacatgcatttattttgttcctggtgatgaatactgttgt

SEQ ID NO: 68 - DNA, 2590 bp, DROSOPHILA
ctcttgcaggaggagcggcgactggagaagcagctgtacatcaaggcgggactctgcgacagttccgacacaggtgaaagccgcgattctggagtttctgaaaaccactctcgccagagcagtgagcactacacgaactcctctgaggagaacgatacacagtcagaggccacaccgccgccattgcctccaccaccatcgaccgcccaagtgggtgaagtcatataccaaaatgagagcctcctggctgcccagacgccgcttctccagacggtaaaaggaaactccgccgagtcctggaccgaatcagcaacggccgcagcggcggccacgcaatcattgagcgaagccacagcaacggccaatgccaagatgcagtccatcgaggataagatccgggagcagggagagatgttgcgggtggaacgcgagctactgcacttctcgcaagaggaactgaaacggcaacgtgaaaatcttgtgcttcgagaaaatattgctcgacgagagttgcaacacggagccaagatgctgatgtcgaacaaccggcgctcactgcaggatctgcaccacggtctaggaatcggaaacggaatgctcagtgccttccagccaccgcaacaccaccaggttcaaatgccaccaccgcatccgcaacagatttacgccaatgtgccgcagcagcagcaacagatggttctgcatgcatatcaccagatggacacggactaccgcaagtccatgtcggatctaaacgagttctccaactgcctgatactgccgccaacgccgcccacaaagccattgagggctatgcaattgaacgccaatggccatggcctggagccagattacgctgttagcacgaggcagcgccaaccaccggctccgtacggtggctctctggtaaagattgctggagcaccaatgccgccacggctccccggtcaaggatatcccattcaagcgccgacagcgccagcataccatcaccagtcggcccaaaacttaagcaatatgtccagaaacacattgctcgctttgagtgccacccccaaaccaaaatacgcggacggatgggtgcaggtgcagcagcggaagagttatgacagccaacagaccagcgatgcggcttggctggccgctcagcagcaaaagcgcaaatccatgcctgactacggcggagcactctacaataacaaccactggctactgcaggaggcggagcagcgacgcatcgagcaacttaatcggcgatctataccagccagcaagtcgatgggcaaaccgctgcccgattccatcatacaaactcttacggagcgggtccagagcaaaggaatcggcgatcgaaagcgcttcgatagcaacgggaactatagccaggtaaatggcaacaacatctaccagcagcaacagcagcagaagaatgtgacgaatggcagcagcatcaatggcaacagcagccaggggcaggagaaggtgctcagcgttagtggcaagaagaagtgctcccattgcggcgacgaattaggtcgcggcgctgccatgatcatcgaatcgcttctgctgttctaccacatcaactgcttcaagtgttgcgtctgccacgtccagctgggagatggcctcaatggaaccgatgtccgggtgcgaaaccacaagctgcattgccaaaactgctactccagcgatgacggcattaagttcagctgcgtctaactgagccctcgccatggaaacggaagtggattattgaatagaactggggttgttgctctgttgcttttgcaacattgattgttgttgttgtactagtaatacatagatattaaatagagatgataattcgtacgttcacatatatacaatacatatatctacatatgttgagaacaaagtcaaatccaaaacgtttcagattagtgttaatcgctttaatatgcttccctacgaaattatgtaatgttttaactcggatttaaaagttttatacaacgcattctacatgttataaatcaaactctatacattttacatgtttaaatgccaagctctctaacattgtaacaaagtaatgtgtgttgaaacttaaaaaaaaaaccaaaaaaaggattaactttaaacgaagtgttaaaattttgaaattgttttgaatttatatttacacctctactctacacatctacacaatctactatttctatccgaaaattcgcttttaaattagttagtttctaactttttgtacccgctacagcccacttaaaatacctaacgacgcatccaatgtacctaaaaaaaactatatacaaacacccatccacacgcaactcactaacataattattatatacatacccttaaacttgcatgaggtgagcatatatcgcgaaagatttcatttcttatatcccttatttttatttattgtaatttcgcataaagttgaaaatttgtatattatatacacatcttggattgtatgattaatttttaaacatgatcggtatatgaataatttttctgtataaatacatcaaagaagatatagtttagttttttaataaactatttcaatgaagaacta

SEQ ID NO: 69 - protein, 449 aa, DROSOPHILA
MQSIEDKIREQGEMLRVERELLHFSQEELKRQRENLVLRENIARRELQHGAKMLMSNNRRSLQDLHHGLGIGNGMLSAFQPPQHHQVQMPPPHPQQIYANVPQQQQQMVLHAYHQMDTDYRKSMSDLNEFSNCLILPPTPPTKPLRAMQLNANGHGLEPDYAVSTRQRQPPAPYGGSLVKIAGAPMPPRLPGQGYPIQAPTAPAYHHQSAQNLSNMSRNTLLALSATPKPKYADGWVQVQQRKSYDSQQTSDAAWLAAQQQKRKSMPDYGGALYNNNHWLLQEAEQRRIEQLNRRSIPASKSMGKPLPDSIIQTLTERVQSKGIGDRKRFDSNGNYSQVNGNNIYQQQQQQKNVTNGSSINGNSSQGQEKVLSVSGKKKCSHCGDELGRGAAMIIESLLLFYHINCFKCCVCHVQLGDGLNGTDVRVRNHKLHCQNCYSSDDGIKFSCV

SEQ ID NO: 70 - DNA, 4581 bp, DROSOPHILA
tctggattttcttggcttggttggagagtatcgcatcgcactcgctttccagcttcttcatggtctccagttgggcctcgccacactcggattcttcgtcggcttcgatggatgcctgtagtcctccgtccaatcgacgttcgtctcgtaactccacagccgtgaccgtgagttccataaatgagaatcgatgatagccaaagtaagttgggttcttgtagggcagcgctttgcctgctcctggtcccagcttctcatccggtccactgaactggcggaaggaagagggtctcacaaacggcggcacatcgatcccattgtgatcgacactggtcggttggtagccctcatccggtggatcctttggtgggcgaggggtgttcgatggcttgttgctcaacttgggcttatcagacaggcggcgaagaattacaggttttatgaacaatcgaagtggattcttagacattttcgggagcacttttgttttaaagtaaatgtttttaaattttactgttgctcaaaacaggagatgtcattttcagaggttactgtgtaaaattgaaaatatacatctctacatcacgtatacgccctgatatcctaaagctttattctgtaaagtaaaatgtaagctttgtgtggaagtatcgactaactagaaatgttgaattcaatgatgtccaagcttttgccataatatattaggtataaagagtttgatgattgtcgatgaacttttcgggaggttcaaaccgatcagcaaactggttaaggccttcattctggttttattatttccacttaagagtgcacataatattttggcatacatttcggattgctgcactccggtttcccacgttccccgcgaagtcttctgatacggctgattatcgtgcaattatctttccaagattatcagcacggtttacgaacgagaggtgttgagcggcttcgaccgggatccgaaatttagtatccgtccggtgggccaggcactcggttgagtccccaagaaatctggttgggccgggaattcgcaatcacgaaacgatctttgtctctttggcgacttaattgcgtgtgataaaagatttatacgcccgcgagctcaagtagctttatcaaatactcggtcgctactttatcgctatgaagtgagtagtcttcgtattcttctggtttcgagatcgtaaaaaataagctaactgatgcgcaaacacaataaatgacaaaacattagcctcaaccaaatcccggttaagaaattgtatatttttacgacctttaattttgaaccaacatcttttctcgaggaacctccttggcgcttattgtttaacgacccgaacccatttatcaatcaatcaattcacctcaaaaacaacttttaattgctcccccaacagcgacgatataaaaaccgtgacggtttacccaaccacactggaattaacgaccccaacaaaatcagcgaatggcagtaacgatgattacgatcctcatcagcaccgcgagctgaagaatcccactacgtaagcatagattttcaacagtgctgagctcagagaatcattttcaggccccactttccccagaaactttcagacattcgcccacttcctgaaggcttccgtgggcactggcgtcctggccatgcccagtgccttcgcacacgcaggatatgtgaatggcacccttctcacgctgatcattggatcgctggccctctactgcctgcacattttggtgggtttttggtgggagtcacatagaaatttccttacttacttatatatacttgatttacagatcaaatgcatgtacatactgtgcaagcggcagcgggttccctacgtcagcttttcgcaggccatgaatctgggactcaaacaaggtccaccctggctgcgttgtttggcacccattgccgtgtaagtgaagtaactcggcaaaacaactgctatctataacttccctctatatattgattaactttctaagtgctttttaatgattactcaattgggtaatgaaaatcttatcttgttgttgatcaatagattttcactacgatttattgtatctttatctttacaatagcaccctaaaatatgggggcacatcccaatagtttgtttagtaattggtttacatcgcttatcaataatatcttgagggttttttttattcaattacttgcttaagttgcggaaggtttaccaatttacattttagccaagtgttgagtacctattgtgaaatttgtttcctagtggctttagcatttaacttaggcatgaggcatacttacttgttttatgttttatatattgtatgtaaatcatattttatagtgttatttttcatcagtccctttgtagatggcttcctggccttttaccacttcggcatctgttgcgtctacgtggttttcatagcggaaagcataaagcagctggtggatgagtatctggtggtctgggatgtgcgaatacacatgtgcatcatcattgtgccactcctgctgatatatagcataaagaatttaaagctactcgcgcctttttccagtgcagcaaatcttttgcttctagtgggtaagttttttgtttaatttgcatactttttctaaaaagaagtcattaagttccactttttaatttttaactaggtttcggcatcattttgtactacatctttgaggagctaccacccctaagtgaacgagatccttttgtggccgccggaaagttgcccaccttctttggcacagtgctctttgctctggaagcagtgggagtggtaagtcttaaaaataataaacatatcatatataatgcaatttaatcatttatcttctttgaaaagatcctggcaattgaggagaatatggccacgcccaaatcctttgtgggcccctgtggcattttgaatagtggcatgtccatagtgctgggcttgtatgttctgctcggattctttggctactggaaatatggcaatgagtcggagggcagtattacactgaatattccgcagtctgaaatgtgagttctcaatgctatttaagtgttagccacttaatgttgaattccgccttttagacccgctcaggtggtaaaggtattctttgccatcaccacttggatctcatatgccttgcagggctatgtgactgcccacatcctgtgggataaatacttggccaagcgcttcaaggaaaccaggcagacattctatgaactgattttcagagccataatcgtgctgctcacttgtaaggaaagaaacatttgatgaaatactagttttaatatgtttatatatttttagttggctgcgcggttgccattccggatctatcggtcttcctctccctggttggctccttttgcctttcgatcctgggcctcatcttccccgtgctactccagatctgcgtccagtacaccgagggctatggaccattccggataaagttgatcatcaatctgctgcttttgtgctttggcatctttggcggagtggtgggcacctatgttagcattttggacatcattgcggtgtacaagtaaacttcgaattcgttgtggttcaataaactcgaccttaatttacatttgatgatgtggctagaagatttattgcaattggccaatacacacacgcagtaaacaatgttggcttatggcctgcatagtcgaacacatgccaaagtcatgctgccaaagtagaccaaatatttttaattttaattaaaagcttagctcaggtcttggctcggtttggtggaaaatgtgcggggggtggaggtggttaaaacgcagtgcagtcgggaaagctggccagttgcaacgaactgtaattaaatgcaaccgcaattaacacaaaagcgccgcaggtcagcaagccagacacagaactccacaacctccttccttcgcaatccagctgcattttatttacaatgttttgctcacaggttactgacaacgctttcctgcatcctgcatcctgcgtcctgtcctctcccctccccccgtcgacaacaatcccccccttctacggcaggacctctttggctgtcttctgctggcatgaaggccacagagtgccggactgagccgcaatgaccgccggccctaagaagccagagagaagccaaatggacaaacgactggctgccacagcgagggcggatcgaaaagatcggattgaaatcatataaagtcgatttcaagtctagctattacattagtttctgcaagcaaactatcttaaattgagcagaagtcataagttatatccttttggctcctctactccatagttttacttcttattcatttattaatgaccttatattttattaagacttcacaatcttttctagagacccccgcttttgtctacagccccccgcttgccatccccccgaatgtgttgaaatgtcgtttgctttgtacgtttaattactcttttgacggaaataacacaacattcgtgtatttgaaattggcaacaaggaactgcaacagtcggcaagcaagtagcccagggggatggggtttggga

SEQ ID NO: 71 - DNA, 1511 bp, DROSOPHILA
actcggttgagtccccaagaaatctggttgggccgggaattcgcaatcacgaaacgatctttgtctctttggcgacttaattgcgtgtgataaaagatttatacgcccgcgagctcaagtagctttatcaaatactcggtcgctactttatcgctatgaacgacgatataaaaaccgtgacggtttacccaaccacactggaattaacgaccccaacaaaatcagcgaatggcagtaacgatgattacgatcctcatcagcaccgcgagctgaagaatcccactacaaactttcagacattcgcccacttcctgaaggcttccgtgggcactggcgtcctggccatgcccagtgccttcgcacacgcaggatatgtgaatggcacccttctcacgctgatcattggatcgctggccctctactgcctgcacattttgatcaaatgcatgtacatactgtgcaagcggcagcgggttccctacgtcagcttttcgcaggccatgaatctgggactcaaacaaggtccaccctggctgcgttgtttggcacccattgccgttccctttgtagatggcttcctggccttttaccacttcggcatctgttgcgtctacgtggttttcatagcggaaagcataaagcagctggtggatgagtatctggtggtctgggatgtgcgaatacacatgtgcatcatcattgtgccactcctgctgatatatagcataaagaatttaaagctactcgcgcctttttccagtgcagcaaatcttttgcttctagtgggtttcggcatcattttgtactacatctttgaggagctaccacccctaagtgaacgagatccttttgtggccgccggaaagttgcccaccttctttggcacagtgctctttgctctggaagcagtgggagtgatcctggcaattgaggagaatatggccacgcccaaatcctttgtgggcccctgtggcattttgaatagtggcatgtccatagtgctgggcttgtatgttctgctcggattctttggctactggaaatatggcaatgagtcggagggcagtattacactgaatattccgcagtctgaaatacccgctcaggtggtaaaggtattctttgccatcaccacttggatctcatatgccttgcagggctatgtgactgcccacatcctgtgggataaatacttggccaagcgcttcaaggaaaccaggcagacattctatgaactgattttcagagccataatcgtgctgctcacttttggctgcgcggttgccattccggatctatcggtcttcctctccctggttggctccttttgcctttcgatcctgggcctcatcttccccgtgctactccagatctgcgtccagtacaccgagggctatggaccattccggataaagttgatcatcaatctgctgcttttgtgctttggcatctttggcggagtggtgggcacctatgttagcattttggacatcattgcggtgtacaagtaa

SEQ ID NO: 72 - protein, 451 aa, DROSOPHILA
MNDDIKTVTVYPTTLELTTPTKSANGSNDDYDPHQHRELKNPTTNFQTFAHFLKASVGTGVLAMPSAFAHAGYVNGTLLTLIIGSLALYCLHILIKCMYILCKRQRVPYVSFSQAMNLGLKQGPPWLRCLAPIAVPFVDGFLAFYHFGICCVYVVFIAESIKQLVDEYLVVWDVRIHMCIIIVPLLLIYSIKNLKLLAPFSSAANLLLLVGFGIILYYIFEELPPLSERDPFVAAGKLPTFFGTVLFALEAVGVILAIEENMATPKSFVGPCGILNSGMSIVLGLYVLLGFFGYWKYGNESEGSITLNIPQSEIPAQVVKVFFAITTWISYALQGYVTAHILWDKYLAKRFKETRQTFYELIFRAIIVLLTFGCAVAIPDLSVFLSLVGSFCLSILGLIFPVLLQICVQYTEGYGPFRIKLIINLLLLCFGIFGGVVGTYVSILDIIAVYK

SEQ ID NO: 73 - DNA, 8189 bp, DROSOPHILA
gtgaaacccttgataccgcggcacagctccagcaaacgtgcctgttccttggcacacaccgcattcatgtcggccaacatcctcttggttttcttgaggtaaacaggcaccttgccgaaatccttgcggcagataaactgcggtaccaatccggaattgagtagatcgtgacgagctcccacgggagtgtctacataacgaggtggcgggggacagggaaccgtttgtccggcacatatcttgttgcgtttgatgaagttaggtaccattgccggctttttgccgccactgcccggtggtggtagtgggggcattggcggcatcttgggacacttgtgggtgttctctcgccgccatttgatgccctggctcttgcgcaaataggcgcacggtgggtcaatcggagtgtgagcacagcccatggtgcggtgggctgatttcttggcctctgtcaggacgcgggttccatcgttctggaggataatcgatagcttcttgtcctcctcgttaaagcgttcgcgaagtctcttggcatacttggctgccctctccacaacagctgcaaaattgcttaaagttaggtgggaggtaacgatttttagtacgaatccctacgatttttgtagacaaaaattgattccttaggtccttgggccttcacaaagtcctgctcgcactcgagaatattctcatcgtgatgggtgatataaaccagggacattgtaatacaaatatgtaaggatgaaggtagggaactcgaaagcgtgctagtttactgactattcgtttaataataacagtctgtttggtggagactcctgcgttgccaagtacctctgcgttgacttggattgatttaactcgaaacaaaggttgctataggatttccagaataaacagaaggcaacatcgtttcctggtgatattgtaatattcagatattttctagcaatcggaattcgatatttgttctggatcttttaggagaacacacaaaattggtattattgtatatatattttttaaagcacaaaatcaagctacagcttgtgtcgcacacgagttacattattaaattgtaaataatttgttaccatataaaattcgtgtatataaatatttcgcttgcgtatataaaataattgtttgcattgtaaaattagcactaagatcgtttgtcatggttacattttgattccgaagcttaacaataaacatggaagtgttggaagcacgatttaaatacgaatacgacatagattcagatacgggttacagattacagattcaaaacagcacacagaaatgctggtgccgtcttacaagctagatatgtggtttaatgaataatgaatttgacgatgttaacgaatgtaaaagccactcgaaatttgcactgtttttggatggggtcagctctcctcagctgaccaccaataggcactacgaaaatctcggatcagcaacatggtccttcctttgctattgcacgttgacaagtagatgtactggagatatgatttcatttagctgaaccagcagtttcacttgttgccgctgctctcgcgctcctctcgaatcctcttaaatgcctccgtcttgacaaagtccacggatctatagaccacgctgctaggcactggcgctcgagctccgccagcttcgacgcctgcgaatcgcattccactagctccatttccgccttgtgagtacagattccccacactcatgctggatcgatttagcaatggcggtttgttggtcacatccagatcaaagtactgcagcttgtgctcagtctgcgccgccgcttgctgcttgggagcagctgctgccgtcaagctcatcatggcagccgctgcggaggcggtgcgctgatgttgtaccgacatgctgccgggactgttcggatgatgccgatgctgttggcgaggcagggtgcgggtctcgtgaaagaaggcgttggctgccgccggggagtgtacatccgtttcatgcggcagcaccattgagagaggggcaccggaggaacgtcgcgttgccggcgacatggtagccgaattgcccaactaaaaagaagtcattagtaaattgaatatgggtgtgcacaacgtttgtcactcaccttataggcattcggtttgcacttcctgtccacactgggcggtccaatgggctgctgcagttgggctgcacccagtttattggttaactgatctacgcccaccgggggctttgcaggaaactcctccggcggtttgtcctctacaactggcaatccacccgccacctttggcttaagtttccggttaaccggcgggcagtccgcctgctccatgaagtcgtatcgaaaaacattgccctccatctttgtgggagctgcattggtgtagcagtgtcgaggcaatgtgcgcgcactggtgggcgatgatgcgactgcctgtgcctcacccatcaggccgggattcgctgccgctgaaattgcggccactgcacccagatcggccgccatgagattcggtgtggatgctgcaatgggattggaattgtgcgggctggtgactggtcgctcgcccagcagctggttgacgttgtagtaaggctgctggtgggaccttggaatgtcatagctttcctcgatgaaagcggagtgcgcgttgcggcgggccacaatggccggcgaagtattttccgtatccgacagctgcggcagatcgcgaggaattctgtcaatgcgcaggatgatttagtaggccgtttaaaattgaattgagtgtgtgttaactcacttttcattctccttaaagtccaatatgagattatttttgttcttcagcaccttggccagcttatccagcgttccctggtcaccagcctctggcagagatgctgctcctgctagcttggaactcttttcagctggtggcacgatcgctcctccttcctcgggcattttagagaatcgctgcgagtacgttagcacgaatgattcgttttcaatggaactatccgaaggtcgggtactgcgatctgtgagaaatctttgtttactacgagaattcgctttgatatttgccttttgagtacttacccacattctcgcgcagtggcaaaggatgagcccactcatcgtcatcggtgaaaacgctttccgaatcggagtcggagcgttgtttactagcattgttattggccaattgttgctgaaaggccaacatgataattaattataaataatgcttgacgcgcatcgttatcgctatcaacttaccagactcaaattggttatcttcggtgagtaggattgatcgttggtcagatttagacctatgttattatgactacgcggcgtatcgtagaacttgggatccaagttgttcaacggcgtggtggggttgtttggtatggccaaatctgcgccgggcagtggaacgccgggcaggaatctcgggctgcccgagaagcactcgctgatgggtatgtacggtccggatgcggtgctcaaagcgggtgaagcctgtacgctgctgtgttgctgggcagctgcctccgccagggtctgctgcgtgagcaccagatgctccggcaatttgcgcactactccgttggcactgaccgccaagcgagcagcttgttgctgctgctgctgcagttgctcggcggctgcagctgccgcctgagcttggatcaaagcactgtggtttagataaagagccgtggccggcgatggaggcggttgctgctgggcagccgagagcagttcctgctgatcgaaattggcatcgcagagcatcgtctcgcgattgctgtactccgtgttgacatacaccgagtctgagttattgttgccggcattcgagggcatcggttgctcttcaatgaccgccggtcgtcgcagctgggcagatcctccagcatttgggaccgaagcctgaggcgctgtggttccggccgacgagtgcaacgatgtggtggtcgtattttgagtggagttgcttagaccgccactggagctcgtgtgttgggtgcggttttcgtctgggtgttgcaagaaaagaaaaacttaagaaggggttctttggacatgggcttgcggacactcacctgcacccacagctcctaatggcaactcattcgattgctttgtgtcgtgtaggtgacacacctggcagatgcagttcacccagtcgcgcatatccgcctccgtctcagcagccaggtagtaggtgcgcttgggcgtcttgatatcgaacatgtactgaaacttctgcttgcgattctccagccgcaggccacagtccacctgctcgcactgatccaaatcgataacgcccttcagcttgcggcagttgtggtcggtgtagtattcgaggcagaactgctccggtatctcgccctgcttcagcgtgaagtagcgacgcctccagcgctacaaagataatttggaaacaaggcgttaagagttgcaacgaggcgtacagttggaaaagcaatagtgatttctcctatgccattacacacacaagattccttcatagcgacatatgttaaatgggtcgtggaattgcaaatatcacacgataaactgtctttgtttttttgtagcaaaacaattcaacaaagtcaaaaattcccccaaaatgagatttgtagatattgcttcttttgcaaagagtctgagaatattaaacaagattacactgttacaaattgtactaagatgcctgaatagtgatgactaacttcatcaggtagttactcatcagggcgaagagcaaatgaacaatcttgatgcttacaatatcatttacgcatcaaaaatgtaattttcctagagatctgataatgcggtatttatgattagaatatagtgaatcattagcaaattttctagaatttgcgacacgccaaggctttctttaagtctatctctaattatactatatcttgcagtagtttagctatatataaacgtactacgcgagtgtaccgatgtctccgttctggattaagatacccttactgagcgatggactccggttgttgatatgagggtagggtacggctgatcagctcaacgactgagtacactatcactgctggtgagtaagcgggtgatgaagcccgagtcaacagagactgcagcggcgctgcttttccgcgaatcatattttgcattggcattttcttgggtaatcagcagacacacacacagaaataacacccccgcccacgttaccgttaagcggttaagaaattaacagctgagaggttcgggaacccgctgaaaacgtaaaactccagctgataatggatggtttttttcggactgtataatatcaagcttaattgaattataaacaataaacataatgccgcacacaggccagaaattggcaccccgaggcgctggaaatacgcagctcattttctcgaggcatcattagagtttgtttatacaatggcgctcaagatattagaaacgcaaacgaaaatgtgcgggcaaaggttctatttttaaaatgtttctaaatttgtttacttttaacgcgccggaaagggttgtttttaaaattagatagctgctgtaaacctttacaacaaaatattccatattttgtacgaagtttgatgtcaagaggttagttatttaatttatattgtataatcttaagcagttttcaaaatagtgtgattgaatactaccattttggacgctattgcacgcctcaacataagcaaacaaattgagtacagtgaaaccataaagtgggtttgctgtaactgaaaattctgtgctgcagaccttttgatcaacggtttgggtgttcttggaactgtcgtatccattataagtggtttcaaatgaacgctctagagatgggcacactacagagtgtcgtgtcacgaactcctgagggagaacttctatattttagctttactagtttaaaatccagtaaaatttatttgtctgagcaaatcattctatttatatttaataatataagcaaacatacttttcaactattcatcccctaaatgtttaaaaaataattaatccaaaaatctaataagtcatacattatgatggactgtaaataaaaattattatgctgacactacaacagcgcatctctagcataggcaaaatcaacaacaacaaggagctggaaagacaagtgcgtcattgtttttttggtcatcgtcggtagtttatgttgctgttgttgcacattgttttgtgcttgatccggcttatcgtccgtgcacataaaaaagcaaaaacaagcacatatgcgcataaaaaacatgcacacacgaaatacggggcaagtaaatttgattaaacgcaacagttggcggaaatttaatacacgaacggctccctaaagtaaacattaaacgaaaaattaattaagcgtaaatttagaccagggcaaaagaaaaaaacacgttcccacgccaaaagcaaacataaacagaaagaaactgggtgacggagagggtggtggggagagagacagagagagagagagggaaaaacgcagaggaagccatcgtaaattcattcacattttgcaatttctgctgcggttttcaacttgtttgcattccaatcaactggaatactggaattgcaatccctcggcttaataatgaattaaatcataccacaaacaacaacgccaaacaaacccacacacactgaggcaggcaccaatacaggcttagcgtaattgtaaaaaaatgccacttccattatccatcgtttttttttatcattttcgtgagtcaatcgatggacaaagattgcggtatttctcttccggcttcaagtttaccgttagccaattgcgactctcttttctttgcacatttcactaatcagtggacatttctgatttgattggatcagaattttcattttgatttcgttttgagctggggtttccaggaaaattccttagcacttgcacacacgcacacacgctcaggttttcgaaagcctacgtttttccattttcggaaacttactgctcgccaaatgcgcttggtgggcggcgacttaattagccagccctcgtagaaagtgcgatccattattttgcagcgctcgacgcaatttacttcgatttatttcactccactccgcgcacaccaactagaggtgggcctcacgcttgcgatagatcttccgaggcaatatcgaataagtattcgataggcttaagctaagtctaagatatatcgaaataaaagatgcgaacgcttatattcggcggaaagttattattatttatatatttgtttggtgtaagccccattgcttcaaaacttgaacttagtgtaatataccgtttgcttcaaattgttttagattagtgtgaccgtagttgacattacccaacactggcactatttataattttgagttgtaaaaattaagtatttacaatcttgtaaaaaacaaaacaaaaccttttttggttgccatatgaaacgtgttcaatctagtattttaaaaataagtccacaaatagcccatataaaatatgtatacatatttcaaaaaacacaagtatttctttgtttgaaaacaagaatttgcagataacataagtatttacctaataaatcagcataataaatccaaacaaaagctaataactaaaatcttaaaaactttaaatgcaaacgaagtatagttttacaaatacgttttattctgccgtgtcaagcgtatgcctagaacatacagattatccatgtagaatagcaatttcttccacgacgccgcacagcagagcacgaccactacccagatctcaggcggaacctgcgccacgccggaatcctgctgcagccagagcttacttgtccttgctgtcgcccttgccaccacggatcctaccggtacgacgggcagcgatgagaccgaccttgcgaccggcggatgtgcctcgcttgacggtggaggccttaccaatgtgctgatggttaccaccaccgtgaggatgctccacggggttcatggccacaccacgcaccttaggccagctgttgcgcttcaccttgtacttgtggtaggcacgaccggccttcaggatgggcttgtcgatacgaccgccgccggcgacgatgccaaccatggcgcggttggccgagggcacgaccttcttggcgcc

SEQ ID NO: 74 - DNA, 3266 bp, DROSOPHILA
cgcaagcgtgaggcccacctctagttggtgtgcgcggagtggagtgaaataaatcgaagtaaattgcgtcgagcgctgcaaaataatggatcgcactttctacgagggctggctaattaagtcgccgcccaccaagcgcatttggcgagcacgctggaggcgtcgctacttcacgctgaagcagggcgagataccggagcagttctgcctcgaatactacaccgaccacaactgccgcaagctgaagggcgttatcgatttggatcagtgcgagcaggtggactgtggcctgcggctggagaatcgcaagcagaagtttcagtacatgttcgatatcaagacgcccaagcgcacctactacctggctgctgagacggaggcggatatgcgcgactgggtgaactgcatctgccaggtgtgtcacctacacgacacaaagcaatcgaatgagttgccattaggagctgtgggtgcagacgaaaaccgcacccaacacacgagctccagtggcggtctaagcaactccactcaaaatacgaccaccacatcgttgcactcgtcggccggaaccacagcgcctcaggcttcggtcccaaatgctggaggatctgcccagctgcgacgaccggcggtcattgaagagcaaccgatgccctcgaatgccggcaacaataactcagactcggtgtatgtcaacacggagtacagcaatcgcgagacgatgctctgcgatgccaatttcgatcagcaggaactgctctcggctgcccagcagcaaccgcctccatcgccggccacggctctttatctaaaccacagtgctttgatccaagctcaggcggcagctgcagccgccgagcaactgcagcagcagcagcaacaagctgctcgcttggcggtcagtgccaacggagtagtgcgcaaattgccggagcatctggtgctcacgcagcagaccctggcggaggcagctgcccagcaacacagcagcgtacaggcttcacccgctttgagcaccgcatccggaccgtacatacccatcagcgagtgcttctcgggcagcccgagattcctgcccggcgttccactgcccggcgcagatttggccataccaaacaaccccaccacgccgttgaacaacttggatcccaagttctacgatacgccgcgtagtcataataacataggtctaaatctgaccaacgatcaatcctactcaccgaagataaccaatttgagtctgcaacaattggccaataacaatgctagtaaacaacgctccgactccgattcggaaagcgttttcaccgatgacgatgagtgggctcatcctttgccactgcgcgagaatgtggatcgcagtacccgaccttcggatagttccattgaaaacgaatcattcgtgctaacgtactcgcagcgattctctaaaatgcccgaggaaggaggagcgatcgtgccaccagctgaaaagagttccaagctagcaggagcagcatctctgccagaggctggtgaccagggaacgctggataagctggccaaggtgctgaagaacaaaaataatctcatattggactttaaggagaatgaaaaaattcctcgcgatctgccgcagctgtcggatacggaaaatacttcgccggccattgtggcccgccgcaacgcgcactccgctttcatcgaggaaagctatgacattccaaggtcccaccagcagccttactacaacgtcaaccagctgctgggcgagcgaccagtcaccagcccgcacaattccaatcccattgcagcatccacaccgaatctcatggcggccgatctgggtgcagtggccgcaatttcagcggcagcgaatcccggcctgatgggtgaggcacaggcagtcgcatcatcgcccaccagtgcgcgcacattgcctcgacactgctacaccaatgcagctcccacaaagatggagggcaatgtttttcgatacgacttcatggagcaggcggactgcccgccggttaaccggaaacttaagccaaaggtggcgggtggattgccagttgtagaggacaaaccgccggaggagtttcctgcaaagcccccggtgggcgtagatcagttaaccaataaactgggtgcagcccaactgcagcagcccattggaccgcccagtgtggacaggaagtgcaaaccgaatgcctataagttgggcaattcggctaccatgtcgccggcaacgcgacgttcctccggtgcccctctctcaatggtgctgccgcatgaaacggatgtacactccccggcggcagccaacgccttctttcacgagacccgcaccctgcctcgccaacagcatcggcatcatccgaacagtcccggcagcatgtcggtacaacatcagcgcaccgcctccgcagcggctgccatgatgagcttgacggcagcagctgctcccaagcagcaagcggcggcgcagactgagcacaagctgcagtactttgatctggatgtgaccaacaaaccgccattgctaaatcgatccagcatgagtgtggggaatctgtactcacaaggcggaaatggagctagtggaatgcgattcgcaggcgtcgaagctggcggagctcgagcgccagtgcctagcagcgtggtctatagatccgtggactttgtcaagacggaggcatttaagaggattcgagaggagcgcgagagcagcggcaacaagtgaaactgctggttcagctaaatgaaatcatatctccagtacatctacttgtcaacgtgcaatagcaaaggaaggaccatgttgctgatccgagattttcgtagtgcctattggtggtcagctgaggagagctgaccccatccaaaaacagtgcaaatttcgagtggcttttacattcgttaacatcgtcaaattcattattcattaaaccacatatctagcttgtaagacggcaccagcatttctgtgtgctgttttgaatctgtaatctgtaacccgtatctgaatctatgtcgtattcgtatttaaatcgtgcttccaacacttccatgtttattgttaagcttcggaatcaaaatgtaaccatgacaaacgatcttagtgctaattttacaatgcaaacaattattttatatacgcaagcgaaatatttatatacacgaattttatatggtaacaaattatttacaatttaataatgtaactcgtgtgcgacacaagctgtagcttgattttgtgctttaaaaaatatatatacaataatacc

SEQ ID NO: 75 - protein, 878 aa, DROSOPHILA
MDRTFYEGWLIKSPPTKRIWRARWRRRYFTLKQGEIPEQFCLEYYTDHNCRKLKGVIDLDQCEQVDCGLRLENRKQKFQYMFDIKTPKRTYYLAAETEADMRDWVNCICQVCHLHDTKQSNELPLGAVGADENRTQHTSSSGGLSNSTQNTTTTSLHSSAGTTAPQASVPNAGGSAQLRRPAVIEEQPMPSNAGNNNSDSVYVNTEYSNRETMLCDANFDQQELLSAAQQQPPPSPATALYLNHSALIQAQAAAAAAEQLQQQQQQAARLAVSANGVVRKLPEHLVLTQQTLAEAAAQQHSSVQASPALSTASGPYIPISECFSGSPRFLPGVPLPGADLAIPNNPTTPLNNLDPKFYDTPRSHNNIGLNLTNDQSYSPKITNLSLQQLANNNASKQRSDSDSESVFTDDDEWAHPLPLRENVDRSTRPSDSSIENESFVLTYSQRFSKMPEEGGAIVPPAEKSSKLAGAASLPEAGDQGTLDKLAKVLKNKNNLILDFKENEKIPRDLPQLSDTENTSPAIVARRNAHSAFIEESYDIPRSHQQPYYNVNQLLGERPVTSPHNSNPIAASTPNLMAADLGAVAAISAAANPGLMGEAQAVASSPTSARTLPRHCYTNAAPTKMEGNVFRYDFMEQADCPPVNRKLKPKVAGGLPVVEDKPPEEFPAKPPVGVDQLTNKLGAAQLQQPIGPPSVDRKCKPNAYKLGNSATMSPATRRSSGAPLSMVLPHETDVHSPAAANAFFHETRTLPRQQHRHHPNSPGSMSVQHQRTASAAAAMMSLTAAAAPKQQAAAQTEHKLQYFDLDVTNKPPLLNRSSMSVGNLYSQGGNGASGMRFAGVEAGGARAPVPSSVVYRSVDFVKTEAFKRIREERESSGNK

SEQ ID NO: 76 - DNA, 12808 bp, DROSOPHILA
tctaccacaattttttgtggtcatggtactgaggtacaccaaaatgaaaaataacaaacttaactaatctaactgacaaatggcaaatgattgtttgctaaaaatcaaccttctagcctttacagtttctgaggacagacagacagttcgaatcggctggtgatcctgatcaggaatgtaaatactcggaaacgcttccttctgcctgtaaaatatatttcaaagtatttagtatacccttcttccttacgagttattacgagtaatacgtgtattgatttatttacgagtattaatattatgaatattccctattcaagtgtcactttattttataaaagccggcgctctgttcaaaggatattttagttgaataaaaaataatttgtcaacccaatggtgatatcggaacttatgtatgtgggaggtgcggaaggattacatccttaagcggattttttgttggttcaaaacttttttcattaggctagccgtaaaatatatgtctatgtagaattaaaaaagaaagccgaatcttacaaactggttatcaataaaagggaaactaaattatatattatctatgaaaacagcgaagctaagatttctttccattaattaggtagtaattctcagactatgacagctttgtactataaagatacatttctttaaagttgatttttgatcgttcctataacagttgcatatatgtatgttgtaggcatccaattctgcctgttccgatttatacgagtatgctaccaatttaaactactacgaactaaaaggtataaggcggactatatcgacctggctgtttttactgataaagtgtatacaaatatattttttccagatccagctgctagcaaaaggcgcttattggaatcatttattttgcttatttgcaaaagaaaagattacaatttgtttataaatttgcatataacgaacgactcttactcccactataaactaaagggtaaaaaaactaatacttttaccttctttttcttattttattttgcactaatcgtacttattgttaatgattttttgtttgacttagaaataacgcaatgaccaagtctagaatgttgatgagaaagtgaaaaacagtccgcgttgtaccgcaaactctctcactatatttttgaaccttcctttgtttctaatgatatgcgatgagacttaagttaggtattttctctatagcatctacaaaattcatcaaattgattgtgattgaaaaggttagcattgatctccctgaagttatctaggaaaagccgctaattacagtggactccgttttgtttctgccgatacgtcgatataaatttgatgcatcccagacgctggatggtgctcctcgtggttcagcactcgtcgtctgtgactgtgcggcagctggcgcggaactcgctcatcggcgtcgcattagccgtagatggcgtcataagtggcgccccctggaaggatatggccagcggcagggccgaaggggcgcacaggctgagagcgccgcgtccttctgtcacagaccgatagcgcagcgggcggccggaactgcaatgggatggcaataactacgttattggctgtgccattttaagccatttcgagtcgattgggttttaaggcagaagtcagtgacagaaaagtgctctcgtcttggtaaatgtcctatacttttcaatacgtttttaattcgaacacaaggcattttaaataaatttgacattcgacacagtttgtttttaatgcttacgaaatttatgtcttacaatgtgtggcgattctagcaagtctttaaaatagataaaagtcgtattacaaagattcccattcattctgcatattaaatacaaacaatcgaacttattcttcctttaatatattttgagagcgtttgatttcctatcgctgcttattcattcgctgccacaaccaccccgagttcgtctcttgtctggattcctctggtaaatcaaaaccccaaaaatcaatcatacgtcacgttgcacattaattcccagcagaatgcactcttagagcaataaattgcatccctgtgtcactgtaacctgcagcgacgaattttagttcgaggtgccttcgtcggttgggagaggcaatttcttactgtggcactggatccgcgtctgggctgcagtgacttctcactgctctactactcaccgtttgcagttgcacttgagcaggcggataaaggccgcccggaacgtgcgattgaatatggtgtagatgatgggattgatcgtcgaggagacatagccaagccaaaggcaggtattcaccacgtgctccggcacttggcactcggggcatgcggcaaatataatgttcaagatgaagaaaggcgaccagcacagaacgaaggtgaaaaacaccaatccgagcaccttggtggccttctgctccgtagcaacggcattggccgacaagctgtttcgtttactgcgattgtttagaaaactgtaaggcaaaagtggataaaagatattagtagtaccaaaaagttaagccatgatgattattgtttcattattttctcatctagtgagagcgcgagaaagtcacatctatcagaaacccatagttatataaacaagagagaacgttatagtcaagttcctcgactgtcagatacccgttactcagctagtgtaggcaacatatgagctgctgagtctatgtccctgcatgtttaatctcaacttctagtttttatagtttccgagatatcgacttccatactttcacttccatacagacggacatggacagatcgaatcggccattgatgctgatcaagaattgtatggtcggatcgaattctcctacctggtacatacttttcaagaaatctattatataaaaagtcgctgttttatttatttatttgttatttaaaaactcacgtatgaaagttgttgagcaattgatatgtccattagaggacaactatccctttaaatggaagtagtcagatgctgtttagttccatgaaaccaataatgtataatgtaatgtataataataaataatgccaaaagctcgatggagattgtagtattcatatcatattcattcatatcagtgttggatcacctagtgatccaaatcaagaatattcatatatacttcaaagggtcggaacatgtcgcacatcaaacagctatatcaataacaccatctaatttgtcagcttcttcacttgattagtacagtatgtagtccctgctaatccatttcttgaactcctcatcttgtaatcatcttgtatttaattgtaagtacatttatggcactttaataactcatagtaaaagaagatgttaaaaaattgaccaataaataatccgtttgcctgtcgtttgcgtcaaaaatggcctaaaacgggtttttgattcaaataaaaaaagacacaatataaaaagttacacttgaccacagttttggaaaatgtaataatggattttttgttaataatatagctcgtaatccattgatcctttatgtagttaagtcgtgatcgattcaagaaaaattataagtatacgatcttaataatggatggccacttaatattcccgttcgaaaaataagatagaaaatattatttattattggacattatggtcattgttatttattggaaacctcatcaaccgttaagcgattgaccaccaaaataatttatggttagagttttactcttacttattactacgttatcctcagtcgccatcattacttaccgcaaattgagggtgggcgtggcaacgcggttgaaggcaaatttaaagggccgcactttgttgcgctgtggttcttccggttttaaagccgtcggcttcaccttttgcaccatgtgattgcctccagctgcctgactttggttcagtatcggtccctggatggttgcgattttcatcaagctcgtgcctccaagagatgagttgctcgttctgccggctgatgagccattgccaccagcccccacctccgtcgctccaacagttctacctccatttccacctacattggtcgggtaacccaattgtggctgggagatggtgacacgcacagatgcccgtcgatttggatggctactgggtggtaccaaagaaagtcttaaatgtatggccagtctgaaatcaatactcaaattgtaatttactaaactcagaatggccactttcgaataattttccaacttaaaaagcaatgtcgatggtttgaagattagaacgttggtaacgagccgacaaggcagttcctttttatacccgttactcgtagagtaaaagcaaagacactagaatattctagtgtctttggtaaaagggtatactagattcgttgaaaagtatgtaacaggcagaaggaagcttttccgaccatagatccaagatctcttgttttcactatgtttttggttgattgaacattagaaagagtacaggttacggggtacaggttaaataattttacataagtttttaaaggagttgaaaaaattatttttgaaacgctcttcccattctaacaacagatttgacgatgaaaggcaaataaacaaatcttttaaattggtttctatgtttaagaagtaacttcttttactactgagcgaatgtaagatataagatataaggcacttgatttctgtgtctattacgaaactaccaccaaacacagcagttgacaacatttttagtgtaatgatgggtacggtgcccttcaggagccaaatgtaatgctataaagttgcttcaatgggggacctctgagctgcccataataaaatctgatctgaaattcagtgaattcagagaaaaggtcttattagtatatggaactttgccaatctaagaggccgtatcaccgatccaacgtacataggtgatgaaagagtaaaaagttctaaaataatcatgcttagttaataacttttatatttttatatacaactatttaagccgttagttagttgaattactatatgattttttagcgaagtatgttaaagatattttaaatgcccggttctacaaaaccatcaagtaagcgaccacatctgacccttaggaacaggtcagcagcgataaactatttagaagaaaaactcaaatcgaaatggccaaaagtttttcaatttctgagtggcgcctggagaaatggtaggaaacaaaatatgagaaatgtccaacttataatttgtaaagaaaacacctttattttttgtacgagtagcacaggggaaaaacttgtcatatttcccatgggtagtttggccggggaccccttcctcattagaaattcatacacttttatgaagttttttgcgacatacaaaaaatgccaaaaaagcgaagctcttattcgttcattacctcttgtccttggtccttaggtcgactgattttatcgctctattttattaatattgtgagacgtgcaggcttgtgaactactatctcacgtggcatatgatctaaatcgctcatgaattctgaattcctttatgattcctttcctttacgaattcctttatgattatgatttctaaatcaggatttctcagtagcttacataatcataatcttacacaacagatgataatgaagcatttcaacgataagattacttgatgaaaaacatttgtttagtttagttgaacagaacttttaaaaaatatactttgcccgacattatatattatattatgctagattcgtattacttgtctagcgaatttctatcgataaacaacttaagagattttttttttagctttctattatttgagttaaaaacctttcgcccaccctcagtgccatcgtggactctcgccttgggaattatctaatcataatttgcagtaagtcaccaccacgtaattatgtcttcaggtgttttcctattacctgtccattaggtttggatagccgccgtgtttgcgccagaaggagctcgaacgcgacgtgctggtggagtggcagctcgaggcgggagacgacgacgagtgccgaaagatgccggcgccagagaaccggaagctgctgtgggcagtgccagtcgtcctgcgcccacttcctgcggctccgctagtcccgttcacgacattacggaaactaaccgtgcccatgctcctgctgctcgccgttcgctgttgcatcaaaggtcgttcggcgggctctacgccactccttctgctaggagctccaccctcctccatctctccttcagtgttgaagttgcgattgccgtcgcccattgataggaatttgttattgctgccagaaaagctactgaacatctgcaactgctgctggctgtgctgcggccttagggtgaagcgtccacccaacctggaaacatgaacgtaaaagcatcatggatgcactcagaaaaatgtataatgccttctgaaaaatctattagttaagcttttgacgattaggggactttctttagtgtacagatttttagagcatgagggatagcgggataggcgatgcttgattgagtaagggctaattcgttcacttggtcgagtttcgattggccaatcaatgggacaaattgctgtgtttaaaagaagaagcgagagatgatggaagagcgagttcttaaccggaaatttagtagtcatctacagaacgattgtgtgcagatttttttcttgccagtttacttttggctaagtaatgggtatatgacaggcgagaaactctctttttatattatttcagtatgtttacaattacgatttttcttggaaattaactgggagccatataacgagtatgaaattacctgcgaaaaagttcactttccgggtgctcggcggcaaatcgcgctttcttccggaggaggggaatcgtcaatgcgtatgtggtaaccatcatcagcatgggtatataaaaagctaccagagatccaaacacgaaaaaggcgcgattgttgataacgcatatgttaggctcgggcattatgttcttctcattgaccagacctaaatgcacaggaaatagacttttgtagccacgtttcaattcatccgttctgtatcttaccaagaacggttattgaactggataccatcatggccattacccaaacaatggctatctttataccagtcaatcgtttcgtagatcgatgcctcgagcccaatggatttcttattcccatatagcgtcccaaactgatgaagcacatgtgcaatatactggatgagcaggccagtacgtcacacgtcacataaatgttgcaccaggtaaagccaagtggccaataccctgaaaaacaaatatctatgagttttatatgtgaatctcaaaaaaaatttcatcttatttggtgagagtccgagttatatactgggaacacgcaaacttctaaccaaccaaacgtgtgttgttttaagaattttttaggcgcaattgcttaacagacagacccttaaccttgacatcaatatacagatgatattcaatcaagcggatgctcttaatggaaaaaacactaataactcgaaaggactcctgccgcgagtcgatttcagttaattggtacaaattatgcttaatgacagccgaatcgtctagtgaccatgacgcaaaatatagttactttataggcttggaagcaccgtattttgcttgttacatatttctaacgaatcaagtgtacccttttatcaaggaccaacataatcaacgaatatatggcactttgcttttcgtttcaacaaatttcaaaagaaattgggataaacaataatgaaaataaaacaagatttcaaaagtgtgtgcgtggcagtttttcgcagtatgtggacgttagtgtgggcatggtaacatcagctaacaaacttgcgctgtgccaacgcctctcaaatatctagcttttatatttcctgagatcctgacgtttatacggatggacggacaccctggtcggaaaagcttccttttacctgttacatacttttcaataaatctggtatacccttttactctacgattaacgggtataaatacatatataagagagagattttgactgcacgtattacgtttgtattaatttcatcaaaaaattcgtttggtaagtgtattattgctccgtagaccatctctacagaaaatgatttgagatcctccttggaacgtcacaatgtagagtttcattctcatggcagcggattcgttgaagtttacttgtagtagttccttgcggttaatttaaattctcgtagtcagttgcatatgcttcctttatttgcgttagacttacagacgttggtgattgcacattgcctggaaaaggcatgtactgcactacattatcagataatttgatatgtgcgacttcggtcgtaaactgcgaaatgtatccaagatgaccaagttgccttattgatttcttcaggacgttgtctaaaatcataaacgagcgacttatgctccgtgcttaatgcaaagaaaaccaactggctgccataatgggccaactcatcaaatgcaacacattcaagggccagttgtgccttaggacatggatgagccaatagcagctgccacacttcgcttccgtgcattgtgtccattcggtgtaaaaagagcggttgtaggaatatcacatttaggcaattgtatctgtgtagctgcttttaaaaatagtggatatgggcaattggatgtagttatagcatagactgagtaggatcaccatcctccattctttttactagtcatatgcataaatggaccaaaaagtcatttgtgcttttgcggttaaaagtttgtctcgagataaacgttgcgggcgattagagattgggcttccggttgtttcgctgtagtgtttgtacagtaacgaccagaaattcttgtaaaatctgtataaacattcaatggtggacacagagtgttcgaccaacaagctggtgtcgacctatcctgtcgaaacatacctattgtggcaacgatcaatttttggcgagttaacctcgacgaggagataataatgggaaaattgtgctccaatgatggctatcttgatgtcagtcacgatgaacggccagagaagacaacgtcggagtccaatgactaggatgtcttttccgcttgctgtatacaatataagatcgaattgcatggggaataatagagaccacaagtatgtgaagggggttttctgataacgtttgtgtaagatctttgccgtagtcggtttttctttcacagtccatcactggagcgcgatgcattatgggaccttcccttggaagctaaatttgcaaaacggtaatgataatggcaaaactccaatatcattatcctgccagatagttaggatcggacaaacgttctagggcatttcagcaagaaacggcgttacatctcatgtatcatcatctcataaggtattgatttagatgagagttagatgggtaagtatattttattagacatgattctctatccaacgacaggtctttctaaagagaaaggataaagatcccaggctgggtgtgcgcctaacgagcatttgatagccacagtattcggcttatgcattctcactagctatggattggatattttggcgatcaaaaatatttatgttttagttaccgtttctttgtaacgttacggatgaacgaagtgtatatgtctacatgtaatgtatatactttatatggtcgaaaattatcccttttatcttttactctaggtatgcatctgagagattatgttcgttcttggcaatagatggaaacctcttacaagctacaacaaataaaaagcaagtgaaagtttggaactttttgtttaatgcaatgaaggcaaagtgtgtttttttcgaaaaagtccactgaaattgccctccccttctctgccggaacactaagagcgttaaagtttcggtacatttgcatccgtcttcatttcgtttttgccaattttgccaaacagcagcagaaagcagaaatcagttgctattttgcaaaaaatagccactatgctgcactattcataaccacactgggagaaattacattttttttgaagtttcttaaaaaaagataataatggaaacgcacaattttaaattataaatacgaacaataaaactaacttaatttcttttgaaggcttttgggttgcgttgggtaggaaaacatcagcatgtcatagggagattgggggatcattgctctatagggtcgcaaacgtttcgccctgttatataatttttattgtatatatacaataaaatacaatatatacgctcagaaacacaccaatgaatgaattatcgaatacaaaaattttacaattaaaattttttttcactgacataatttatgcttaggtatatttttcttagtgaaactccgctgcatttcgctaagagtgtaattgagctcaagaggaagcagccaacaaggccaacaagtttatccattacaatggaccaggccggctatgcataaaaggtgtcgcacacttatattgacacttttttgatttttaaatttaaccatttagtttaaactatctttcagatctaagcaaattgttttatgtactatattttacttgccaatctgtattcaaaggtgagcacgcacttacccaaaaaagctggtatcgcgcccatgggcatcacaaacaaactgaccaggagatcggctatagccagggaaaacaggaagtagttagtcacattctgcagtttccggtccaaggcaacggctaggcacacaaggatattacccaggccacccgcgaagataaagaacaccacgaacaggaataggaaatcgtagccgtggggactgtagtccagaaagctctttgttaccgcgaactcggtggccatgtctgcagtggaggccgtggaggtcgtgttcagggctgtaaggttcggcaaaaacatgtctaagctagtgttggtgacattcatgatgcccaggaatccgtgatcgggctccattagctcgcttagattaaggaaggaccagagtccatcgcgctctgcgcccagttcgatttgaaaggcctgcagaaggctgtcgttggagaagctctcctccgcgcttcccacctcccgcagtggctccctctcgagttgttgcaaatgacaaagcaatagttcatgggcctggcccagcttacattgcaacaccatgcctccttcatcgcagctcgaactatcactaagtttatcactagcataatcactgagtgccccgttgattgccagtcgaatgtgctcatacgcctcgtacggccatcgcaacagtcgcgccttcagcctcaaagtgcagttttcagacaatgggctttccccatcgcaactatagaatgcgttgtgctccgcttcgtcgatagcttgccgtgcacactggaatgtgttgttgggtccctcgatgaggtttttgctggtgggcaggctgctgggggtgtaggatgtgctgttggtgtggctgccttcgcagtcaataaacggctggcgaggcccaggccaatccgcctcttccagccgacaattgaagtgtcgcagtgtgaatgttgctgctgtgtctgatgcagatgcagatgcaactgctgctgttgctgttgctgtttctgatgtgcctgtcgatggtccacgaccagagtagctttgcatctccatttcattctaaagctgtggggcttcctcctcgcagatgtgtctgttgtacagagcaatacaaagaaggtttgctaaaaagaaaacatacatttggattttatttactacccatttaataaataaaggatattcattttaaaacgaatgtcaactgaccgcaaacgcagcatcaacaatacttgtttttgtaaaatcaatttacattatataaaaaaaaaatgcatacaaatagtacataatttttgtatctgaatcttttctcatttaaagcaggaagaagccccataattcttaagatatatatccttaccgatatctaatattgccgtcaaagaaaaagcgtgacctgagcagtaaggacacgtttcaagatatagcttggtctaattaaggcagtcattcattgattcattcatgattcattgtgttcatacaaaatttcataaataaagctcatacatacaaatcagctcttctcttcaaagttattcaatgccgcacccagtaaaaaacactttcccaataaaaagttgccactgtttgcttacattttctatgatagtaatgataatttaagacctggagattgctttagaccaattaaaggaatttataacggagtcttcgcgttctttgttcattacaggccatggcaaaaagctgctacatagctgccatatttccaatatgtgtttttgtggtccttttaaagaatgacagctgaagagttgagcccggtgggatgcatcagatgataatgatgttcatgtcgataacgtgatgacgatgacagtgtcaacaagagctggcgactcgatttgaattaaatgaggcggccaacaaaggatcccacgctccgtgtgacctttgccaaacatttacccattcccccccccccttctaaatccttgaatgcggcttttgtgcttgggtcagtgccaaatacggctgtcagccagtgctgccagcagtcagttaaaagcagccagttaaacggacagagcggcccaagaaaacacatcaaaatttacaaaatatcggacaggataacgatgccgttgagaaatccaaagtgcga

SEQ ID NO: 77 - DNA, 3886 bp, DROSOPHILA
tttttagcaaaccttctttgtattgctctgtacaacagacacatctgcgaggaggaagccccacagctttagaatgaaatggagatgcaaagctactctggtcgtggaccatcgacaggcacatcagaaacagcaacagcaacagcagcagttgcatctgcatctgcatcagacacagcagcaacattcacactgcgacacttcaattgtcggctggaagaggcggattggcctgggcctcgccagccgtttattgactgcgaaggcagccacaccaacagcacatcctacacccccagcagcctgcccaccagcaaaaacctcatcgagggacccaacaacacattccagtgtgcacggcaagctatcgacgaagcggagcacaacgcattctatagttgcgatggggaaagcccattgtctgaaaactgcactttgaggctgaaggcgcgactgttgcgatggccgtacgaggcgtatgagcacattcgactggcaatcaacggggcactcagtgattatgctagtgataaacttagtgatagttcgagctgcgatgaaggaggcatggtgttgcaatgtaagctgggccaggcccatgaactattgctttgtcatttgcaacaactcgagagggagccactgcgggaggtgggaagcgcggaggagagcttctccaacgacagccttctgcaggcctttcaaatcgaactgggcgcagagcgcgatggactctggtccttccttaatctaagcgagctaatggagcccgatcacggattcctgggcatcatgaatgtcaccaacactagcttagacatgtttttgccgaaccttacagccctgaacacgacctccacggcctccactgcagacatggccaccgagttcgcggtaacaaagagctttctggactacagtccccacggctacgatttcctattcctgttcgtggtgttctttatcttcgcgggtggcctgggtaatatccttgtgtgcctagccgttgccttggaccggaaactgcagaatgtgactaactacttcctgttttccctggctatagccgatctcctggtcagtttgtttgtgatgcccatgggcgcgataccagcttttttggggtattggccacttggctttacctggtgcaacatttatgtgacgtgtgacgtactggcctgctcatccagtatattgcacatgtgcttcatcagtttgggacgctatatgggaataagaaatccattgggctcgaggcatcgatctacgaaacgattgactggtataaagatagccattgtttgggtaatggccatgatggtatccagttcaataaccgttcttggtctggtcaatgagaagaacataatgcccgagcctaacatatgcgttatcaacaatcgcgcctttttcgtgtttggatctctggtagctttttatatacccatgctgatgatggttaccacatacgcattgacgattcccctcctccggaagaaagcgcgatttgccgccgagcacccggaaagtgaactttttcgcaggttgggtggacgcttcaccctaaggccgcagcacagccagcagcagttgcagatgttcagtagcttttctggcagcaataacaaattcctatcaatgggcgacggcaatcgcaacttcaacactgaaggagagatggaggagggtggagctcctagcagaaggagtggcgtagagcccgccgaacgacctttgatgcaacagcgaacggcgagcagcaggagcatgggcacggttagtttccgtaatgtcgtgaacgggactagcggagccgcaggaagtgggcgcaggacgactggcactgcccacagcagcttccggttctctggcgccggcatctttcggcactcgtcgtcgtctcccgcctcgagctgccactccaccagcacgtcgcgttcgagctccttctggcgcaaacacggcggctatccaaacctaatggacagactggccatacatttaagactttctttggtaccacccagtagccatccaaatcgacgggcatctgtgcgtgtcaccatctcccagccacaattgggttacccgaccaatgtaggtggaaatggaggtagaactgttggagcgacggaggtgggggctggtggcaatggctcatcagccggcagaacgagcaactcatctcttggaggcacgagcttgatgaaaatcgcaaccatccagggaccgatactgaaccaaagtcaggcagctggaggcaatcacatggtgcaaaaggtgaagccgacggctttaaaaccggaagaaccacagcgcaacaaagtgcggccctttaaatttgccttcaaccgcgttgccacgcccaccctcaatttgcgttttctaaacaatcgcagtaaacgaaacagcttgtcggccaatgccgttgctacggagcagaaggccaccaaggtgctcggattggtgtttttcaccttcgttctgtgctggtcgcctttcttcatcttgaacattatatttgccgcatgccccgagtgccaagtgccggagcacgtggtgaatacctgcctttggcttggctatgtctcctcgacgatcaatcccatcatctacaccatattcaatcgcacgttccgggcggcctttatccgcctgctcaagtgcaactgcaaacggtgagtagtagagcagtgagaagtcactgcagcccagacgcggatccagtgccacagtaagaaattgcctctcccaaccgacgaaggcacctcgaactaaaattcgtcgctgcaggttacagtgacacagggatgcaatttattgctctaagagtgcattctgctgggaattaatgtgcaacgtgacgtatgattgatttttggggttttgatttaccagaggaatccagacaagagacgaactcggggtggttgtggcagcgaatgaataagcagcgataggaaatcaaacgctctcaaaatatattaaaggaagaataagttcgattgtttgtatttaatatgcagaatgaatgggaatctttgtaatacgacttttatctattttaaagacttgctagaatcgccacacattgtaagacataaatttcgtaagcattaaaaacaaactgtgtcgaatgtcaaatttatttaaaatgccttgtgttcgaattaaaaacgtattgaaaagtataggacatttaccaagacgagagcacttttctgtcactgacttctgccttaaaacccaatcgactcgaaatggcttaaaatggcacagccaataacgtagttattgccatcccattgcagttccggccgcccgctgcgctatcggtctgtgacagaaggacgcggcgctctcagcctgtgcgccccttcggccctgccgctggccatatccttccagggggcgccacttatgacgccatctacggctaatgcgacgccgatgagcgagttccgcgccagctgccgcacagtcacagacgacgagtgctgaaccacgaggagcaccatccagcgtctgggatgcatcaaatttatatcgacgtatcggcagaaacaaaacggagtccactgtaattagcggcttttcctagataacttcagggagatcaatgctaaccttttcaatcacaatcaatttgatgaattttgtagatgctatagagaaaatacctaacttaagtctcatcgcatatcattagaaacaaaggaaggttcaaaaatatagtgagagagtttgcggtacaacgcggactgtttttcactttctcatcaacattctagacttggtcattgcgttatttctaagtcaaacaaaaaatcattaacaataagtacgattagtgcaaaataaaataagaaaaagaaggtaaaag

SEQ ID NO: 78 - protein, 868 aa, DROSOPHILA
MEMQSYSGRGPSTGTSETATATAAVASASASDTAATFTLRHFNCRLEEADWPGPRQPFIDCEGSHTNSTSYTPSSLPTSKNLIEGPNNTFQCARQAIDEAEHNAFYSCDGESPLSENCTLRLKARLLRWPYEAYEHIRLAINGALSDYASDKLSDSSSCDEGGMVLQCKLGQAHELLLCHLQQLEREPLREVGSAEESFSNDSLLQAFQIELGAERDGLWSFLNLSELMEPDHGFLGIMNVTNTSLDMFLPNLTALNTTSTASTADMATEFAVTKSFLDYSPHGYDFLFLFVVFFIFAGGLGNILVCLAVALDRKLQNVTNYFLFSLAIADLLVSLFVMPMGAIPAFLGYWPLGFTWCNIYVTCDVLACSSSILHMCFISLGRYMGIRNPLGSRHRSTKRLTGIKIAIVWVMAMMVSSSITVLGLVNEKNIMPEPNICVINNRAFFVFGSLVAFYIPMLMMVTTYALTIPLLRKKARFAAEHPESELFRRLGGRFTLRPQHSQQQLQMFSSFSGSNNKFLSMGDGNRNFNTEGEMEEGGAPSRRSGVEPAERPLMQQRTASSRSMGTVSFRNVVNGTSGAAGSGRRTTGTAHSSFRFSGAGIFRHSSSSPASSCHSTSTSRSSSFWRKHGGYPNLMDRLAIHLRLSLVPPSSHPNRRASVRVTISQPQLGYPTNVGGNGGRTVGATEVGAGGNGSSAGRTSNSSLGGTSLMKIATIQGPILNQSQAAGGNHMVQKVKPTALKPEEPQRNKVRPFKFAFNRVATPTLNLRFLNNRSKRNSLSANAVATEQKATKVLGLVFFTFVLCWSPFFILNIIFAACPECQVPEHVVNTCLWLGYVSSTINPIIYTIFNRTFRAAFIRLLKCNCKR

SEQ ID NO: 79 - DNA, 4958 bp, DROSOPHILA
cgccgtatatttttgctcatgtgcaacccattgcgggaattgcgcatcgaaatttcgaggcgacggcaatacgctctgcaagatcccctgccacgccgtaatcgagaatattgggactcacctccgcctgctggcgaacatcgttgtccgtggacaagagggaggccagaagctgctggaaatgggcctgatccgctgccatcttatcctgtctggttcaaatgaatcgaaacacgggaactcgtggaaaccacgattttcacttcagtcttcacgcaacggcggccgcctaaaaagagcagaacggaacaactggctgggttgccaaggttcgcaaacaagcgcactgcactcttggtcagttttcgtgattgccgtgaatcttgggatggttggtctttggtgggtgctgctgctgcgcggcctatccaactttcttttatttaactttttatgcaatttagtggacacgctggaatctcgctaaagcgctaaggcaatactgctccgccgttatcgataaaacgcgactgcttttggcgcgcaagcggccgcccgcactagtgatgcccgatagctggcgcgtttgtagaaccgtcaaaaactctagctaaagtttaacagttgattatgatcttttaacggaaatagaactgtgttagtgtgagaacacaaagtatttctaaaaattacaatctatttccaaagaccgtaggactgaatgaattgtgtgtatttaaaagaaaaagtcaggtagcctagatttaaatggtttgtttcttgtttaaaataactatgtaaattatatatatatattgtaagctagaaacaagaaatggcttgaaactcatttaaatctaatggcatattattccgagtgcaccattcaccgatttgtgtgcaggttttctaaatacaataacaatcattggtgaaaatgatgaaaggcaaggcttttcttgaaccgaaaagcttaaaaagaagctgcacatgggctgcgatctagacatgataagtaatatttattcaattattgtatttacatatgtatttcttgcgatcatttaagaccctaacacctcggaagaagcattgctgttaatgtgcagctgtgaggccactataaggttgttacaattcgtttcaaggcaattattcgaaagtaaaggacccccaatgaaattctgaacagactctagattataagatagactatagataatacaccgctgtcggtgtgtactaaatgttgattatgttgattaaaacattgaagacattagtaaggtggttgagctatgaaaatcatcgattactctgaattcatgtgctaagttaacgggcatcatagaccttcaagatagcataaacgtggaagatggtgtccatatgggcctgataaataatatatatgaaatatatatccaaaattgggtcgcatttgaagagtttaagacattcagctgaaggatgtccttgcggaagactcgacacagattggaatcaataaattcagccgattctgagttatataatgacattatgacatcgaagccactgttgaaaatgttcgggaagactgactccgtcttggtttttatgtcagctatgttttgaaattacctagtatggcatatattgaaaaatttctgctagactaagcattagtataaatatgtatataactagttcaaaccacaatttttggaaccataagaattgttcgcacttacgaaatagtgctaatgggttatcctttaaccaggcgcttcagattggtaaagagccgcaacgtgaagtggtagatcatttccacaagactcaagatggagaaccccatgaatagaccgaaaatgccaccgcaattcgccagaaactcggtcattccgtaaagctccgaccgctttgaagtgatgaactgactctgcttgaagtaaatggacaagcgggacatctgggagccgggatactccttcaggaactcagtgtcgccctcagccactagcatttcttccaaatcaaagttggcctgggaaatctccgtgttgtagacgagggatgtgcatgctggcatgcagttacaggcagattccacgctccgcgaattttctcggccagcgttcagcgcttttactcttttgaattccctgactaacaactccctttctgcccgatcgtagcagtggatcttgtcctctccgcatacaggcatgtccacgtttctgggcatcgagaacttaacgcatccgcacttggtcagcgtgaagttggccaagcactccagttggcaatttgattcggtgtacaccttaaaaaaacgcagcgaccgctcgtggctgaggaagcactgcctccgaactggatggtactctgctattcccgacgacatggtgatcatgttgggcttcactgcgatcagcacctccttgcccatgggaatgcgcacaaactgtttggaaacctgcgggacgtcatcgggcgcatgaagcagtacctgtagattggcattactgtagacacatattggagcaagaaaaagcaaacagctacgttttcaaattttcccaccttaaatccctgcacaggtcctcgacaggcgtagtccacctcctgcttaaagctttggagggccaagaaaatgccagatcgcgctccggcacttaagacacgagccggaaaggtctccacatcgctgtccagtgcatagcccgtttccagagtccaggccgtatgctgcgagctaatattttccatttccaggggctccccgctgtgttgatactgataggtgtcgtcccggtatatctcagtggctctcagcccattgaacgtatagcagatgccctcctccgtaagagtctttcggaagaaggtctcgcactcgccgaaacgactaagccagcggcagtaaaagaagtaccgatcaaactggggcagcatccgctgcagaacatcaaagtagtccaagtcatcgccggctatcaagggtatgtcctcttcaatgatctgcgtgttgcatacgtgcagcagggtgcggaactcctccatctcaagggcactaacgttttcgggcctaaacacccgcgaagctcgcatatcttcgctgaactggctgtaaagatcagcataagtggtctcttttcctgtcagacaaaggttacatgttaatattcatagtctgtacaactagaggcttcccgaataacaaacctttctgctttagcacccttttggtctccgagcaaactgtgaccgccggaaacgggatgttccacacgggggtcgatttttccgcgaagctaacgatcacaggctttaaaaaaacgcaaaatattagttttgttgtcggctgaaggcagcaagagcacttttcattttacagaagaccctgtagtgttcttatatttataaaacataacagttagggtgcataatatatcgcataatacatcgcaattttgaaggatctgtactttaaatgctattgtttcagagagcttttactgatgctacgtatatacatatgtatgtatggtatgttctactagggactcgcaccgtttcggtccacttggtgtaggcactttgaatcagcgtggagcagccgtagatcgagatcaggaacacgaacagccaaaagatgcgctcgcggaaggggcgctcctgctcgccaagatattggacaccatgtatggaagtgttcctgcagtattcatggtacgtggtgataaatccttcgcaggcgacggaacctgccttccttctcctcctgaatgtcaggtcgatgcccttgctgctgtcgagttccgaatccgatatggtcatggtgtctattccattcttgacgcgcacaaacacagcttcaagtaatccatgtgggttggagacgaaaacaacgtgaaagacaaatggcaaaacgagaattttttcccgtttcttggcagacctgccagattgacaggatcttggagagaacttgcaaaaaaacgttcggatggtgacaatttagcgatatattttacttccgaattaaattaaattttgttgaaattaacaaaaacgaaaaacaggtacatatttgctgcaactttattaattgtcattgttaacacgttatcccaattcattatttgcacattcgcctgtgttgttaaaaattaaaactccaaagaaaaatatttcaaaacgcagaaaagtggaaacgagttgaaaatccaaatcctcgttacgcctcgatatgtatcgataacgaatgcttcgtacacgatttgtactgtttacttaattattaagattcgtaattatttaaatttatttaaaatggcgacaaggtcttgtgcgtacaaggactgtgaatactattacgtaggccacgaaaacgcgctgaccaaaggaagaaccctgtttgcctttcccaaacaaccgcaaagggcgagaatctggcacgaaaacggccaagtgcatccaaagattccccatagccagctttttatgtgctcccttcactttgaccgcaagttcatatcctcctctaagaaccgaacgctcctcgtcggcgaggcagtgccgtttccgtacgaggaaagcagtagcaagccggaggaggagccccaacaagtggcttccacttcgcatgagagctactatataaacctgagcgacgatgagctcagcatcaacaatgtggacactacctcagttactacaagtaagtactataaatccaccgggccttcgaaatagagcgggttggattcatcatgtcggtgttgcatcttaatgctttattaacttctttaacattattttcagttgacgcagtccacgatagtccaccgcagaagcgcccgaaggaatcttccattgtcattgctctaaaggaagctgtgaaaatggaacccaatccgaatgcaggccgagttagagcagaacccgacaatatagatactactgaagtg

SEQ ID NO: 80 - DNA, 2572 bp, DROSOPHILA
tcaatctggcaggtctgccaagaaacgggaaaaaattctcgttttgccatttgtctttcacgttgttttcgtctccaacccacatggattacttgaagctgtgtttgtgcgcgtcaagaatggaatagacaccatgaccatatcggattcggaactcgacagcagcaagggcatcgacctgacattcaggaggagaaggaaggcaggttccgtcgcctgcgaaggatttatcaccacgtaccatgaatactgcaggaacacttccatacatggtgtccaatatcttggcgagcaggagcgccccttccgcgagcgcatcttttggctgttcgtgttcctgatctcgatctacggctgctccacgctgattcaaagtgcctacaccaagtggaccgaaacgcctgtgatcgttagcttcgcggaaaaatcgacccccgtgtggaacatcccgtttccggcggtcacagtttgctcggagaccaaaagggtgctaaagcagaaaggaaaagagaccacttatgctgatctttacagccagttcagcgaagatatgcgagcttcgcgggtgtttaggcccgaaaacgttagtgcccttgagatggaggagttccgcaccctgctgcacgtatgcaacacgcagatcattgaagaggacatacccttgatagccggcgatgacttggactactttgatgttctgcagcggatgctgccccagtttgatcggtacttcttttactgccgctggcttagtcgtttcggcgagtgcgagaccttcttccgaaagactcttacggaggagggcatctgctatacgttcaatgggctgagagccactgagatataccgggacgacacctatcagtatcaacacagcggggagcccctggaaatggaaaatattagctcgcagcatacggcctggactctggaaacgggctatgcactggacagcgatgtggagacctttccggctcgtgtcttaagtgccggagcgcgatctggcattttcttggccctccaaagctttaagcaggaggtggactacgcctgtcgaggacctgtgcagggatttaaggtactgcttcatgcgcccgatgacgtcccgcaggtttccaaacagtttgtgcgcattcccatgggcaaggaggtgctgatcgcagtgaagcccaacatgatcaccatgtcgtcgggaatagcagagtaccatccagttcggaggcagtgcttcctcagccacgagcggtcgctgcgtttttttaaggtgtacaccgaatcaaattgccaactggagtgcttggccaacttcacgctgaccaagtgcggatgcgttaagttctcgatgcccagaaacgtggacatgcctgtatgcggagaggacaagatccactgctacgatcgggcagaaagggagttgttagtcagggaattcaaaagagtaaaagcgctgaacgctggccgagaaaattcgcggagcgtggaatctgcctgtaactgcatgccagcatgcacatccctcgtctacaacacggagatttcccaggccaactttgatttggaagaaatgctagtggctgagggcgacactgagttcctgaaggagtatcccggctcccagatgtcccgcttgtccatttacttcaagcagagtcagttcatcacttcaaagcggtcggagctttacggaatgaccgagtttctggcgaattgcggtggcattttcggtctattcatggggttctccatcttgagtcttgtggaaatgatctaccacttcacgttgcggctctttaccaatctgaagcgcctggttaaaggataacccattagcactatttcgtaagtgcgaacaattcttatggttccaaaaattgtggtttgaactagttatatacatatttatactaatgcttagtctagcagaaatttttcaatatatgccatactaggtaatttcaaaacatagctgacataaaaaccaagacggagtcagtcttcccgaacattttcaacagtggcttcgatgtcataatgtcattatataactcagaatcggctgaatttattgattccaatctgtgtcgagtcttccgcaaggacatccttcagctgaatgtcttaaactcttcaaatgcgacccaattttggatatatatttcatatatattatttatcaggcccatatggacaccatcttccacgtttatgctatcttgaaggtctatgatgcccgttaacttagcacatgaattcagagtaatcgatgattttcatagctcaaccaccttactaatgtcttcaatgttttaatcaacataatcaacatttagtacacaccgacagcggtgtattatctatagtctatcttataatctagagtctgttcagaatttcattgggggtcctttactttcgaataattgccttgaaacgaattgtaacaaccttatagtggcctcacagctgcacattaacagcaatgcttcttccgaggtgttagggtcttaaatgatcgcaagaaatacatatgtaaatacaataattgaataaatattacttatcatgtctagat

SEQ ID NO: 81 - protein, 562 aa, DROSOPHILA
MTISDSELDSSKGIDLTFRRRRKAGSVACEGFITTYHEYCRNTSIHGVQYLGEQERPFRERIFWLFVFLISIYGCSTLIQSAYTKWTETPVIVSFAEKSTPVWNIPFPAVTVCSETKRVLKQKGKETTYADLYSQFSEDMRASRVFRPENVSALEMEEFRTLLHVCNTQIIEEDIPLIAGDDLDYFDVLQRMLPQFDRYFFYCRWLSRFGECETFFRKTLTEEGICYTFNGLRATEIYRDDTYQYQHSGEPLEMENISSQHTAWTLETGYALDSDVETFPARVLSAGARSGIFLALQSFKQEVDYACRGPVQGFKVLLHAPDDVPQVSKQFVRIPMGKEVLIAVKPNMITMSSGIAEYHPVRRQCFLSHERSLRFFKVYTESNCQLECLANFTLTKCGCVKFSMPRNVDMPVCGEDKIHCYDRAERELLVREFKRVKALNAGRENSRSVESACNCMPACTSLVYNTEISQANFDLEEMLVAEGDTEFLKEYPGSQMSRLSIYFKQSQFITSKRSELYGMTEFLANCGGIFGLFMGFSILSLVEMIYHFTLRLFTNLKRLVKG

SEQ ID NO: 82 - DNA, 3308 bp, DROSOPHILA
gctgagacgagtctcacaaagcggacactctcctccaactgggatgtaatgacctggctcgtcgcccagaaggtaattggccaggcacaccatatggcatgtcagccgacacatttgatttgtgcatcccaggcgggatttctccggttgctccatttcctgcatacaaaggtggcactcggaagcccacgccacaggtggaggaggtactgcatcatcaggtctcctacgttgtgaggcactaatggaaaccttgccactcacaatttccatgtgtttaggcagtgccttgctgaatggcctctcgtaatccgtttctagccagcgaacggtgagcggtaatctattccaagggccaacccccagcatattactaaggatcctaaagttgtagtcaaagaacgtctccctgggcagttttcgttttaattcagggtacattttaagcctagttgaaagcgacggctgttgccaagcccattcaaactggagtgccactgtattattcgggaatccgtgcacgatcattaccatcagccacggccctttgcgactggttttcctcgcgccaccgaaatcacaaccaagattgtgttggcgtatccgccgtttggggttcacggtgaagcccacgtagcattttccccggtagcgaggatccaagctctgactgcatagcaaatagacgccgtagaagtggcccttcagcgcgacggattcctcctgttgagaagctgtgtcctgtgggtctgtgaattcaccaacagatagattaatgaaacttgctttgtgtctgcaaccaaaaaccaacgacaaaggaggcgacaccctaactaaagcaatgagatgaggttttcaagattttctaaaataaaaaaagaaataaaattattttagaattttagtttggctaaaatagctaagaaaataaggtgtgttaagtggtagctgtttctcagccaaaaaggaagataataaatggaatgcaaaataacttgttccaggttcttatactattttattggtaaacttttagttgccagcgctagtttaactctagttttatgttggcccccgatgccacgccattgatttgctgctgctgctggggatttccaggctgtgcttggacaggctgtagggcagaagacgtctgttgactatccgccgtggaagctgacccgttcacgttgggggtaggtgctgctgattcgcctcccgttgctgcctccatgccgttcgcctgctgttgttgctgctgaagctgctgttgttgctgctgggcggccgtaacgttttcgatcagtttgatgcgcttgcgagtgtagtgctgccactgcagaatggcctggtcgtctatgaacttgcagcactgcgagttgacgatctcccggcggaagtgttcgtactgcagcagatcgaggaagtagaggcacattgggtacatgaggtatttcgcatagtccggctccttccagtactgcagatacttcaggtagttgatgaacgactggtccttgaaaaatccacgctgtgcaaggactggcacaaggcgttgtaattgtttatttagatatacgcgcaagatggtgaataagtgaatattaggtaggtcgaggtaatattattcttacagtttagatagttggggttcgacaggcactgcacgaactccagctcgatctgccagcgtcgcttctgcagctcctccgactcgatagcagctacggaagaaattggagagcattagtccctgagaaattagcaccacttttggtagatctctgaggattcggcatgccaagcggtgtcagtaggtgttagattacaatgcgaaaatgggtgtggattggcgtgtacttactcttaccctttccgtacattttggccattttggactggtctttggctttggaaagggtctcgttgggtcggtacttgcgtctattcagtttcggtgtcgggttgggttcttggtttctttcagtgtgctatgtggatgttctgagctgtgtgttttggtgcaccatcgaattgaaaacgaaacgtcgcggcaaacaaaacacacaagtaaaattataaatatatatgggcttcgctaatgaaataaaatgtatggcgcggcagtgactgcacagagcaaacgcaggttgtgggccaaaagaaaactcgggaaaacagtcgaccaggtttctgggcgcaggcggtgggttgtcgctccctttgtgttggtgatttcttgtgggaaggcagttaaattcagtttttaatattgtctacaaaccgtaggagttcatttggattgttgatggccggcgacaaccctacttctgtccccgccagggctgcaagctcatccgaatacgatttttttttcgtaaaatactgcttttccgtatattttacttggtgtgtgctaacggtattcttgaaaatgtttctgtgttaaaaattagaattagggttgttttaaccaacaaaaatctttaataccagagtaagtttaaacaaatctgagcgtatgtatcaagaagtacagcgatcaatggtatctacaaataatcataataaaacaattaaaatttatattaaaatataaaattccgaccagaacattgacaatttttaattataatatgtaattaacaattgtgtgtagccttcagtatttatttcactacccctaatgtgatgcgcatttaattcggtattttcacaagcctacgacgaacgctgtggagaacaatgcctgatttttttgtcagcctgaaaagcagcgaggaaaaacttgaatttcgtctgtaaaacatatctaatcggaaccaagccactgaaaaagtcgtagtttaggctaaataaacgagaaatcaacgagtgaaactaatttctatctgtggacagaacgcccccgcacctatttttgtgctgaggaacaagcgaagcagcgacgcacaattcagaaatgtaagtattaacaaaattatgtaatttaagtgcatatgaaacattatatatgtatatccaactatttccccgatttcgacgggttaatcatcatccacaaaaaattcatgttggcgaagaatctattattagattacagtgtgctctgcttgaatacaactccgaaatgtatatacatatacagatgcatacagatgtacacatatgtacatatgtgcatatgtatctatacagcacagcacagctgccgtccaaatagaaccaaagattgtttcttgataggcttctgaatcatttcaatgtaattacgaatgtaagtctcttttgtgtccgcttaggcaagc

SEQ ID NO: 83 - DNA, 1076 bp, DROSOPHILA
caacaatccaaatgaactcctacggtttgtagacaatattaaaaactgaatttaactgccttcccacaagaaatcaccaacacaaagggagcgacaacccaccgcctgcgcccagaaacctggtcgactgttttcccgagttttcttttggcccacaacctgcgtttgctctgtgcagtcactgccgcgccatacattttatttcattagcgaagcccatatatatttataattttacttgtgtgttttgtttgccgcgacgtttcgttttcaattcgatggtgcaccaaaacacacagctcagaacatccacatagcacactgaaagaaaccaagaacccaacccgacaccgaaactgaatagacgcaagtaccgacccaacgagaccctttccaaagccaaagaccagtccaaaatggccaaaatgtacggaaagggtaagactgctatcgagtcggaggagctgcagaagcgacgctggcagatcgagctggagttcgtgcagtgcctgtcgaaccccaactatctaaacttccttgcacagcgtggatttttcaaggaccagtcgttcatcaactacctgaagtatctgcagtactggaaggagccggactatgcgaaatacctcatgtacccaatgtgcctctacttcctcgatctgctgcagtacgaacacttccgccgggagatcgtcaactcgcagtgctgcaagttcatagacgaccaggccattctgcagtggcagcactacactcgcaagcgcatcaaactgatcgaaaacgttacggccgcccagcagcaacaacagcagcttcagcagcaacaacagcaggcgaacggcatggaggcagcaacgggaggcgaatcagcagcacctacccccaacgtgaacgggtcagcttccacggcggatagtcaacagacgtcttctgccctacagcctgtccaagcacagcctggaaatccccagcagcagcagcaaatcaatggcgtggcatcgggggccaacataaaactagagttaaactagcgctggcaactaaaagtttaccaataaaatagtataagaacctgg

SEQ ID NO: 84 - protein, 204 aa, DROSOPHILA
MAKMYGKGKTAIESEELQKRRWQIELEFVQCLSNPNYLNFLAQRGFFKDQSFINYLKYLQYWKEPDYAKYLMYPMCLYFLDLLQYEHFRREIVNSQCCKFIDDQAILQWQHYTRKRIKLIENVTAAQQQQQQLQQQQQQANGMEAATGGESAAPTPNVNGSASTADSQQTSSALQPVQAQPGNPQQQQQINGVASGANIKLELN

SEQ ID NO: 85 - DNA, 4755 bp, DROSOPHILA
tcgctatccactctgtctatctttcaaagcctttaaataattataaaactttatctcttctctggacacacgcaaacatgaacccctacactatcgtccatgtccattgaacgtcactttgactaaagccaaatagaattaaaccctgaaaaatatttgatctaaattcctgaattcccaccccgccgccaccgccaccgcccaccgttttttccggacacgccacacaccaaatccagcatcccatccaacctcctgatgccattttcatgcccaatctcccccagaaagcgcagcagcggcagccgcaggaacacaaatcccgccacaaagcgaccgatgacacagaggctccaaagcagcagcagcagcagcagcagcagcagcagtcctttgatgtagccacaaatgccaatgggtcctctctgccagcgagtcgggtgaaaaatccggaggagccgggaggaaaatccccattggtgccgatgcgacagcatcactcgaaagtgacgcgcccacccccgccgccgacgcttttcctggaaaactcactgctgcagcgccagttcgcgaatccaattagttacttgggtggaccgcgtctgcagccgcgcagtaatcgcaccagcatcgactcgatattatcgctggattagcaccgcagccagtttccagttctccgcccactgcaatccgtggaaaacctcgccgactagtcacaaactgtcaactggtgggcgggaaaacccccagtggatccttttctcccccccaaatgccacaatctcctcaacttagaaactcaaagttaaaatcttaaaaattgttagctagtcctagttaaaatacaaataaattgttacaaattatcgtttagtttgttactaagaaacctaaatgtggaaacgtaagtattttgctaaaaatgggaaatcgaatacttccaaaagaaaatatttaaaagatagcagctcaattaattttccattaaaattaaaatcaataaatgtataaatatttttatttgattaaattagtttctgcgttattcgccacattggatcgcttgtaagtatgcattcactttttgcttagctatacactttcgatcttaaaataaattgtgtttccgcccactgattactgatttatccccctttgggaatattcccactgaaaaaaaggagccgatcgcagtgggaccttgtgtaggggcgtgtagaaaaagccctggacatggctacggggcgtgttggtgaaggggggcgcgggaatgagacgacactaggtgaaatccggtggcttgtacttcggcggtcgcttaattggcttctataaccaattgcggccgccacgtcaaatgttgttctccttggcgcccttggccccggcaccggaacctgatcccgaaccggatccggcattagctgtcgctccggcatcattatcgctcttgttgttactgttgttgttgctattggtattagacgccgtcgattcctcgccatcagctccgtcgcctgaaaacagcataatggtttagttagtagggtttaaatacaaattacaagtggtcagtagaaccaattaaaatgactaatggttaatcactcacccttttccttttcgtccttgatctcgctggacgtctctgaggatgccttgttgctgttggtgtccttgtcgagacgcggccgcttccgctgacccttgtacgaacggttatccctgcgaccgccttcgccctcatcctccgaatcggagtactcgttctcgggcacaatgcgcttgtccttgtcgctctgcggcaggcgatcatccttgtcgaccttgtcctcgtcgtcggactcatcgttgatggcatcctcgggaatcgcttggatttgaacgcccggagcgtgaggcagcatgcgcaggttctcgaacagacggttcttgatcttctccaggtactcggatgtattctgattcgtcatattgctgggactaatgtgcagcttaaaatcgggcccaaagtactcgaagtaatcgttgtagggcagttcgttggctatctccacggccagtgcaacggaggtctcataggtccagcagcgggatacattacgaatggtataaccaccaccgccgaccatcaggaatggcaggttatatttcttcacgaactccacgcacttgccgtgacccttgacggtgagattgaagcagcctaaccgatcgccagtcagcgaatcggcgccacactgcaacaccacggctgccggctggaatgtttccatcaccttgctgataatgggcacaaatatgctctcgtacgcatcatcatccatgccatcacgcaggggtatattcaccgcatagtactttcccttgccggcgccaatgtctcgcagatcgccagtgcccgggaaatactctccgtacttgtggaagctgacagtcatcacacgatcggtggtatagaacgcctcctccacgccatcgccgtgatggacgtctatatctatgtagagaacacgctgatggtatttaagcagttccagaattcccagaacaatgtcgttgacgtagcagaagcccgaggcttccgattttttggcgtgatgcagcccaccgccccaattgatgcagatctccgaggcttgcttattcagttttacggccgcagctacggatcctccggcggagagttggcaaaactcgtatagtccatcgaagacgggacaatcttcgccgacattgaaacgctgcatctgcttgttgtactccgacatgttgtccggccgaatggatcgcaagaaccggacgtactcgtccgagtggaacttggtcatctcatcggcagtggctttatggggacgctagaatagagaaattcgcgtttaaatctatcatatatatatatatatctatcatcacatattaataaagtaactcacgtatatttccatttttcgatagagcccatagttgagcagcaggttgtgggtcatgcgtatgcgatggggcttcatgggatgaccctggccatagtagtagttgccaatgtcgcctatggatcaaaaatcgcaattatgagcacgttgaaaaagtaattatttgccacgctatgtggaatacaaattttaaggccactgtcggcgaggcgtctgcctgagagcagcactttttccgaacgaccgcagtagtagcactttcgccccgaacgaaaaagcaacaaaaacacacagaagaggaagatagacatcaggtacatacacacacaaacgcatacaaacgcactgcggtcgtatggaaaaagtgcgctgtggaccggaacgcgctcgtacagtcgccgtaaaacttgaaatttgcaaaaatgctatcatctgatgctaagtggatgcggaaaaaacacaaagtcgacatggtaaccctagctggcactttgtaaacacaaattacccatctagtaggccttttacttccatttaaatgctcaaaacttactgtcgtagtagtaacaaacgcgctttttgctgtgagactgcattttgcggtgctgttggcgggtcttaaatccccttaaagtcgatgtttttctatccttcgtcgatcggatgaacttgcgagctcagaagatggtttactttggtgccggtccgatttttggcactttggcgcaactatatagccaaaatcggagcgcacaagacaaattcgcgaagaggaaacctctgcagatgggcagtgtgaccgcggacttttttaaatccacacttcccggctctgcagaatatacttttaatactaactgcatgaataccgaaaataccaaacaaatatatttaattatttattaaagaaatatatttaataaatttacatatgaaatacgattaccctcttcatacagagtggtcattttttattagatatataaacaatcagacctatgtacttatcaaaaattatcaaatatcacgacatattttttggaaaaatagcaaggatcaattataagtttataaagcaaagtttattggctaagatcacgttgcagagtctgaagctggaactagagatgttgttggaaaacatttaagtttaagcattcgaataaactaattgatttcaatattttctatacaaatataaatgattcattataatttaagaaaaacaaaaacacagaagtaataggttgtagtccggggtaaataatgttaagtcgattaatcgataggaatccatgctaatatcgaacttggcccatcgccagagggtgcattccctctctctctttcagagcatcacccatctcgctctaaaatccaccgcagtttcccacgattttccttctcactctaaaattcaccgttgaacgactcggacgcgattttccagcgcgggtgattttcctcctcggtcggcgtttttcggcggcttcttatcgacaaacaatagtgctcaagtacaacgagattttgtagtgttttggagttgctgaattagaggcgattgttaattgaataaaattaataaaacggcgacgcgtaagtttccaactcccccatgtgcaagtgtgcgtgtgtgccctgtgtgtgtgtgtgaaaaaagagaaagaagaatggagttgcagtggaaacacaaacacgctctctcgctccatctccctcgcacgcacacactcactgggcgaatgaagaagtggaaaaattaaaaccgaagtaaagtgacaaagcgaagtggccaataatgcaagaaaaaacatat

SEQ ID NO: 86 - DNA, 2145 bp, DROSOPHILA
ggatttaaaaaagtccgcggtcacactgcccatctgcagaggtttcctcttcgcgaatttgtcttgtgcgctccgattttggctatatagttgcgccaaagtgccaaaaatcggaccggcaccaaagtaaaccatcttctgagctcgcaagttcatccgatcgacgaaggatagaaaaacatcgactttaaggggatttaagacccgccaacagcaccgcaaaatgcagtctcacagcaaaaagcgcgtttgttactactacgacagcgacattggcaactactactatggccagggtcatcccatgaagccccatcgcatacgcatgacccacaacctgctgctcaactatgggctctatcgaaaaatggaaatataccgtccccataaagccactgccgatgagatgaccaagttccactcggacgagtacgtccggttcttgcgatccattcggccggacaacatgtcggagtacaacaagcagatgcagcgtttcaatgtcggcgaagattgtcccgtcttcgatggactatacgagttttgccaactctccgccggaggatccgtagctgcggccgtaaaactgaataagcaagcctcggagatctgcatcaattggggcggtgggctgcatcacgccaaaaaatcggaagcctcgggcttctgctacgtcaacgacattgttctgggaattctggaactgcttaaataccatcagcgtgttctctacatagatatagacgtccatcacggcgatggcgtggaggaggcgttctataccaccgatcgtgtgatgactgtcagcttccacaagtacggagagtatttcccgggcactggcgatctgcgagacattggcgccggcaagggaaagtactatgcggtgaatatacccctgcgtgatggcatggatgatgatgcgtacgagagcatatttgtgcccattatcagcaaggtgatggaaacattccagccggcagccgtggtgttgcagtgtggcgccgattcgctgactggcgatcggttaggctgcttcaatctcaccgtcaagggtcacggcaagtgcgtggagttcgtgaagaaatataacctgccattcctgatggtcggcggtggtggttataccattcgtaatgtatcccgctgctggacctatgagacctccgttgcactggccgtggagatagccaacgaactgccctacaacgattacttcgagtactttgggcccgattttaagctgcacattagtcccagcaatatgacgaatcagaatacatccgagtacctggagaagatcaagaaccgtctgttcgagaacctgcgcatgctgcctcacgctccgggcgttcaaatccaagcgattcccgaggatgccatcaacgatgagtccgacgacgaggacaaggtcgacaaggatgatcgcctgccgcagagcgacaaggacaagcgcattgtgcccgagaacgagtactccgattcggaggatgagggcgaaggcggtcgcagggataaccgttcgtacaagggtcagcggaagcggccgcgtctcgacaaggacaccaacagcaacaaggcatcctcagagacgtccagcgagatcaaggacgaaaaggaaaagggcgacggagctgatggcgaggaatcgacggcgtctaataccaatagcaacaacaacagtaacaacaagagcgataatgatgccggagcgacagctaatgccggatccggttcgggatcaggttccggtgccggggccaagggcgccaaggagaacaacatttgacgtggcggccgcaattggttatagaagccaattaagcgaccgccgaagtacaagccaccggatttcacctagtgtcgtctcattcccgcgccccccttcaccaacacgccccgtagccatgtccagggctttttctacacgcccctacacaaggtcccactgcgatcggctcctttttttcagtgggaatattcccaaagggggataaatcagtaatcagtgggcggaaacacaatttattttaagatcgaaagtgtatagctaagcaaaaagtgaatgcatacttacaagcgatccaatgtggcgaataacgcagaaactaatttaatcaaataaaaatatttatacatttattg

SEQ ID NO: 87 - protein, 521 aa, DROSOPHILA
MQSHSKKRVCYYYDSDIGNYYYGQGHPMKPHRIRMTHNLLLNYGLYRKMEIYRPHKATADEMTKFHSDEYVRFLRSIRPDNMSEYNKQMQRFNVGEDCPVFDGLYEFCQLSAGGSVAAAVKLNKQASEICINWGGGLHHAKKSEASGFCYVNDIVLGILELLKYHQRVLYIDIDVHHGDGVEEAFYTTDRVMTVSFHKYGEYFPGTGDLRDIGAGKGKYYAVNIPLRDGMDDDAYESIFVPIISKVMETFQPAAVVLQCGADSLTGDRLGCFNLTVKGHGKCVEFVKKYNLPFLMVGGGGYTIRNVSRCWTYETSVALAVEIANELPYNDYFEYFGPDFKLHISPSNMTNQNTSEYLEKIKNRLFENLRMLPHAPGVQIQAIPEDAINDESDDEDKVDKDDRLPQSDKDKRIVPENEYSDSEDEGEGGRRDNRSYKGQRKRPRLDKDTNSNKASSETSSEIKDEKEKGDGADGEESTASNTNSNNNSNNKSDNDAGATANAGSGSGSGSGAGAKGAKENNI

SEQ ID NO: 88 - DNA, 3126 bp, DROSOPHILA
ttttcacaattgtgcacagtgacccattaacatggttgcgatattaacttaagacttaaacaagttaattaagagttttagcacttcttttcaaaagatcatgttttaattatgtttttaaatgaatcttttcgacaattctaaaaatattatttcgaaaatgttaattttcatatataacctaagtaaagatattttcaactgtacctcactctcgccgcgacatttccacacggttatcctgttatgacttttcctttgttccaacgtatttttagcgaattctcggaaggagaaaatccgatagcgccagtaataaaatttgcgaacaattccctagttcgaggactgaggatgggaaggcctatggaccggagacccgagacagattcgcattcgccgcgtcggagacttgagcatatactccttggaaacaagcagagccataaactgtccaaatcgagcatgaaaccccgaggagcatcctttctcacagcgctgctttcattgcattatgaggataattgcggacggcgagcgaccaaaagccgcgacaacagcttcggtttcactttcagcgccgccaccggaggctctttcaacaggtgctacaagttggacaacaatcgcctcggatctccgatcatcatcagcccgtctacctggcgagactccggctcttgcggcccaggaaccctggaactgtctctcacgcaacgccagatcctggcaggatttcgatcaaaacaagcctctagattgcccattgccaatggccgggagtcgtcggacttggctagtctccgaggtgccagtcgggcagtccagcgacgaagggatttacgactcgcggcttaggcaaattttttcgcaacgatgcgtcggcggaattgacctgttatgtcgtctacctacaagccctcctatataagcatgatgtttgcttaggacgacagatcattccacttttgacagctcactcggcagtaccagaaaaaatatgtcatccgtcatgcactactatccagttcaccaggctaaagtcggctcctattcagcagatccttccgaggttaaatacagtgatgtgagtactcagatcaaaaatcgaatatcagcaataaactaattagttgtttacccgctttcagttgatctatggtcatcatcacgatgttaaccccatcggtctgcctcccaactacaatcagatgaactccaaccccaccaccctcaacgatcactgctccccgcagcatgtgcatcagcagcatgtgtcatcggacgagaatctgccatctcagcccaaccacgactcgcagagggtgaagcttaagcgatcacggactgccttcaccagtgtccaactggtggaacttgagaacgagttcaagagcaacatgtacttgtacaggacgcgcaggattgagattgctcagcgcttgtccctgtgcgaacgccaggtgaagatctggttccagaaccgacgaatgaagttcaagaaggacatacaaggtcaccgcgagcccaagtccaacgccaagttggctcaaccccaggctgagcagagtgcccaccgaggcatagtgaagcgcctcatgtcctactcccaggatcccagggagggcacagcggcagcagaaaagcgtcctatgatggcagtggctcctgtgaatccaaagccagactatcaagccagccagaaaatgaagaccgaagcatcaaccaacaacggcatgtgctccagcgccgacctcagcgagatcttggagcatctggctcaaactacagctgcaccacaggtcagcactgccacatctagcacaggaacatctaccaactcggcttctagctcctcttcgggccactattcctacaacgtggatttggttctgcagagcatcaagcaggatttggaggcagcggcccaggcttggtccaagtctaaatccgcgcctatcctggccactcaatcctggcatcccagttcccaaagtcaggtccccacgagcgtgcatgcggctccctcgatgaatctgtcgtggggcgagcctgctgccaagtcgagaaagctgagcgttaatcacatgaacccgtgcgtaacctcctacaattatcccaactaattttgagttaaaaaagttatactaagttttactataaatttttgttggagctaagcaaccgtctctggcccttggacgaaaaattctaaccgaactcagtgacaaaagccatgaatattcttaaattatcgtgaagtttaaccatttttttaatagatatattaaaatatgcctctgtattgcaaccatagttaataaactaaaattcaaataatacaaaatgatattttcttcactttaaaataattattcgatcgatttcttaaatgactccttgttgcttgctgtacaacttttataaaactttgctttagttacaatccatttagtatccttaagaccactccaatccaaagtggacacttggcttctgaaaaggagaaaccaaggaaagaaaggagaggagaggagaggggttaatttttagcatttagctagtgtcccagttgtcttcggtttcacttttgcatttaatgtcccattgcgggcgacttgaggtcaagtcgaggaatttccattgcatcgcccatctattagggcccagaaaagtgtcaaccgcattaactcggacaggtccagccccttccccttctccattcccattcccaatccggattcggatccggatccaggttcagtttcagttacagcgggttccgttggtcatcttgagcggcggacatggagtgttaggatttgatttatggacatttaaccgcacacattacttgctactggctgcggcggctgtccagcgtcttgcagcgcggaaatgcggcactcagcctcagctccaaggaatttccaccagcccatccatccctttggtccttggtgcgggcccttaggtgtggtgtggtatggtgtggagtgctgtgtgtgtgtggcaaattgcttcccctgggaggaaattgtcgctcgcacttgccacggccaaaggactcacaggacgtgcacttcgaaaaataatagtgcagtgagagctatttacaaatattga

SEQ ID NO: 89 - DNA, 1062 bp, DROSOPHILA
atgtcatccgtcatgcactactatccagttcaccaggctaaagtcggctcctattcagcagatccttccgaggttaaatacagtgatttgatctatggtcatcatcacgatgttaaccccatcggtctgcctcccaactacaatcagatgaactccaaccccaccaccctcaacgatcactgctccccgcagcatgtgcatcagcagcatgtgtcatcggacgagaatctgccatctcagcccaaccacgactcgcagagggtgaagcttaagcgatcacggactgccttcaccagtgtccaactggtggaacttgagaacgagttcaagagcaacatgtacttgtacaggacgcgcaggattgagattgctcagcgcttgtccctgtgcgaacgccaggtgaagatctggttccagaaccgacgaatgaagttcaagaaggacatacaaggtcaccgcgagcccaagtccaacgccaagttggctcaaccccaggctgagcagagtgcccaccgaggcatagtgaagcgcctcatgtcctactcccaggatcccagggagggcacagcggcagcagaaaagcgtcctatgatggcagtggctcctgtgaatccaaagccagactatcaagccagccagaaaatgaagaccgaagcatcaaccaacaacggcatgtgctccagcgccgacctcagcgagatcttggagcatctggctcaaactacagctgcaccacaggtcagcactgccacatctagcacaggaacatctaccaactcggcttctagctcctcttcgggccactattcctacaacgtggatttggttctgcagagcatcaagcaggatttggaggcagcggcccaggcttggtccaagtctaaatccgcgcctatcctggccactcaatcctggcatcccagttcccaaagtcaggtccccacgagcgtgcatgcggctccctcgatgaatctgtcgtggggcgagcctgctgccaagtcgagaaagctgagcgttaatcacatgaacccgtgcgtaacctcctacaattatcccaactaa

SEQ ID NO: 90 - protein, 353 aa, DROSOPHILA
MSSVMHYYPVHQAKVGSYSADPSEVKYSDLIYGHHHDVNPIGLPPNYNQMNSNPTTLNDHCSPQHVHQQHVSSDENLPSQPNHDSQRVKLKRSRTAFTSVQLVELENEFKSNMYLYRTRRIEIAQRLSLCERQVKIWFQNRRMKFKKDIQGHREPKSNAKLAQPQAEQSAHRGIVKRLMSYSQDPREGTAAAEKRPMMAVAPVNPKPDYQASQKMKTEASTNNGMCSSADLSEILEHLAQTTAAPQVSTATSSTGTSTNSASSSSSGHYSYNVDLVLQSIKQDLEAAAQAWSKSKSAPILATQSWHPSSQSQVPTSVHAAPSMNLSWGEPAAKSRKLSVNHMNPCVTSYNYPN

SEQ ID NO: 91 - DNA, 2826 bp, DROSOPHILA
cgtctgagagatttgtttttgggtggacttatgctattccctcccagaaaacctagttttagtttacataagcccgggcgatcgtaaatctgtgctatatagcacgtagctcgggggatatgaccgattttatagcgggcgattggattagcttgaagtgacactgtttttacaatcagggatcagggtcggatcgcttagcaatgctaagcaggtagctcaacccttagatattcataactgacgcggaaaaccccgggaaaaaccaagacctttcccgttcatggccaaaacatacctggccgggggattggggtctcgaaggcatgaaaaaagctgggcagatccgtaggtatataggtaggtaggactatcagtggatattttggatgacaaagtgaacttagaacacacttattttcaaatgatagtcagtttttatttggataagaatggaaatatttctcaatactgaaatattatttatctataagctatctcgtaggcctaaagttgatttaaaattaaaataatttttatctaagagttaacgtttaggtgccttgaaaatggagatgtattttaatgttttcatcacaaaatgtttcagatcttaaaatatattacatttgattttttgcaagtatttatttgacgaactaaataatatcatataaataaaacaaatagatccagacgtaacattaatatcccctgaataatatttctccgtgtgacgctacttagaagtacgtcggtttctctggagcctggaactcaccttgattcggagccaggctcaaaaggacgcgacatctaccagcccagaccagccgtctgggaatttgaaagtgtcgcaggcgggacaggtaggaaccaatccgatccgtcacgaagggcttctggggtatataagcaaataaggagaatctaaaggtatctagttaaaaaacatcggccacagcggtcagaagccaacaaatcgcgctcttcaagaaaaatgtttgccattcaaagcgaaaactattttgtggacaattactcagtcagtgatttaatggtgggatttaaaaaattactgcttatttaaataaaaactaagatttaattgatctatatatttatagatgtatccttgcgtcgagttaaacgtagaagccgctcccacggcaacaacaaggtcttcggagaaatcaaagagatctcgcacggcattcagcagtcttcagctaatcgaactagaaagggagttccatctcaacaaatatttagcccgaaccaggcgaatcgagatatcacagcgtttggcactcacagagagacaggttaagatctggttccaaaatcgtcgcatgaaactcaagaagtcgaccaataggaagggtgccattggagcgctgaccacatctattccactttcttcccagtcgagcgaagatcttcaaaaggacgaccagatcgtagagcgtctccttcgatatgccaacacaaatgtggaaacagctccactccggcaggttgatcacggtgtcctggaggagggtcaaattacaccaccctatcagagctacgattacctccatgaattttctcctgagcccatggctcttccccaactgcccttcaatgaattcgatgctaactgggcgagttcatggctgggccttgagccaacgattcctatcgcagaaaatgtaattgaacacaatacacaggatcagccaatgatacagaatttctgctgggactcgaatagctcttctgcttcatcgtcggatattttggatgttgactatgactttattcaaaatttgttgaacttttaaatatatctttgactatatgtttaggcaactgtacatacatacatatataatcattgtattatacgagcaatatctttctgtgactacattattattacttattttggatgaaataaaatatgttttataattaatgtgcgcatttatttgttcaaacaaaaaatgctggttgtgcagcatttggggatacattttgcggactcgattttcaaaaatttcaccaccagacaaatcaaatatttttagacaaaattccattttagtgggcgatacagttgagaaactaaataagcttgacttgttaaaacatttatttatatgatatttataatgaatggccttggctttttattttacttaatgcttcctcaaagtttctgtatttttcacacatatatctttttcacaattttaaacaatctcatggtgcgcatcgtcattacgtagactgccgatcacatagctccctgctgtcagacaacttgttcgtcagagcgtccaagtacgaacaccacccccagctgcagtgcaaaatcgtggcaatatttttacacctgtagtgacacccgtgtgcattaaaatccgcacataattacaaactctgcgcggactggattggagaacgttagcaaaaagagggcgaaaaagcggccaaaaggcaaaaagcaatgccaccaagattgacaggagaagaggcgcccaaaacaaaaagagcgatgagcgaagcaaaatgtcaaaaatacccatagccgaaagccaaaaaagccggagagcgagaaactcgctactgtggctttttcttttcattttttagcagatgcgaaatgtgtaaataagaaaaaccaaataaattccgtcacaagcaacacgttcgcgttggaagtggaaaaaagtgaatgaggcaagaaaacgccgcggaaatgatggcccaagatacaggggttcccgagctacacgaccgcaaagatacaaaacaaactgccgagccggccaatcagag

SEQ ID NO: 92 - DNA, 759 bp, DROSOPHILA
atgtttgccattcaaagcgaaaactattttgtggacaattactcagtcagtgatttaatgatgtatccttgcgtcgagttaaacgtagaagccgctcccacggcaacaacaaggtcttcggagaaatcaaagagatctcgcacggcattcagcagtcttcagctaatcgaactagaaagggagttccatctcaacaaatatttagcccgaaccaggcgaatcgagatatcacagcgtttggcactcacagagagacaggttaagatctggttccaaaatcgtcgcatgaaactcaagaagtcgaccaataggaagggtgccattggagcgctgaccacatctattccactttcttcccagtcgagcgaagatcttcaaaaggacgaccagatcgtagagcgtctccttcgatatgccaacacaaatgtggaaacagctccactccggcaggttgatcacggtgtcctggaggagggtcaaattacaccaccctatcagagctacgattacctccatgaattttctcctgagcccatggctcttccccaactgcccttcaatgaattcgatgctaactgggcgagttcatggctgggccttgagccaacgattcctatcgcagaaaatgtaattgaacacaatacacaggatcagccaatgatacagaatttctgctgggactcgaatagctcttctgcttcatcgtcggatattttggatgttgactatgactttattcaaaatttgttgaacttttaa

SEQ ID NO: 93 - protein, 252 aa, DROSOPHILA
MFAIQSENYFVDNYSVSDLMMYPCVELNVEAAPTATTRSSEKSKRSRTAFSSLQLIELEREFHLNKYLARTRRIEISQRLALTERQVKIWFQNRRMKLKKSTNRKGAIGALTTSIPLSSQSSEDLQKDDQIVERLLRYANTNVETAPLRQVDHGVLEEGQITPPYQSYDYLHEFSPEPMALPQLPFNEFDANWASSWLGLEPTIPIAENVIEHNTQDQPMIQNFCWDSNSSSASSSDILDVDYDFIQNLLNF

SEQ ID NO: 94 - DNA, 3676 bp, DROSOPHILA
agaggccgaagcagaagcgctcctcgctggcccgccgcagttaccagagtctgcagagccaatcacccgacttggaagcggatggggacgaggatgcggatgcggatgcggagtacgagcgtcgaagcaattgattctattgcggggcagcccgatcttttcttcttctcttaatgtctttaatgctattgtaaatggacttgcttgcaactagttcgacggcacactatagatgccccaggatcgccacgcaggctccacgaacacacacttatatttactctagccctaagtggtattgtaatcccaatgttttagttggcactcgttctcctcctgcctcaactccacctgcccatctccatctgtgagaatcgagggaatcctgtagctaatttagctgtgtgtgtgtgtgtgtgggacaagcaaccaccaacgcggaaaagactcatttttgtattaggcactcgacggactgtgcacgaaatcaatcggcagtggcggcagattcaggtgccgaaaatatctagaaatatttatattaaattatttcgcataacattaaactaagttaacaacaccgcaaccagaacaccaaccaatatagagaaatccaaacaaacaaattacgaaatacattcggaaaatgcaaaaaacaaaaacaagtaattagtaacagttggcaatagcggaactattgcaaatgctttgttaaatattttttgaaaaataaacattgaatcgaaaggaaatagaagtaaagcgagtggcttgtgaatcagtttgctatctcatacgtttatccagcaattgcgcatccgattcagcagccatccatggcactgctggaattcttgagcgcgcgccaccgatgatgatgaaaccgtttgccttgattggacacccattccctcgcaattagctgcccattcaccggcttgaagcggttcactgatttgtttaatggcgctgcggtttatatatagatgcgcacccatcgcctgatcgaatcggcggacccgtgccaagtcaggcgaccgacccgttgcttcctatttgcttgcgccgcaatttgcggcaattgaagatgagcgatgaatccgagccagagacttgggcctgagactgctagagccgcctccaagtcgtgtgcctcgccagccgctggactcaattgtattgattcgccaccagttgccgccaatttattctgatcgcagctagtgcgcagttggggacatctctcgctcaaagtctcggactcaatcctcgacagagtagacctagagggttatgccggttccgtctcaatttatgtaatcagtcgtccggatgaaatccccttgagcggaccactagtgctgtacttagttgtgtatactcgtacatatatttttataagcaatggacagaatgccgaaagaggacgacgaatctccagtgtcgacggctcctgccacaccgacatcgccgatggagtttaagatgctaccgctctttatggactttgaggattttgtaaggctactccttagaggaacaggagttgccacatactaatctctctaccccaaaacgcctccagagcatttgccagcctgctcctttctcgtacgatgacaaggccatgctggagctcgagagatgcgactacacacagaggatcacctatcatatggccagagctgggaagacgacgcgcagggtgcgggtctatgcagatggcatatatgatctgttccaccaaggccatgcccgccaactcatgcaggccaagaatgtgtttcccaacgtctatctcatcgtcggcgtgtgcaatgatgagctgaccctcaggatgaagggacgcacggttatgaatggattcgagcgctacgaggcggtgcgccactgccgctacgtggatgaggtaagtgtgttaaactgaaccaatgaaatgtttctatacacttttcgatccatcacaagatcgttccgaatgctccgtggacgctaaatgaggagtttatcgaggagcacaaaatcgactttgtggcccacgatgacataccctatggagctggcggagtcaacgacatatatgctccactcaaagcgaagggaatgtttgtggccacggaacgcactgagggcgtgtccacgtcggacattgtggcccgaatcgtgaaggactacgatgtatatgtgcgcaggaacctggccagaggctactcagccaaggagctcaacgtctcctttctctccgagaagaaattccgtctgcagaacaagatggacgagctgaagacacgaggcaagcgggagctgaccaaagtcaaggttgacatcatcaccaagtgggaggagaagtcgcgcgagttcatcgatgccttcctgctcctgttcggccgggagcggcttaacaccttctggaacgagtccaagggccgaatcattcaggcactcagcccaccaggcagtccgaatggctccgtaaacggtgacgatccagacgcaacagacgacttagactctgaggatgagtacatggagctgccaccagactacgggtctggtagttgcgtatcccttagtcgaaaacaaaagcgccctgataaggtgaatgcctcagcaaacctcaattactcggagcaaccagagcataaggatgtcgtagacgagcgacgcagcgactaaagacgaatttggcctcttcctatcaattaaaacataaataaatatgtttgaagtttaatggaacagcgcagtaggcacttttatacatatttaaaagagctaccagaaaaagtatgcgcttaaaatacattccgataaatttcagttaaattatgaatatttcttttggcaagaaagtaaaaaggcgtttatttgatattttacttgctgcctttattggttatcttatgtgtattgtgaatataagttgggttaaattatagattagctgaatgattttccaaatcctcttcaatgatagaacaatcgcatttgttatttaaaataacgttgaaatattcgcataaaaacaaaaatacaataaatcttgtaacttcataagcgatcatcatctagctcttcatggagctctgttcatgcccgtggcgaacaggggaaccatcttcttgcccttggccttcttttgcttcttcgattccgctggagctgctccattggattttgctgctcctaccttttgctttttctggtccaaggctccaactaaaagttctcccagaccccagtggcccacagatcgctgctcaaagtcctcatcgctggttcttgggaccattacagcccgtggcggcggtggagctgaacggccccaggcgcccacttgaacatccaatggcgcgccaccacctccaggagaattacttccaatagtgggccacatctcctgcttgggacttcccagagtgacactggagtatcgggaaccggggtcctggttgctgatgttcatgggcacagagccactgggagcgggcaaagcctcctcgaagccgcactttagataaaatatcacatattaataattgacactaatggcaggcattgctagctcacagtgggaaactcatgggaggagcttaggtcaaggttagctgcactggcaataagtttgcccatctggcggtcatttatctcgttgatgtgctgctctcgcttgcgc

SEQ ID NO: 95 - DNA, 1550 bp, DROSOPHILA
cctgatcgaatcggcggacccgtgccaagtcaggcgaccgacccgttgcttcctatttgcttgcgccgcaatttgcggcaattgaagatgagcgatgaatccgagccagagacttgggcctgagactgctagagccgcctccaagtcgtgtgcctcgccagccgctggactcaattgtattgattcgccaccagttgccgccaatttattctgatcgcagctagtgcgcagttggggacatctctcgctcaaagtctcggactcaatcctcgacagagtagacctagagggttatgccggttccgtctcaatttatgtaatcagtcgtccggatgaaatccccttgagcggaccactagtgctgtacttagttgtgtatactcgtacatatatttttataagcaatggacagaatgccgaaagaggacgacgaatctccagtgtcgacggctcctgccacaccgacatcgccgatggagtttaagatgctaccgctctttatggactttgaggattttagcatttgccagcctgctcctttctcgtacgatgacaaggccatgctggagctcgagagatgcgactacacacagaggatcacctatcatatggccagagctgggaagacgacgcgcagggtgcgggtctatgcagatggcatatatgatctgttccaccaaggccatgcccgccaactcatgcaggccaagaatgtgtttcccaacgtctatctcatcgtcggcgtgtgcaatgatgagctgaccctcaggatgaagggacgcacggttatgaatggattcgagcgctacgaggcggtgcgccactgccgctacgtggatgagatcgttccgaatgctccgtggacgctaaatgaggagtttatcgaggagcacaaaatcgactttgtggcccacgatgacataccctatggagctggcggagtcaacgacatatatgctccactcaaagcgaagggaatgtttgtggccacggaacgcactgagggcgtgtccacgtcggacattgtggcccgaatcgtgaaggactacgatgtatatgtgcgcaggaacctggccagaggctactcagccaaggagctcaacgtctcctttctctccgagaagaaattccgtctgcagaacaagatggacgagctgaagacacgaggcaagcgggagctgaccaaagtcaaggttgacatcatcaccaagtgggaggagaagtcgcgcgagttcatcgatgccttcctgctcctgttcggccgggagcggcttaacaccttctggaacgagtccaagggccgaatcattcaggcactcagcccaccaggcagtccgaatggctccgtaaacggtgacgatccagacgcaacagacgacttagactctgaggatgagtacatggagctgccaccagactacgggtctggtagttgcgtatcccttagtcgaaaacaaaagcgccctgataaggtgaatgcctcagcaaacctcaattactcggagcaaccagagcataaggatgtcgtagacgagcgacgcagcgactaa

SEQ ID NO: 96 - protein, 381 aa, DROSOPHILA
MDRMPKEDDESPVSTAPATPTSPMEFKMLPLFMDFEDFSICQPAPFSYDDKAMLELERCDYTQRITYHMARAGKTTRRVRVYADGIYDLFHQGHARQLMQAKNVFPNVYLIVGVCNDELTLRMKGRTVMNGFERYEAVRHCRYVDEIVPNAPWTLNEEFIEEHKIDFVAHDDIPYGAGGVNDIYAPLKAKGMFVATERTEGVSTSDIVARIVKDYDVYVRRNLARGYSAKELNVSFLSEKKFRLQNKMDELKTRGKRELTKVKVDIITKWEEKSREFIDAFLLLFGRERLNTFWNESKGRIIQALSPPGSPNGSVNGDDPDATDDLDSEDEYMELPPDYGSGSCVSLSRKQKRPDKVNASANLNYSEQPEHKDVVDERRSD

SEQ ID NO: 97 - DNA, 7425 bp, DROSOPHILA
ccgggggattcctgctcctcgtgacttacggccaggtccacctgagtcatggccgctttgtaggctgttctgatgccagcataggcctccaggaattcgctttcctcctccgccatcgcggcctttaatacctaagaaacagcacagaaacattagatactatacaaaaaaccaaagccctcaaaactttagtatgtagaactaagaatctattaaagtcaatgactatggttatttatggtttagttagtatacatgttctatgtgctgtctttattcttatgaatccccctttcgcaaagttctgtgtaagtcttatagtgcaaattactacatattttgttaatattcgtgagatttaagatattgtaaacgaacttgctggcagagatacatcccgacgaggcgggcaaccgcgaccaactaaaagggtgaccaaaatgcgtcaccaaagtgggaatgacgcgcttttacatcttctcctgcagctgctctaaattgaactgtggccaacgaaaccgcatccgcccttccgctgcactcaccgtctacctgttgcactcactcacctttgggttttggtttcgtctgattctgagcgtttaatctgcactttgcccaccaagtcacctaatgatttagaaagcaaacagagaaacgctctctttcgctattttctcactaattttacgaattattttctgctcctgtttagtcgcacacctttaaagtgagaatatcgtttgcctaatatcacttaaattcgtaaataacatgttaaaatgtgtgttttccattcgagttgaatgttccaagtttttccatctttgttttgatttgcttactttccattgcgaatcagatcagctgtttaggaggcctctgcatgttcactgccacagacagagttgccacaacgacttttgaaaagtcttttgcgggaatcgaatttgaaattgaatgaatggttaataataaaaagcaatactaaaacataagctcgtggcaattaaaatatcgatttacttgttatttatttcgtttttatcatgtttaaaatacaataaatgttattcctttaaatatatttgtcgatcctggtttgaatgcacaaaattatatttcgttcgattcggacaacgtttacatcctgttttccccgcagggagaggcggccgttagggccgtatatacacacatatgtattaaacatatgaaaatttgagtaacgaaaatattctattggaatttgggtgtgattgggatggcatttggatcgcatccatacaacatatcaaattctaacgaggcagacttttgtcttcgggagaagagttttgattaaaatcacaatatgtatagaattatatacccggataactctattgtacacataaatgtatatctgtataaatggatatctatgtgttaaacatatacttcaaaatttcggtaagatgaaaaataatgataacgagtagctgaagcatccatcgttcctttcttggcttggtcgacatgaatggacttggtctgaagaggattgggattgcgatatcttaggcgggagccacgtttgccagctcccggtaggcatcctgcagcgcctgctgctgttccgggctcaaggtgctggcacaagcagccattacctccggattcgattccacttgtttgacgatagtgagcatacgagtgccggtggcggactgcgcctcaaccaccttggtgcagaaggattcagcgatgatggagacaatgcgcggcagattgccgttgtttgccccaagaatgaccggatggttgccttcaatcaagtcgcataggtagccatagatgtgggcggcttcttccgaatcctcggacaccggcagccatgagaaccaaacaccgatcagctcgtccacgttgctcagcgccgagttgttgtacttgaggatcttagcaaacgccgagatcgcattctctgtcggactgatgttctcgatttcgcgggctttgggatcgttgatgacctgcaccagcagtggaatgatctgggcgcatgtatgcgcaaactgctcaccagcgaattggccgagcaccccgcatccgtaggcagccgcctggcgcacttctggggccttatcgcacacgtactggacgagggctggcgtaaagatctgctggtatggagcacaagcggggccacaaaattctgtaggtaaatgagaatacaagtctttagttttatggtggcacaaatgatttgatgtttgaaggtatcggcggtactattgaactgcaaaactcaattaagaaaaccaactcaccgatcagatcatcgaacacgcataagccccactgccgatcagctacaggtcggctgggctccagtagcttgacaaagtgcggagccacctgttcaaaggcgggtaagaactgagccttgttggtctggaaaagggcgtgtgtaatgtccacgattttggaaaggatgtaaacatctgtgtcgtcctgctcggccagctcctcctccacaccgtcgtcgtagtcttcctcattgcgagccgccaaacgcttgtcagcacgctcgaaatgctccagaacatacttgtttataatctcgagaacttgtttcatggcatcctcgttaaggcaattcggacccaatgtctcaatgcattttgccagcgaattcagcagctccgactgcacgtctggctccggttccgtgacgattaccttgagcagctccggacaaatgaacatccacatgccctccagatactgtggacccttaatttttgcgcagtcgagaaggtaaggcagcgactcagcagcagctgtgcggacaccgtcgtggaagtagaacttaagcatgggcagcatttgacgcaccacgtcctcagcgtattcggcaaatccttcctttagttccctagcataacaaaccagcatctcacaggccgaagccttgtcgtccatgccagccgtgcgaatggcgaagttctgctgctcgccaagattaatgaaagaccagtccacatcaccgtcgatgtcctccacctcgtcgttgtccagcatcgccacctcaggcttcatggtggccgttcgcatcactggtcccataacgaggggcagatattgctcaaattgcttgccaaggattttgcacatacgtgcccaggcagtgatgagataggaggtctgcggatcatcatcagctagttcccccccctcggtgtgattgaccagcagcatatccatgacttctccggcatcaccaataaacttctcccgccccaccgccaatcctatcaagctcacgcattcaatggtcttgccgcgaagcatgcggagatcatccgagttggcgttctggatgatgaacttaaggcatggcattaggcgatcgtagtaggccacaaattccgattcgcaggtgtctgcaaccgatgcaattgtcgtcactacctgctccagtaccagcttgtttcccttctccaccagctccttgaacttcgagttcagaatagtctccagcttggccatgatcccgtccaggtagcgtgtcaatatatttttcgggcagtcctcgctgaagttcaccagagcggcacctgcgtgtgcttgcactcgcggattttccacgtcatccaaaagagacaagaggccgggaatcacctggcgaaacaagggaaaattgttaagcatttaattaatttcaattgcttattagaaagttgataaagcagttgcaatttaagactcacctggctgtggaacttcttctcgaaggtctgtgcaaagtcggtggacatttggccaatggcgttgcaagcggcgtatcgaacgcgaggatgaggatcgctcaggaagttcaggactccggacattacctcatctaggatggcttccatctgcttgtgacaaccctcaccgatggccgagatggccatgagggctgcgaagcgatgtttccaatcggcatgacccaacataaccggcagagcgttcattacgagcggaagcacaatctttcctcccaatccacaggcgaggcgatccagcgaggactcggcgatcacgttgttgtcgctgtgatcgtcatcatcgaccacgtcggcggtggaccagttctcgtcatcatccaaatccgtcatcatatggagaatcagcgggatcagggccacgatatacttgtccgctcgcttgcgtatcatcgacggggcgttctcggcgagcgacaccataacttccaacactaggtgacgccagctgtcctcaaagtcctgcgagctgaaaaccttcatgcagacctcaaaaatgaactccagctggggacgcaggaacttcgggcaattctcggtcatctcaatcaggagctttagcagactctgatcatcctgggcctcgatggtctcgccagtgatgtggatcatgcggggcagcatatcagcgaagtgcttgtggatggccgtctcgttctccttgtcgtggtagaggatgaaggctccgacggctcgcacggcctgtactcggacctccggatcggatccagcgtccatgctcttggcaagcatctgcttgatcagatcaatgtactgagcttcctggtttccaaatatggaaggcacactagagaagatccgcagtgccgattcctgcagctgcggcgtaggcgagttagcgcattgaaagagaaactgcaagatgtcgggccactggttgttgcagtcctcgtcgatcagattcctggccacctcggcaactacctcgcaaatcttgcgacgcagctgcggcgtcacctcctgctgcacggccaaaaggatctgctgaagcaattggttctgggattcagctggaagctgcaaatgaggtaatattagaaagatgctcagagggcgattctctgcgcggctttatgcctacccctttgtagaaatcaaagaactcggtggtaaacaggcggcgcagcaacacggcggccatctgtcgagcctcctccgactgctggccattttggatgttgcccaggagatgcgtcaccttcagctctcttgaaagattgttgtatgcttcctggaattaaaaatggtttttgtacatatccattcgatgtaattttaaaatatataaatattatttatatatgtaaatacaattccaccttgacaacattgggctctgaaacaatttaaaacggatctcgattatttccatctctcaagtgaaaagcaaagtcacaattctgaataggtatttttagcaatccaggtggaactttgggtggaagcggtaccatgcttgccatctgcccaaggtcaacagagtgggtggggttttctggctggtgtggcgtgggcgtggcggtgccatgtggcgccggagcgagacttcggaatccgagtggcttatcaaccgacagattgcatttctggaaccgtgtgtcatggatttcgcacctgctctttgtttccgtttgcggcggcaatcggtaaaccgaattgcctactacgaattctaatggaaaatcatgtggcggccatgcaaattgcacaattcgcttccattttgctttgtttgcttgcttcgcaccgtctgtccgtcggctctccctcgcacacatgcgaatgtcggggcaaagcggagggcgaaaacacgttttgtacgatgaatcagattcgtctgaaatttcggccgtaggattcgcacaccgacgtttgttcgtgtgtatacatacatatgtgccgggagaagatcttattgatggcagtccgccgtatatttttgctcatgtgcaacccattgcgggaattgcgcatcgaaatttcgaggcgacggcaatacgctctgcaagatcccctgccacgccgtaatcgagaatattgggactcacctccgcctgctggcgaacatcgttgtccgtggacaagagggaggccagaagctgctggaaatgggcctgatccgctgccatcttatcctgtctggttcaaatgaatcgaaacacgggaactcgtggaaaccacgattttcacttcagtcttcacgcaacggcggccgcctaaaaagagcagaacggaacaactggctgggttgccaaggttcgcaaacaagcgcactgcactcttggtcagttttcgtgattgccgtgaatcttgggatggttggtctttggtgggtgctgctgctgcgcggcctatccaactttcttttatttaactttttatgcaatttagtggacacgctggaatctcgctaaagcgctaaggcaatactgctccgccgttatcgataaaacgcgactgcttttggcgcgcaagcggccgcccgcactagtgatgcccgatagctggcgcgtttgtagaaccgtcaaaaactctagctaaagtttaacagttgattatgatcttttaacggaaatagaactgtgttagtgtgagaacacaaagtatttctaaaaattacaatctatttccaaagaccgtaggactgaatgaattgtgtgtatttaaaagaaaaagtcaggtagcctagatttaaatggtttgtttcttgtttaaaataactatgtaaattatatatatatattgtaagctagaaacaagaaatggcttgaaactcatttaaatctaatggcatattattccgagtgcaccattcaccgatttgtgtgcaggttttctaaatacaataacaatcattggtgaaaatgatgaaaggcaaggcttttcttgaaccgaaaagcttaaaaagaagctgcacatgggctgcgatctagacatgataagtaatatttattcaattattgtatttacatatgtatttcttgcgatcatttaagaccctaacacctcggaagaagcattgctgttaatgtgcagctgtgaggccactataaggttgttacaattcgtttcaaggcaattattcgaaagtaaaggacccccaatgaaattctgaacagactctagattataagatagactatagataatacaccgctgtcggtgtgtactaaatgttgattatgttgattaaaacattgaagacattagtaaggtggttgagctatgaaaatcatcgattactctgaattcatgtgctaagttaacgggcatcatagaccttcaagatagcataaacgtggaagatggtgtccatatgggcctgataaataatatatatgaaatatatatccaaaattgggtcgcatttgaagagtttaagacattcagctgaaggatgtccttgcggaagactcgacacagattggaatcaataaattcagccgattctgagttatataatgacattatgacatcgaagccactgttgaaaatgttcgggaagactgactccgtcttggtttttatgtcagctatgttttgaaattacctagtatggcatatattgaaaaatttctgctagactaagcat

SEQ ID NO: 98 - DNA, 4340 bp, DROSOPHILA
acactaacacagttctatttccgttaaaagatcataatcaactgttaaactttagctagagtttttgacggttctacaaacgcgccagctatcgggcatcactagtgcgggcggccgcttgcgcgccaaaagcagtcgcgttttatcgataacggcggagcagtattgccttagcgctttagcgagattccagcgtgtccactaaattgcataaaaagttaaataaaagaaagttggataggccgcgcagcagcagcacccaccaaagaccaaccatcccaagattcacggcaatcacgaaaactgaccaagagtgcagtgcgcttgtttgcgaaccttggcaacccagccagttgttccgttctgctctttttaggcggccgccgttgcgtgaagactgaagtgaaaatcgtggtttccacgagttcccgtgtttcgattcatttgaaccagacaggataagatggcagcggatcaggcccatttccagcagcttctggcctccctcttgtccacggacaacgatgttcgccagcaggcggaggaagcatacaacaatctttcaagagagctgaaggtgacgcatctcctgggcaacatccaaaatggccagcagtcggaggaggctcgacagatggccgccgtgttgctgcgccgcctgtttaccaccgagttctttgatttctacaaagggcttccagctgaatcccagaaccaattgcttcagcagatccttttggccgtgcagcaggaggtgacgccgcagctgcgtcgcaagatttgcgaggtagttgccgaggtggccaggaatctgatcgacgaggactgcaacaaccagtggcccgacatcttgcagtttctctttcaatgcgctaactcgcctacgccgcagctgcaggaatcggcactgcggatcttctctagtgtgccttccatatttggaaaccaggaagctcagtacattgatctgatcaagcagatgcttgccaagagcatggacgctggatccgatccggaggtccgagtacaggccgtgcgagccgtcggagccttcatcctctaccacgacaaggagaacgagacggccatccacaagcacttcgctgatatgctgccccgcatgatccacatcactggcgagaccatcgaggcccaggatgatcagagtctgctaaagctcctgattgagatgaccgagaattgcccgaagttcctgcgtccccagctggagttcatttttgaggtctgcatgaaggttttcagctcgcaggactttgaggacagctggcgtcacctagtgttggaagttatggtgtcgctcgccgagaacgccccgtcgatgatacgcaagcgagcggacaagtatatcgtggccctgatcccgctgattctccatatgatgacggatttggatgatgacgagaactggtccaccgccgacgtggtcgatgatgacgatcacagcgacaacaacgtgatcgccgagtcctcgctggatcgcctcgcctgtggattgggaggaaagattgtgcttccgctcgtaatgaacgctctgccggttatgttgggtcatgccgattggaaacatcgcttcgcagccctcatggccatctcggccatcggtgagggttgtcacaagcagatggaagccatcctagatgaggtaatgtccggagtcctgaacttcctgagcgatcctcatcctcgcgttcgatacgccgcttgcaacgccattggccaaatgtccaccgactttgcacagaccttcgagaagaagttccacagccaggtgattcccggcctcttgtctcttttggatgacgtggaaaatccgcgagtgcaagcacacgcaggtgccgctctggtgaacttcagcgaggactgcccgaaaaatatattgacacgctacctggacgggatcatggccaagctggagactattctgaactcgaagttcaaggagctggtggagaagggaaacaagctggtactggagcaggtagtgacgacaattgcatcggttgcagacacctgcgaatcggaatttgtggcctactacgatcgcctaatgccatgccttaagttcatcatccagaacgccaactcggatgatctccgcatgcttcgcggcaagaccattgaatgcgtgagcttgataggattggcggtggggcgggagaagtttattggtgatgccggagaagtcatggatatgctgctggtcaatcacaccgaggggggggaactagctgatgatgatccgcagacctcctatctcatcactgcctgggcacgtatgtgcaaaatccttggcaagcaatttgagcaatatctgcccctcgttatgggaccagtgatgcgaacggccaccatgaagcctgaggtggcgatgctggacaacgacgaggtggaggacatcgacggtgatgtggactggtctttcattaatcttggcgagcagcagaacttcgccattcgcacggctggcatggacgacaaggcttcggcctgtgagatgctggtttgttatgctagggaactaaaggaaggatttgccgaatacgctgaggacgtggtgcgtcaaatgctgcccatgcttaagttctacttccacgacggtgtccgcacagctgctgctgagtcgctgccttaccttctcgactgcgcaaaaattaagggtccacagtatctggagggcatgtggatgttcatttgtccggagctgctcaaggtaatcgtcacggaaccggagccagacgtgcagtcggagctgctgaattcgctggcaaaatgcattgagacattgggtccgaattgccttaacgaggatgccatgaaacaagttctcgagattataaacaagtatgttctggagcatttcgagcgtgctgacaagcgtttggcggctcgcaatgaggaagactacgacgacggtgtggaggaggagctggccgagcaggacgacacagatgtttacatcctttccaaaatcgtggacattacacacgcccttttccagaccaacaaggctcagttcttacccgcctttgaacaggtggctccgcactttgtcaagctactggagcccagccgacctgtagctgatcggcagtggggcttatgcgtgttcgatgatctgatcgaattttgtggccccgcttgtgctccataccagcagatctttacgccagccctcgtccagtacgtgtgcgataaggccccagaagtgcgccaggcggctgcctacggatgcggggtgctcggccaattcgctggtgagcagtttgcgcatacatgcgcccagatcattccactgctggtgcaggtcatcaacgatcccaaagcccgcgaaatcgagaacatcagtccgacagagaatgcgatctcggcgtttgctaagatcctcaagtacaacaactcggcgctgagcaacgtggacgagctgatcggtgtttggttctcatggctgccggtgtccgaggattcggaagaagccgcccacatctatggctacctatgcgacttgattgaaggcaaccatccggtcattcttggggcaaacaacggcaatctgccgcgcattgtctccatcatcgctgaatccttctgcaccaaggtggttgaggcgcagtccgccaccggcactcgtatgctcactatcgtcaaacaagtggaatcgaatccggaggtaatggctgcttgtgccagcaccttgagcccggaacagcagcaggcgctgcaggatgcctaccgggagctggcaaacgtggctcccgcctaagatatcgcaatcccaatcctcttcagaccaagtccattcatgtcgaccaagccaagaaaggaacgatggatgcttcagctactcgttatcattatttttcatcttaccgaaattttgaagtatatgtttaacacatagatatccatttatacagatatacatttatgtgtacaatagagttatccgggtatataattctatacatattgtgattttaatcaaaactcttctcccgaagacaaaagtctgcctcgttagaatttgatatgttgtatggatgcgatccaaatgccatcccaatcacacccaaattccaatagaatattttcgttactcaaattttcatatgtttaatacatatgtgtgtatatacggccctaacggccgcctctccctgcggggaaaacaggatgtaaacgttgtccgaatcgaacgaaatataattttgtgcattcaaaccaggatcgacaaatatatttaaaggaataacatttattgtattttaaacatgataaaaacgaaataaataacaagtaaatcgatattttaattgccacga

SEQ ID NO: 99 - protein, 1105 aa, DROSOPHILA
MAADQAHFQQLLASLLSTDNDVRQQAEEAYNNLSRELKVTHLLGNIQNGQQSEEARQMAAVLLRRLFTTEFFDFYKGLPAESQNQLLQQILLAVQQEVTPQLRRKICEVVAEVARNLIDEDCNNQWPDILQFLFQCANSPTPQLQESALRIFSSVPSIFGNQEAQYIDLIKQMLAKSMDAGSDPEVRVQAVRAVGAFILYHDKENETAIHKHFADMLPRMIHITGETIEAQDDQSLLKLLIEMTENCPKFLRPQLEFIFEVCMKVFSSQDFEDSWRHLVLEVMVSLAENAPSMIRKRADKYIVALIPLILHMMTDLDDDENWSTADVVDDDDHSDNNVIAESSLDRLACGLGGKIVLPLVMNALPVMLGHADWKHRFAALMAISAIGEGCHKQMEAILDEVMSGVLNFLSDPHPRVRYAACNAIGQMSTDFAQTFEKKFHSQVIPGLLSLLDDVENPRVQAHAGAALVNFSEDCPKNILTRYLDGIMAKLETILNSKFKELVEKGNKLVLEQVVTTIASVADTCESEFVAYYDRLMPCLKFIIQNANSDDLRMLRGKTIECVSLIGLAVGREKFIGDAGEVMDMLLVNHTEGGELADDDPQTSYLITAWARMCKILGKQFEQYLPLVMGPVMRTATMKPEVAMLDNDEVEDIDGDVDWSFINLGEQQNFAIRTAGMDDKASACEMLVCYARELKEGFAEYAEDVVRQMLPMLKFYFHDGVRTAAAESLPYLLDCAKIKGPQYLEGMWMFICPELLKVIVTEPEPDVQSELLNSLAKCIETLGPNCLNEDAMKQVLEIINKYVLEHFERADKRLAARNEEDYDDGVEEELAEQDDTDVYILSKIVDITHALFQTNKAQFLPAFEQVAPHFVKLLEPSRPVADRQWGLCVFDDLIEFCGPACAPYQQIFTPALVQYVCDKAPEVRQAAAYGCGVLGQFAGEQFAHTCAQIIPLLVQVINDPKAREIENISPTENAISAFAKILKYNNSALSNVDELIGVWFSWLPVSEDSEEAAHIYGYLCDLIEGNHPVILGANNGNLPRIVSIIAESFCTKVVEAQSATGTRMLTIVKQVESNPEVMAACASTLSPEQQQALQDAYRELANVAPA

SEQ ID NO: 100 - DNA, 4985 bp, DROSOPHILA
aatgtaaatatagtctaggagaaagttttaccaacaataggggttatagtcattcatgttatgttatgttctgattcgggagctgaaccctaactaaatatatgggctccttgatatatgacacttaggacctatagaatatcacattctatatctcgtgtataaaacaaaacgtgaagttttaccatatttcgccaaagtatatatgtggggttcatcgctcgttatataaattcctaacttgtttatataaaatttgactcgttccgcaaagtttttgcttgatcagagtgctttttaagataggaaaaaagaataaggaataagatagctatatagagtcttaggaaatggttaggaaataatgcaaataacataaccttttcaacaatataagattcaaaagtctgtaacttcaggcgatcggaagctatgacagtacttacgaggatttaaagccgctaaattagacggctttttattgatcgtcaatctaaagatacttagatcaacatttgttcacaatttacatggtacgttcatactaaattccttgctaaaattgttaattcttttaaattagtgaaagaggactgagttgtgtatcaaaaatcaggacattttaatttaaaaacaaaagatacccgatacttagcggttggagtgctaggaagctagaatttaggttatacaaatatacaaagtgaattaaacatttttctttttaatactttctagcttcggtttatctacaaatacaaaagtaaagcatttttgaacactaaaataaggttttgatgcaaaatctttcgaaatatcttttttatgtgttattgaacataatatttatttatattttttcttttaattagaagctataaatggcatataaatatttcaatataataataataataataataataataataataataataataataataataataataataataataataacatgtgataaattcctttggttttcccgctattccttcaaagctcgaagatccggataaagagatccggcattaatataatgagattccgatttgcgtaagtctcgcttgtagtcactgaccacagcttctcctgttcgtttgaccattttcttggcaatgcccttcggggttatgtagttcacgttctgactgaccacgaaaacgttgcccaccgtgtcaaaggtgccactagccagattccccgtctgctggccatatctgaaatagcaaataaatatatgtaaatatatgaaatattaaaaatgcccgcactatatgtttttctttttcgaaggcgaaagaaacccaaaatgaatatctagatcttagtagacctttagtagcattacatatttgagacgattcacaacaagttataaaacttttctttgtgtgcaagcttgagtaacatttcccgatccttgatcatttttgcgatcctctgcacattgcgcataacttaaatctcagatatatttaaattgaataaaccgttgccagcctaagtgattactttcaattcggacgaaaattcgtaatgacatctgttacaaaactgcataagcattaagaagccaaagccaacccacttgtgttcgattatcttgacggagttttcactgaggctggagcctaggatcttggcggaagtctcgaggccatcgaatacggtgctcactccttccacggctcctgccgcgatggtcatggcgccctccatggtgctattagcctcgctggtgtcgtagccaaatcccttctgcagcagtttagagccttgctcctgaatgtggggagccaggtagcggccgactgccattgaagcagtgcccacctttccagctatccatcctgtcattccggctgcggcgtgcgtcactttttgggccacctcaactataatgaacaaaaggttacaacataagatacattagatctatcttatatgtaatctgcacatttccaaaccattgattaacatgattatcaaacacaagcacaaactccgatcgaggtggaagtgtagtgacgatcacatcttcgacttcgaatcttatcttctaattttatcgttacatgctcattcggaagctaccatacttccgccctaaatacagctcttccctatttggaactaactcacctgaagtttggacggagctgggcacctgagcatccatcgaggctggcgtcatcttggaaatgatatacggagtactcctaagcataaagcctcctgtcttctcggcgccccgtaccaggttactagcaatgaaatcagccgcacttacaatgtgtctggacacctgctccgacccggaaacggtatctgaagctaggccagcacgttgggaggtcggcgatttcagctgcactaccgtgccagcgagtacggcctccaacaggtcaagaaagaactgctgaagatcctccagttcgtcctccgtgcgcgatgtctggccctccttcgttagcatcaaaccaaatgcattgcccggctgctggcactccatatcaggaaaaataaaggctccgtactctgtttggtagcagtttgtgatcgagggaaccagggggtaaagccaaatccctgcagtcccctcatttggcatggagcactgaatgaagtagatgccactgaggtacttccatttgccacccacggtgcacattaccaatgacatagttgacgagccgcttatggtggttactgatccactggcttcgattcggtacattttgacctgtgcacggaagagctcatcgagcaagactttggcgtcccgaacagccaagagctcccgcaagccggcagcgagctctctgtaggtttttggtgctccgctagcattggctatgccatattgcgtggaggggttttccgccagcaacggcggcctttttgtatccatctctgctcgactttcctccgtggcctccacggctgaatcatcaatggattgtttctgggatcgcagaactttgaggcggtatctcaattccgtttcggcgctcttgagcttttggatcagcgcacaggcgtcgttccactccgcctgcacggtgtcgatcttgttgggaagacctactggaatgccgaaggtgtcctctatcatacgcagggccagctcataggccacaatggcctggccgggggattcctgctcctcgtgacttacggccaggtccacctgagtcatggccgctttgtaggctgttctgatgccagcataggcctccaggaattcgctttcctcctccgccatcgcggcctttaatacctaagaaacagcacagaaacattagatactatacaaaaaaccaaagccctcaaaactttagtatgtagaactaagaatctattaaagtcaatgactatggttatttatggtttagttagtatacatgttctatgtgctgtctttattcttatgaatccccctttcgcaaagttctgtgtaagtcttatagtgcaaattactacatattttgttaatattcgtgagatttaagatattgtaaacgaacttgctggcagagatacatcccgacgaggcgggcaaccgcgaccaactaaaagggtgaccaaaatgcgtcaccaaagtgggaatgacgcgcttttacatcttctcctgcagctgctctaaattgaactgtggccaacgaaaccgcatccgcccttccgctgcactcaccgtctacctgttgcactcactcacctttgggttttggtttcgtctgattctgagcgtttaatctgcactttgcccaccaagtcacctaatgatttagaaagcaaacagagaaacgctctctttcgctattttctcactaattttacgaattattttctgctcctgtttagtcgcacacctttaaagtgagaatatcgtttgcctaatatcacttaaattcgtaaataacatgttaaaatgtgtgttttccattcgagttgaatgttccaagtttttccatctttgttttgatttgcttactttccattgcgaatcagatcagctgtttaggaggcctctgcatgttcactgccacagacagagttgccacaacgacttttgaaaagtcttttgcgggaatcgaatttgaaattgaatgaatggttaataataaaaagcaatactaaaacataagctcgtggcaattaaaatatcgatttacttgttatttatttcgtttttatcatgtttaaaatacaataaatgttattcctttaaatatatttgtcgatcctggtttgaatgcacaaaattatatttcgttcgattcggacaacgtttacatcctgttttccccgcagggagaggcggccgttagggccgtatatacacacatatgtattaaacatatgaaaatttgagtaacgaaaatattctattggaatttgggtgtgattgggatggcatttggatcgcatccatacaacatatcaaattctaacgaggcagacttttgtcttcgggagaagagttttgattaaaatcacaatatgtatagaattatatacccggataactctattgtacacataaatgtatatctgtataaatggatatctatgtgttaaacatatacttcaaaatttcggtaagatgaaaaataatgataacgagtagctgaagcatccatcgttcctttcttggcttggtcgacatgaatggacttggtctgaagaggattgggattgcgatatcttaggcgggagccacgtttgccagctcccggtaggcatcctgcagcgcctgctgctgttccgggctcaaggtgctggcacaagcagccattacctccggattcgattccacttgtttgacgatagtgagcatacgagtgccggtggcggactgcgcctcaaccaccttggtgcagaaggattcagcgatgatggagacaatgcgcggcagattgccgttgtttgccccaagaatgaccggatggttgccttcaatcaagtcg

SEQ ID NO: 101 - DNA, 1929 bp, DROSOPHILA
aaaaacttggaacattcaactcgaatggaaaacacacattttaacatgttatttacgaatttaagtgatattaggcaaacgatattctcactttaaaggtgtgcgactaaacaggagcagaaaataattcgtaaaattagtgagaaaatagcgaaagagagcgtttctctgtttgctttctaaatcattaggtgacttggtgggcaaagtgcagattaaacgctcagaatcagacgaaaccaaaacccaaaggtattaaaggccgcgatggcggaggaggaaagcgaattcctggaggcctatgctggcatcagaacagcctacaaagcggccatgactcaggtggacctggccgtaagtcacgaggagcaggaatcccccggccaggccattgtggcctatgagctggccctgcgtatgatagaggacaccttcggcattccagtaggtcttcccaacaagatcgacaccgtgcaggcggagtggaacgacgcctgtgcgctgatccaaaagctcaagagcgccgaaacggaattgagataccgcctcaaagttctgcgatcccagaaacaatccattgatgattcagccgtggaggccacggaggaaagtcgagcagagatggatacaaaaaggccgccgttgctggcggaaaacccctccacgcaatatggcatagccaatgctagcggagcaccaaaaacctacagagagctcgctgccggcttgcgggagctcttggctgttcgggacgccaaagtcttgctcgatgagctcttccgtgcacaggtcaaaatgtaccgaatcgaagccagtggatcagtaaccaccataagcggctcgtcaactatgtcattggtaatgtgcaccgtgggtggcaaatggaagtacctcagtggcatctacttcattcagtgctccatgccaaatgaggggactgcagggatttggctttaccccctggttccctcgatcacaaactgctaccaaacagagtacggagcctttatttttcctgatatggagtgccagcagccgggcaatgcatttggtttgatgctaacgaaggagggccagacatcgcgcacggaggacgaactggaggatcttcagcagttctttcttgacctgttggaggccgtactcgctggcacggtagtgcagctgaaatcgccgacctcccaacgtgctggcctagcttcagataccgtttccgggtcggagcaggtgtccagacacattgtaagtgcggctgatttcattgctagtaacctggtacggggcgccgagaagacaggaggctttatgcttaggagtactccgtatatcatttccaagatgacgccagcctcgatggatgctcaggtgcccagctccgtccaaacttcagttgaggtggcccaaaaagtgacgcacgccgcagccggaatgacaggatggatagctggaaaggtgggcactgcttcaatggcagtcggccgctacctggctccccacattcaggagcaaggctctaaactgctgcagaagggatttggctacgacaccagcgaggctaatagcaccatggagggcgccatgaccatcgcggcaggagccgtggaaggagtgagcaccgtattcgatggcctcgagacttccgccaagatcctaggctccagcctcagtgaaaactccgtcaagataatcgaacacaaatatggccagcagacggggaatctggctagtggcacctttgacacggtgggcaacgttttcgtggtcagtcagaacgtgaactacataaccccgaagggcattgccaagaaaatggtcaaacgaacaggagaagctgtggtcagtgactacaagcgagacttacgcaaatcggaatctcattatattaatgccggatctctttatccggatcttcgagctttgaaggaatag

SEQ ID NO: 102 - protein, 553 aa, DROSOPHILA
MAEEESEFLEAYAGIRTAYKAAMTQVDLAVSHEEQESPGQAIVAYELALRMIEDTFGIPVGLPNKIDTVQAEWNDACALIQKLKSAETELRYRLKVLRSQKQSIDDSAVEATEESRAEMDTKRPPLLAENPSTQYGIANASGAPKTYRELAAGLRELLAVRDAKVLLDELFRAQVKMYRIEASGSVTTISGSSTMSLVMCTVGGKWKYLSGIYFIQCSMPNEGTAGIWLYPLVPSITNCYQTEYGAFIFPDMECQQPGNAFGLMLTKEGQTSRTEDELEDLQQFFLDLLEAVLAGTVVQLKSPTSQRAGLASDTVSGSEQVSRHIVSAADFIASNLVRGAEKTGGFMLRSTPYIISKMTPASMDAQVPSSVQTSVEVAQKVTHAAAGMTGWIAGKVGTASMAVGRYLAPHIQEQGSKLLQKGFGYDTSEANSTMEGAMTIAAGAVEGVSTVFDGLETSAKILGSSLSENSVKIIEHKYGQQTGNLASGTFDTVGNVFVVSQNVNYITPKGIAKKMVKRTGEAVVSDYKRDLRKSESHYINAGSLYPDLRALKE

SEQ ID NO: 103 - DNA, 30598 bp, DROSOPHILA
taaatcatctgcaaattgatttcaaaacttcgacagctaaccaaaaaagagctgccgaaaaaaaaaggcaaatgaaaactgcagcaaagcggagaaattttatgagctgcagcatatgttggcaaaaacacaaataggatgcactgagaaaacagcgtttcatatatttagtttagttataaataaaatacgtgagaggagctaaacaaaagttttttttttttggttttttttttgcataaacccaaacaaatatctgtagactgacagatagagaagaattaaattagtgtcatatccagtgaaaaatatgacaataaaacataaatttatatttcaaatatattccttttgtttttccgtgaacgaattccccatgaaaaactccgatttctgcattctggcacgcggcagcagcttttcccccgaaggattttcgtcggtccccgaactaatatcaaattgatagcttttaaatttgatttcgcgtcttatcaccgaccgcttaagcgaacagtttcggagctgcagcccccaatcgctacgcaatccacagcgatggttggaaaaacaaatggagtgtggccgggtggagggagcaccccctcatgcattaaaaatgaggatggcagggcatttgatgctgtgcaagtgcaacgtggcgtatgcttgttgtgttttgttttgctcgctttgcgtccgcattgaaaatacattgaaaatgccggtgcaacacaagtgtttcggccttgatacggatacgatgctatatgctggatatagagtcatccatccgaccgtcccattcagaatccataggcttcaagtcacatgccggccaactaatatcgagcactcttgagaacgcagagcctcaggaaaatgttatcacagtctgcatccggcacggagtcctccgcctctgccgaagtgcaactcggcgattcggttcaaattccgctttacagtctctgctcctcggcgctcagatgctagtcggcatttggcgcgtgcagttcagttcagttcactcggtcgaaaattgcccggactcgtttaatagcggaatatcgttctaaaattaaacatttcgcggaggcactgagagaaaactatcgctcgaatcgctagtaattcggtaattttgcttagcaaagcgaggaccagaaataggaagaaaatatttgttaaaataaaaaaaatagttgtctaatgcccaaaacaatagtgttggaaaacaaatgaacaaatttgtaaaatccaagatagtattgaagaaaaaaagaattttttaaatattccctttggaattagataggaaatagattggattactaaaaattatattaaattatattcgttttatagatacgtttccaaaatttttaaattaagtttttcgaatatttgctggattttgacagcttatcagttactagccctttaaatccataggttattttttaggagcagataagaccgtttaggataccgaatgttatctcttggaattctctttgtgcagctgcctgagcttctgtgagtcgatatgtgagccgcagtgccacagtgttttagggaccacacttggtgataaccgccgtccagcggcccagtgataagcgagtggttcgaacttccgcccctcgcaggcgattgtcgtctcgagtcgagttgcttgaacagttcttggaccaacatccagttggtgagaagtgcgcgaaactagactgccctcgaaatgcgatttatgctgctcatgctgcagctgctcggcctgctgctcctcctcgccggcggagtgcagtccgtctactgtccggctggatgcacctgcttggagcgaaccgtgcgctgcatccgcgccaagctgtccgccgtgccgaaactgccccaggatacacaaacgctgtaagtacttcatggacttaagatcctcctcctcccaaatcaatacatatatatcacaagtggggtttagaaatatcgatatttattcaaaatacataaacagttcgataaagatttatagtgctccttgaattccaagcttaagttcaaaattgacttttatacgttttccaatttgggcttcttttcgtcgagtgtacataaatcaacgcgggagttggcttgcaaatccataaattagtttttaatgttttctgtgcacgctgctaaaagttgacggcgttaatttgacgccacccgtttctgctcctccttccgtcgaaccgccccaaacccactcccatggggcctgctcctgctcctgcggaatccatgaatcttccgccgagctgcgctgcgatgttgactcaattaaacggatgtctaaccggcaaaagctgactgcgatttgtgtatttatcacgctgcctgtcgcgtatttgcatgcatgtgcaatatttctgacgttgcatttattttcgaaaatgtcagcagttttcgcatgaattttgggcaccacaaacaacccttttccgcatccaacgcaaataacttggcaaatgtttgcggagcatatgcatatttatgtaggccgtggcatgtcccaagccggaggagcaacctcgcatcccgggcagaatgcaccagctgctgcagccggcggcaagttatcagacagaaaaacagtctccactggagggcaacaagatataaccgtacagacgggttatacggttttcgtggtatttacggagaattcaatttccagcggggttgagccgcatttgatggccgggattcggggattcgcagagcgaaaatgctgcgaaggatattcacacacgcccgacaggtgcaaatggtggtcctggttctgggaataggtgaagccactcacttcacgtgtcaacgaatcgaaaagccttgaacaaatcgattatatggcgctttcgaaactataaagtgctctcaaccggtaaacattattcgctgattcgatgttttttgaagcactttcgaatttaatctgatacagtttaaatctaaaaaaaaaaaaaaaatgcaaatggattttccactctcaatgatggataattcaacgctcatgaggtggaaaaaatggcattaaattgcttgattaatttatataagccgaaagaaaatgttgcagcaaagaggtggattttaaaactcctgacaggtggataaattccacctgtccgtaaaatgggtgaaaccaattactgcagctgtcatcgaatttggagtccccaaataaatggatttcatttcatcatcggtggaattacccatttttgatcatttggtaatttaaagactggcttcaaatttaaataaatattttattccattaagtagcgattgacacaacaaaataaattggtggtattagattatgcatttaagctcgctcgacaggtgacaaaagcatgaaaggttggctagaataaaacaaaaaaaatcgaaaatgttatatgcaactagaaacttctctgaccgcagccgaattcataattgagttaaccaacaaaactatgtgccagcaacaatgcctttgtatttaaatatgctattgtgcaatccacttctccatcgaatccacattcatttgcaatctcaccaggaggatcacatacattctttgccatttgtttggctcgccgcacaacaatttctcaaaatgggcaaaagctgtggaaaaatggtttgggtagccaacagcatttggcagtacttaaattaatcttcattttaaataaggtgatggctgcataatttatcatgcctccagagcaacagcattcgcacacaacaatagaaaaaagaaaaaaaaaatagaacaaaatctgaaaaacactgaaagtctgaaaaagagagcaacttttccgttgccattgcgattcgcttttcatttattacgcagccgacccgttgcacacttttaattaatttgtttcatttattactgcatgtgtctaaaagttgctcttgttctccacccaaaacaagtgcatgtttgtgcatttcgcttttgtctgaggctgtcgactcagattccagctttctttccataattctcgtaatgtttctcggcagtcgacgaaaaatatgagcacacattttcccagccagagacactagcattttatagctcacacatgccggcatttcgattcagacatcatgaaaatattcttgatttaatttccttaatggcgagaatattgtttacaatttctgtcgggaggtcagtgaagataaatgtcgggcaaatatgaaagaaacaacgtcgaaatggtaaatgccaaaataatcgagcttaggtaaaatggaaatcaatttcgagttaaattggacaaagaatggacagaaaatgtgatatatatttttaaaaaatatgaaaataatatgataaaggatttgccttttgtatccaagtatctatatctatagttcggtcagtatgcttaacgatcttcaagatcagttttaagagctttccattcaaagattttccaaccaaacttacaaaagccttttcagtgaattctcttctattttgcacacttcagctgccattcctccttcaatttgatgctgcagcagcttcagtctgctcaaggcctaagccacatttcacttctttcaaactgtccatccatcaggcataaagtcgctgccttcgcagccattgaaagttctcgccgagatggggccataaaaaatgctgctgcagctccacatccacacgaaacatgccttttatatccttgacttgcctcgaacaaaggcccaaacattttttggcccgtcccgtgtgtatttaaactggcaactaaatggaagtcgaaactgtgtaacatacggcatcattcatcttgccacgcccccacgctgcacccgcccgcctccaaccgcccactcacatggcagctttttttccccttccccccctcaacagagctaaataaatgcacttgatttcatttcatgatgatgcatttttagctgacctcccataaagcacacatctcgacttgctccgccgtggaggcagttgctttgtcattatacccgggaacgagaagctagcccagtggaccaccagttggcccccatccattccggactcctaagccagtacttacttttaaggaccgagaaaaaattgcttttcaatggggcaaaattggtgaggaagcaatttgtgtggcaaaaggtcaaacgagattagattcaaaacaattatgcaatttaaagcggagaatagtcattattcactaaaaaaaatagagagtcttaaaaaaaataaagggaaaaagaattattagatagattttactaaatttaataaaaatatatatagagaaacttaataggaattaattgtaataatatattaatatacaatttttgatctttgatttctttgcccccttttcgctcagtgtatcctcagttgaaaagacgagcacataaatcgcacatgtagccaagacatatgaactgaatctgctcgccggcagcagctacgccacacatgctatcatctaataacttggccattatgcacatatgaaatatatctcataatgccgcaccgacttgccacgccccccccccccttgctcgatgcccactgccgcccactttgcggcggtgtgtcaaaacaaaagtcgccgcacgttgcatgcatggcatattaaaaagtttgattagcgtccagttcgctggctctgccacgcccacccccaccacgcccactctcggacaacatgccacaaatacagacacacatatgagcacaaacataagagagtatgaatacaaatacatatacatatggacaatatttggctcgactttttttgcgaatcaactatttgcgaaaactattttgctagcaaaaatgttccaactcccctgttgctcctgctgctatttcattcaccctctttaggcttcccatatatacatatatatatatacatatatagggaaaaaccggaaaagccccgattttgccgttatactttcctgaatttctcatctcgtcgagcgcatttatgcgtgagaaatgccttgtatttcgaagctggtctccatatccttgttcctgttccatatccagttgctgctgccatgttgttattaaatatgcataaatttcctttttgcacaggacttttgcatttacatttgctgtttatttgtcggtgggaatattgaaattgttaccaatggataacagattccagccagcacagagaacttgttttccggtgggccacatggagtcggatcttcggactcaggtgtggatgaatacctctacctcggttgggcgaaggtgggagttgaaggacactgtatctagatctatctatctgggaatgtatacaggatattcaggatatgcaggctggatgcggataattataacagccggcaagttgtcggttcaagtttctgaccgatttgtgagtacttcacttcgtttgtgtcgagttatgaagcttatagttttgcaaataacttgctaatgagatttattattaataaccatagtgcttttgccgtttctcagaaattctgtgtattttgcacattatttctatacattttatgcagtttctgcatgagttatgaccagcttattgagtactgtataatttgaaagtatatgtttcattaagaccatatttcgataaatcaaatttacgaaatgctgcctatttcctctggctaaataataattaataataggtaaagatgtttttgtgaaaaccttaatgcgaattagttaaaattattcatgttatttatggctttacggctctctgcagcttttaattaaaatgtgtcgtaaacaaacaatattcttggtaataacaacacattagatgtgtgcacaatacaaaattcagactgctaaaaaaagtggtacactgataaagtgattataacaaatttacataatttctaaagaatgaaataaacaggattaattaaaactaatcttttgttagatattaaacaattcacttaaattcatttaattacgcatttccgttggatttaatttcactaagtggtacttgcaattgaaaaactcatcattcttccgaacatcgcagtgccatcaatcaaagctgtctgcgtttgtctagtgataaatcctctaagtgcattccgaatccaattaccaatcaatcaaagagcatccaatcgtcgctgtctcattcgcagactgccacgccccaaaaaaaaaaaagcgtcgccccttttttgtgaaatataatatatattgttgttacggttttttgcccttgccgttcagtctggtttgacttttcaattgttgccatatttttgcagagcgcaaaaaaaaaagcaatacatggaaataaaattaaattgcgtgtgtaaaattcttaccattccgccacccaaacagtaatatgatttgtaattatgcaaatgaagcggtagaccagcggactcacttgaatgggcgatgcattttccattgattaaagctgaacgctgacgaaatattcactttttacatggcaaacgtcaaagggaaatccccgaaggcaaagtttttgccaatcaaagcgtatgcatttttaattcactgtcacaggcagaagtggaaatggagctgcaaaatcgactggcgtctctcgattcgtgaatcgagatacgagattcgagattccggtgctaaagactcgagggtcgagattacggattccgccaaggaatctgtctgccagtcagccaggcttcgcttcactttgacatagaaaaatcttctattgatttcccgaaactccccctcaatttgcatttaaagttggacgctaccatttctcccacctctcgctctcatcccgctttaatgctacaaagtgccacttggttcatttgctagcagttctcctgctccttcggatcttgccactgccccatgccactgccccatgccactgccacgcccaccagctttgtcatttcgcatgctcgttagtgcggagcaaagaatgcaaagtagcaagatagcaagagctgtgtggaaaatacagcagtagcagcagcaacatcatcgctgcacaaacacatgccacaatttataagcaaagttattctgccaccgagaaatgggtggccagaggggcggggggcgggtctgtggcatctagcaacatgtcaaagtggagcaatcggcatgtgcaacggacacagaacaggacactgaacacggaaaacaggcgtgcactgcgccaaaaatgaggaacaagttgcggctttccaaggcaatattaagatgttctggcgcccactgaaagttttccatcaatgaatgcaaatgttgcacagctactgaatcatgaaagtaaatatactttattgtatctagctttaaagaggcaggcgagctatttaatgttgtctcacaaattcgcataataataatccctccttcgataaaggaatagattacagtcaggtatagattacagtgcagtcctggcaactggcggcggtcaagcataagaaacaagcagcatcagcagcagaagaattgcagcagaagcgtagctgcagcccataagtatgctatggcaacggagcgaagcccaaggaagcgaaggaataagagcgcaaataaaaacggtagacggcgactgctggatgcggaaaacctcgtcctcaactgagctccttgccaggtgagatgccaccgccatgtggcacgaactacagtcaacagcaggcgtgatggccaagccaagaaaaaacaagtcagcaagacttgaatgtagcttagcgaaatgggagatgctctttcaatgaatcaactaacgatttaaaaagcaaacatttaaatcgaatatttcgtttattagaaattaattaagcaaagagcttatcagtttcattttgaacctatatcaattggcttgaaacgcaggacctttcaaaagggtatttccgggcgtcaaagaaaaaggacctcgttcactgctcaaccaggcggcaaaccaagtggttcggggtccatggagtccaagtccgagtccgagccaagtggcacaccacgtaaccagcagatagcagatacaagattgccggtccgggtacggaacttgccccagacagatgcataataatgttaatgtaagcgcgaacgacttgtgggctgtgggtagagtatgggttaccatggcgtatgcgtaatatgcaagcaaatttcaagctatactcgggcgtgtgagttgcaggccaaatcgtaaagtgaacattaaatacttggaaattatgtagttagtcatctgaaaattggaaaattaaatttaaatttctttaagaaattaatagctatcctttctaatttctaatttctcgtgggtaaatacacttgaacaattttcatagatttagaaacgctttgttatttgttatttcatttgcccggaatatttatcaattttcatccagcccagccaaatatatttatgccccacgaaagccgaaatagaatactgcatcaagagggctttagttaatattcgccttttatacgcatattaaaccgtttccacttgaatggcgaactgatttcattgcatttttataacgcatatatgttgcatggtcggcgtgtgggctgagtattgccttctcaaataaaaacgaagagctgctcatgcacccagctccatgctcgacatataaatctgctgtataattgaatttcacacgttgctggggcaaaaaaaaataataccaaaatggtgcacagagaataagaaaaaaagtgcataaccagcggcagcgaaagtttaaataaaatttatttcaacaaaaatacacacactcgttgggcaaatgtgtgtgcagagatggcagttggctggaaatgtgagaattatatattgaagggcgcacaggtagtaatgctggtgcagctcctccaggtggccacttttaaccatgaaggtgtttgcctggccaaactggaagcagcttaagcatgccacaacgagcagccaggatgatgagggcgggctccagcgatggaaggacgatagaggactcccttagacagccggcaattgcatgtgtgtgtgcgggtggagtgcacttgtgagacatttacacctgtagaagtgtcgatgggaggggcggctgagctgggatatgagccacggctgaaggagcttttcaggcgcaacacattagcaaaagtatcgtaaaagtattcgctgcagcatacgagctccagtcctcacgaactcaaaaattatactttgcaaggcaaaagtatttggtttgttttatatttattcttattgcaaaagatgctaacaagtttttaatatggttatactcatgagtgacaatgaaacgtagttcagagcaaaaggctagcagaaataaaggtgtttgaaagtatgcaaccttttttttcatcacttttggtttcttatttaatctactgcacttcaaaatgcaccaatcttggtgataggtttttggtttttctggaaaaacttcagaacggttaggtcaaaaaacggcggagtgagacagcatttttaagtaagaggaaatttgtagaccgggcatttcgttggcctttcgttctaccattttgttttcctatgctccgagggattttccacccttttgcctccccttttgattttcctccgctgtcaggagtttttctttcggtggcagcccaaaagtatgcaatgcaagtttagatgcctcttgttcttccagcgtcctttttgctcaagagtgtgagtgccagtctgtgtgagtgtgtgtgtgtgtgtgggacggaagtgaattttctgcacgtggcttaacttttgctgcctgctctggcgtgtcatgcagtcagcaatctttatccaacccaacccaagcagctctagtgggcgcctttcattcttttcttgcggatttcgctcaaggattgcatttaacgcaggaacaggaaggaaggaaatgccatgtcgacgctaaaactgggttagcttacataacgacaacattaacgacaacgttttccttccggtgggcggggcgcccgtggttggaaaatgggtggtatggcattggcttcacgcttcgtcgcttattggacataattactgaatataccactaaaatgggggaggaagtcgcatgtggcactcggaaaaaatgcccaccaggaactttgagaagtttccaattgcatcacaaaactgcaaatgtctaaaagtatgcacagaattcaattcatagaaattttgcattcaaaaataatttattaagaatgccaggtgtctaaaagtatgcagtgcatattcaattcgacttttgcattcaaaaaatgtgcttgcatacctttagagcacgttcttgatactctcgagatgcatccttgatttcgcctagtgcatatcctttcgccatagccacttgtgcgtaacggcaacgccagataagtgcaacaaaagccacggcggcggatgcaaccaagccaggccacatatcaattccatgtgagcggactaactggtggtcctggtgcagtcctagttccggaatgtcctgcttgcttggtggtcagtcggagttggttgggtgtggtggcggtggtgctttggatcccttatcgcttacacttggccaaaggcgagtcacccgcacacagttcactagtcgcactggttttttgttcgcctgccgaatccttaaagtagcgcagctttggtccaaggatttgtcgtagcaaagttttgttctttgtcagttcggggaaacaatgttaattgctttgcagtttacttttcgcaatccggttgactggctcaacttttggacttttcggtacaggtgaaatccactaagccgtaaactgcggctctcaagtgcttggcttaattcgtcgaaagtccgctggcgagctttatggaataattttctctttcttgagattttagatgattccaattactctgcagtttcctttgctgatgtcattgcactttcccgtagcaggtgaaattcattaagccctgatctacagctctacaaactctttggccaaaatcttttgttgttccatctgggctaaacaaagcgttttatgcatgcacactccgagccaattacgcaaagtgctctaagtatctcaaacagtcctaactggacacaattacattaacagtttagcacacacgtagcacggagatattggggatttgcgggggataacgggttagatatagccatcgtcagaagtgagcgaaattgggggtaagcaaacaggacgaaaattaaatcacagccccagctgcaaaggctcgaaaataagtcctggcgaaaaggagcagagagcaatgaaactactacgagtgagtactccaactgcagccactacggtaactaactttaaccccgggatcatgtaacccgtaacgcccatctccattaacccacacacacacacacacaagtgactggctgactgacagctgaacttttacgcacacagataaacagtgtcaagggttaacggcgatgggttggaggtgccgagcgggtggcctttgtttaataataataaaatgtcactgggcaaaaataaacggctgaggagccgagcggctgaaggattacattgccaagtgctccccacaagcacacaaactcatagtcaggaagtcagtcagagcaattgtcatgagtcctttggactatcgtcactggcaaatcacctgggcaacctaatggcaaacaggatacttggctgcgagaatgtgagtctcggcatgcaaggatgcgaccgctccgcaccgccggtgcaggcacttttattcctttggttgttattgctggccatgttgctgctgccggcgtgtttgtaagccatgttattacaataatgtgcaatccgagtctgaggtggagcactgagagaaatcatcgtatacttttagacaactctttaacagctttcaggcaccagcaaatgatttatacatttatacatatctcaactataagaaacgaaactcaggatcaggatatgagcaaatccttgaacatatgccatttttctcactctgctggcgagtgcggtctctgtggtggcttgctgtggatgtgagtgtgcggcaggccaaagttaaatcatgtttttattgtcacatttgccataaaggcagccgagggaccgtcagaccgtaaaaggacttatactcgcacagaagcagtaggatgagcaggaggaggagaaggaggagcaagaggcgtcataagatgccgcctaagctgcaggcgcacgtgggatggggaggcgggcagatgggcaggtgggtaagccagacaaatcataatcagagcacaaggcaacaagctcaacaaagccggaatcaccttaacagccaggtgggctgctcttatccgtgctgttggcttggtgggtcgggtgtatgagctgatgccactgataaggcagcgcataggtggcctttcctttcctttcctttctttcacctacggttatggccttgtttacgttgcatactttatggcgcaaagccgaggcaaaaggaaagcgtgtgtgctaacgcggaaaaaagcgaaacgtaagcgttaacgctaatgaaaatgcagtgaactggaaaatatactgactgcatgataaaaactaactgaagctgaaagctggcagaaaccaatttcagaaacctttaattcatttataacagccacaaaggaccaaaaggttttagaatcagcaatcgtttctaaacagaaattatagatgctaatgaaaatatgacgatgtttaccaaaccgaatttaattgtatttctttgcacattacaaataagtttacttcataatgtctttcatgattttcacttagtgcaattgctaaattccagttgagtgaaatttcgctgtaatagggcgctcggattaacccgaaaaaccgcaatcgaggcaaaataatcaaactgaaatctcaaagcggacaccacaaacatacatacacttgccgaaattacatggtccccctttggcatttcgctcgtacccccaggaaatctccactaatttacttgctgcggtttttccttcactaattgtgacaactaattgaaatcaaattagtgaagccactaaacagcttaatgctcgctgagcacgaaccagattttccacctcggcgttgggtgaactcagggggggggggcggttgttgggtgagttagcggttgtccagtggtttaaccataaaccctacacaatgctaattgttttcattcaatttactgtctgcacgccgctttaaaatatcgctcttggcttcagttttggctaaccataaattttcgtcatggacatcaaagcgtatacgcaatatgggtgcgccaatgcgcgtgtgtgtgtgtgtgtgtgtgtggcatgtcctgtttgcaagaatgtgtgtgtgcagtagtgtgggtgtgcaggcatgcgtgaatagacaaacatgcctttgtcaataatatgcattaattaagtgcagacatggatgcgagaggaatcaaaccaaggatatccgaggtgcatcaatggatacccaatcccgcgccacacgacaaacgaaaatacggacatacggacatacgtataagcggacacacacagccatacggacacacggacacgcaggactcaccgtcaacactgcgcattgcaaatttaattgaaaatatcgaataatgcgaaaatgcaaatgtcattatcaaaattcaggccggcggaagtgtcacaagcgctgaaaagaagtttcaagattcaatttccgtttccgcacacatgacgtgcattgcagcaggtgggcattagggcgtggcagggggagggggggcgtggcaaagtacgggtacgggtacaccgccccacagcatcccacagttatttatgtctccgttcgggtccttttttagcagctccgtaaatagttgcgcaaactgacacgatgccatccacgtctatgaggccattgcatcggcgctccgctgaatccccatttaactagagagcaactccagcacgcactcggtcaggagtgggtactgttccggcatataatcactgggaaaaatcatggctaacatttgagttctacttattttaaggagaattccatgctttaaagctgaggaaaaattgcatgccttatcccctttttttcccagtgcagcacatttgggtaggctcgatgaggcattggtctgggaattccggctgtccggctgtccggagtccccagtccaaagtccggaacccggacacgcactcagcgtgtgtgcacattgaagtggaccatcgtttgtcactcgaggtgggtgtggaagtggatgcagcagaggcattggaagatgaggaggaggacacgggcacagtggtgcaaagtggagaggtgttggctatgcagaaagagactcggcaagtggctgggaattttaaagtactctccggctgagcaaatacgatagcggtgtgcgagtcaaagggccagttccttgttgattcaaattagaccgatccatctggcggcaccactcttggtggcttgacccactgtgagtctgaatctcaatctgaatgtgagtgtggatgtggctgtggttgtgatgcaggctctggatgtggtgatattccttgttgactgttggtggcggggctaatggagtttgcaagaagtgggcaaaaatgtggatcaagcagccgcacatgcacaaagcaccccaccaatctccgttccgcattctccggcgctccttccttgcgggagaaatgcgagcaactttgcaaattgttgccgccacccgaagcccagccagcatatcgctggcccacttccttggacccacggcaactgcatgaggttgccaagttggtccaccaagaaaaatatttaccacaactttgaaggcactacaaaaattcagaggattacatttcaaatcactgaagtagtatgaaaaactagttccagacttaagcttattaacaacgaaaaacaaatataaatatatttttcataatttcataacaaagtttgttctaaaagtctttattgcgcgaacaacttttaaacaatctataataaagtagggcagtaggggtactgaagataaagtggtacatttttttttttttttgagtgcagctctagaagcggggttaccacatgaacaccagtgggtcgaccggcctcgggccgtggctctttcatcaggccagaaccatagtcgtagccatagccgcagccggagccaagaccgaaaccgaaacccggagtggaaaatgaaggaggagggttgctgctttgtttatgtagctccatttgggcatatgcatgacccactcaaccacccatcagaggcacccgccaccatactgtggttgctgctattgttgggcgggggcctcaagctgcacgtgtgagtggttttagtgttgttctggattcgcgtacctcttacttgccgagcgaaagggtatattcaattgaggactaattagtaatctaaagattacaactctttctaaaatgaaaggcttaaagcctagattaaatctaaatctaatgtgttctactgcccaaaaacgccatttatcttatttaaaaaaataaatcaaattaatcccaattccctgcagacctaaaaggtaggttcacctagtagggactacagggtatcatttagtcgcacccctcgacttaagcgctctatcttgttctggatttttaagttgttttcgttgtcgtagcttgtttgtgttgccttttttgttgtcctgtgtgcgaggttttgcctttttcctgtgtgttgcatcctcgtctttagttgcaatttgagcacagacacagaaacagccagaactgcacttggccaacacacacgcacgcacacactcacacacactcacactcgcagtgaaatgctgacaccaattagggttgcagcttgttgttggtgttgttgttgctgctgttgccgttagttgctgttggtagttagttagttcggttgcactttgtgcgttgcatgtttacagtggccacaaaacataatttctgtttagacaactttagccccagctccaattgcagtggcttctggccaaaagctttgcgaagaggggtggaaaaataaaaaaacaacaaaaaaaaggctaaaacaaaacagggtcataattattgcgccaacaaagacagcaaagcagctgcaacatcggccagcggtaaacgatgttgccagcaggcagaggcagatggcgcccatctccagctgaattttcggtataattttcactttggcgaagaaactttttcgctgccgcattgaatttgcaaccagcgagcggctaaaacccgaccaaaagcagcagcaacaaagttcatgagttgattagaaagttttttaaccgctgttgcagctacatccttaacccgctgaaatcctagaggcatgcccccagcatatcctgcactcgaataaatattatgttatccgcttaagctgatacataaaaaggtttttaaatattcagtgtatatatggtagtttaaatataacaacaataaatgtgaaacttttatttatagaaatttttggtgtgctttatcacactggcattacaaaatgatagtggcgtttcatatgtacgaaatactctttactctatgatgatatccaatcattttcttgtcgaatttctttgagtgaactgttgctaatggcagctcgtaagcttggcatatgcgaaaagacctcaatccgcggcttaggttcccaacaccgcactgcatgccacatgctgtatgccttatgccgtatgccacatgggtagtacgagttggttgccggggttgctggcttatcgcttggctgctttgtcgccgggcaggggcataaactatgcgagcatcaactttttgtaattaatttttaatgtgtgcaaaatgtttgagtaaacgagcatgttgttgtttgccaagcaccgccatatcaagcggatgtcgttagaacggtttatcaagcgctcgaagaggcggacaaactgcggcttcggcgaggggatctactatacactatatactctatatactatttaagtttgtgcttagccggggtaaataattggattgcgcttaaaagtggcggctgctggaagccaagactgccaaggcttctggttattcaaacggaatttctttgcactaattgcatatgacaatgctgcaaaacatccatacattcccacctgacgccacccccataaaaccacctaacacccattgaacaactttctagagtgcgagcgagaggtaagaaggagcaacgcagaccgcatgacgagaattggcaacttgctgcaatttgccagaaccaaaaattgatttaccctgaaatgcaagtcttcccgccttcgcacagctttcaaggcacttggaaaaatgtcgtgttgctactaaataccgatgtacgatggcaatctgcatcttaaactttggtatttatcagaattttcaacactggcaagcttgcgtactttgcagagttggcatcattgacagccttgcatttttggcagcagtgttttcatttccgagcttctatctttcgttcagataaaactatgtagggtaattacgctatattaaagaatattcaaatataatacgatagattagttcaaatactggcaggcaacaatgtggttattggaattttagagtctaaataattggcatctttgacagtcgtttcaatttgatatcatgcagtgaaatactaaatttcagagcaagtttttccccagtgtggtaaacccaactccccgttcattttgcaacccgactcgcatccatccatcagataaacgttttgctatctgcaatctgggaatcgcattctgtccctttgtccacgccatccgcatccactcacgctatgttcgttgttcttgtttttttccggccaaatttttgcagagatttgcgtttcaatcacatcgaggagctgccggccaacgcgttcagtggtctcgcccagctgactacgctttttctgaacgacaacgagctggcttacctgcaggatggggctctcaatggactgacggcgctgaggttcgtctatctgaacaataatcggctaagccgcttaccggcgaccatcttccagcggatgccgcgcctggaggcgatgtaagtgaaccctccttaattaaggatcccctctcgcaatcgccttacttaacatcctcctcctgcgccttctacagtttcctggaaaacaatgacatttggcagctgcccgccgggctctttgacaacttgccgcgtctgaatcgcctgtaagtcgttgatggttcgattcccctttctttttgggtggccttccactaactttctgcactgtccttccctccgtccaggatcatgtacaacaacaagctgacccaactgcctgtggacggattcaatcgactgaacaacctgaagcgcctgcgactggacggcaacgccatcgattgcaattgtggcgtctactcgctctggcgtcgctggcacctggatgtgcagcgccagttggtgtccatttcgctcacctgtgccgctccccagatgctccaaaaccagggcttttccagcctgggcgagcatcacttcaaatgcggtaatttgaaatttccatttaagtaacagcatagagcatgaaccaagtttatgtttacgtacactttccatcacattgaaagcacgatttctgatgtgcggcgcagatgcattttaatatcgaattgatggccactctggttgaaattacttgcagccaagccgcagttcctggtggcaccacaagatgcccaagtcgctgccggggagcaggtggagctgagctgcgaggtcaccggcctgccccgcccccagatcacgtggatgcacaacacgcaggagttgggcttggaggagcaggcacaggcggagatcctgcccagcggcagtctgctcatccgcagcgcggacaccagcgacatgggcatctaccagtgcatcgctcgcaacgagatgggcgcactgcgttcccaacccgttcgcctggtagttaatggcggtaaccacccactcgattcgcccatcgacgcccgcagcaatcaggtgtgggcggatgccggaacacccatgcacggagcaacgccactgccatcgccattgccatcgccaccgcactttacccaccagccgcacgaccaaattgtggcccttcacggctctggacacgtgctgctcgattgcgccgcctccggctggccacagccggacatacaatggttcgtcaatggccgccaactcttgcagtctacacccagcctccaactgcaggccaatggcagcctcatcctgctgcagcccaaccagctctctgccggcacgtatcgctgcgaggctcgcaattctttgggcagcgtccaggccaccgcccgcatcgagctgaagggtgagtaaatgccagagatgctcaatgttaagtgggaatttgtttcagtacaggtacataagcactttaaaatcaaccataaaaatatctaaaagtatgcctgaattttttattataatcacatcaaaagagctttatacttttagacatctcattgaattatgtccctggtcgaaagttccttttcaatctacccaaatgtgcacccgagtactgcacatctctggatcagtcgtggtgcagtacccacatagagtcccctttcaggccacactccatcgccctgtgacagccacacagttgcaacccggaatacgagtcacaactgtcgcgctttactcaatttgcagtcgatttaatttgttttcgtctgggaaaagggcgaatggggaacgacatgaacgctgaccaggatgctggccagggcaactcaactgatatcggggcattgggactttgcggatgagtttggccggcgggagaaggactgccgactgtcggttagaaatattgcaacaactttgacagcaggtggtgccggtgattggatgcaacttcatgtagacaaatcaaatcacaaaagtttgtgtttttgcactcggcaaatttggcaatttgttcaagcaaaaaaagttctgtagaaaagttctcagcgatatttccaataattaacgttttatattcaacagcaaataatatatatttttaaaattgtgcggaaaataaatcaaaaagaggtgatataatttagatctacctacatattccgcattatttattatagatagcaggtttttttttcggtgctccgactttaggcggtagtaagtaaatggctctgggtttgattggagcacattaagcactcccgcttcgtagcttcttggccattaaataaccgatgaagtgcatcccggcaggaggttaaacccgaaacaacttggcacttgagctttttatgtttttccattcgttattgccgtatttcgagcgtttgtacgtgactgtactttattgcgcaatagaagcggccaacggggagtgaaatttataaatatatattctctggggcatggggatcacagacggcgaaaagtgcaaccaccgccttgatgcagcacaatggctcattataatttgtggttgtcggcacaaaatgaagtgcgaaatttatgcattatttggctgaattaagtgcaaaaattataaactattatgtgcggcgagggcacgcacaaattgtgcgctgtggctttaaaaacagggaattggggggaaatggggagcggcgaaaagggaactggggcttaggggatcacggcggatgaactgtttatgcagtcaggcgtggcgcctggtcagcataattaacccgccaaacgcataaacagacacgggcaaacacaaatattcgtacacaagtaaatatggcggccatgctgaaaagtatgcagcgcgaatttatatttcatattacgcatacgccccctggacaacgagcaacgcacagtggtgccacgaattgcaacaagtgcaaattgcgtacattacgatatgttttaaatgttgttttaagtaatattgattaaaaatatagcatgtttattttaaaaatataaatattttgctttgtatgtcaaattttaaacatgacttcccacggcacagcgtttaaagcgggtcaaaaggcgaacgtttctgtgttgttggtgctgcggcaacaaaagactcatagaaaccgtaccaaaaagccaggcctcgctttactcgcttgttgctgccatttggagcagtaaaattgctcgaaaatcactcattcgccccgttgcaccgcttgccactcttgcagaactgcccgaaattttaactgcaccgcaaagccaaacaatcaaactgggcaaggcctttgtgctggagtgtgatgccgatggcaatccgctgcccaccatcgactggcagttaaatggagtccccctgcctggaaatacgcccgacttgcagctggagaacgagaacaccgaactggtggtgggcgctgcccggcaggagcatgccggtaagtaggagaagtgattgccaaaacggtttacattgcatttcattcgataccttggacataataccgtgaatcctgtccattctgctccaccaccccccacccccctcattcacaggtgtctatcgctgcacggcgcacaacgaaaacggggagacgagcgtggaggccaccatcaaggtggaacggtcgcagtcgccaccgcaactcgccatcgagccgagcaatttggtggccattacgggcaccaccatcgagctgccctgccaggccgatcagccggaggacggactgcaggtaaactcacttaccgggattggccacggaatcggaaactttttatttacccgccacttgttgacgttccctttttggcctcattttccgcttggccaccggaagaagtgtatcccaaaactgcattcattttggtttgaaagttatatttttatgaaagttaaagttatactatgaaaatccgctgagcgtttcccttacaaagtgaccaatttttaaatggaatataaaatatgtatatgatttttttcactgcaactcctcagatttcgtggcgccacgatggccgactcattgatccgaatgtgcagctggcggagaaatatcaaataagcggcgccggcagtctgttcgtcaagaatgtgaccatcccggatggcggacggtacgagtgtcagctgaagaaccagtttggccgggcttccgcctccgcactggtaaccatcaggtgagcgaacgtaggattccgaatccgaaatcaaaatcaaatagctcaactttgggcgccgaccgcaactttaattgcgctgtcggcggcgtgaagggcggattgcataaaactccattaaaatcaaaagggaaaacttttgctcaaaggcgaaaagaacgagggaaactggcaaaagaaaaggcctctgcccgcagaggacgcacttaaaatgcgtttaagtgcgcggtaaagttgcttaattaattgaaaaacagttgggccgcagaaaaaactgaacagaaagaagttggcgtacattttgacatttttatgaaggcagcttggtaaagtcactttaaaaacccgaagggtgccttacttcattatgaatttcaaatcaaatcaaaatgctttacaattattgccagcagacatgaactatgtacgcgtaaaatgaattccactgaactaaattgctgggcaaccactgccgcaaactatgaaaagaacataaaaccgtaaactaaagctgctggctaaactgcagcacagtggccagaaaacgggtaaaaactccgagaaaatcccaggggataaacatcaaactccgactggctgttatcaaaagcagttagcagctgggcaaacttgctaatcctctccagttgccaaggcactgggatccactgtgttgtcagctaaactgcaaataaaatatgcacccaggctccaactgcaacatgaacatcaaaaggcggcgaaggaaagcacaaaagttgtcgtcaccctcgtcagttgccagttgccagttagcagttttcagttaccagctttctgttgccagttgccaaactgaaaaacgtgctaagcccggaaaagctacgtgccacactcacacttacatgccttctgaatcggatgtagtgcgggggggagggggcaatggcaaaagacacaggcagtggaaattcctcgctgaggcaaccgcacaagttatccaaattgcccaaattgaaattgagttgacaagttgctggctgcgacaagaaaaataagtgctacacaccaaataaaatgtatcttttctttgcaaaggaatttaaggcggaagaactatagaatattatttcttatggctgtagtatataggttgatgtgaacctaaatacctataaatcgaacaatttattattgaaattgcacatgaatttcgtgtatttttcttgaggtgcacaaagactagaactagtgcccatcttgtacctcaacttttacactccttttgcggccttagaagttttcgaattgtttgtcccgaaaaaagcgacacgacgtgaatttattgagcaaatggtctcagcatccatacgccacaagccgtaaatcaatttgaggctgcaaaaaaagggagccgtggatgctgacttggccattaaccaccgactggcgaactggagacccaatgatgggccacaaaagaaccgccggagcggcttactttctgcttacacagccattttcccgatgcataatgcagcagaaaagcgggtggataatggtgccagtccgtggatttccatgtgtggctcccatggagcatttagtgcccagagatgaggggtcgaggcaacgacgggacggaagctgaatcggcttacagttctgtgccggtagcattagaaactttactcattacgccgggaaaacccagtcaccagaccgcagcaaagcagcgggggcggaaaattataaagaaaaatccagaaaaagagtgcgagaaagccgggcgccgccaaaagtgaaaaactatgttggaagaacgcaggagttgcaggcatccaggagcagatatcctggcccatcataatgggtgtgagtgaaaaccgctgaaagaccccgacgaaaccagtgcaacaaaaaaatgggaaaaataacaaaaataccaaaacacccagaaatccgcctaagttgtgggtaatgctgggcgtaaaacaaaagcttatcctgttactgccacttttgttgttgccaccgctcctgtgatcctgctgctggcaaaaaggctaaccacggaaatacattgccgtgcgccacagcatgtggcaagtggggagtgagcagcgagacggcagccaggaccaaaaggagaaactttacaccgaatcgggccaccgccagtggtgactgcaggataccctgacttaaggatttaaaatgtgttaatgtgttaaagtgaatagttatagttacttatacaaatgggtagctgaatttgaatgtaagtcctatttataaacctagttataaaccaattgaattgtcttatgggatatagcaatatgattcctgcgtaataagatattttcgtagtctcctttttcgctttcccttcttcactgaactttgtgaaaacaattaatttttattaaatttaattggataaactattagcgtgtaaaatgaatagcacttgccagaggtaatgtttataatttcctagagatacttatacactgcgaactctttcgctatggcttttccacttttaaacacactttgagtcacccgaaaatatgcattatatgctgaaactttctccaaaaactatcaatgtcccaaataccgtgggcaattgtcggctatggaacaacggacagcccgtcgagtcgcccgaggaaaaggacatcgccagagggcagccgctgaatggcagcgtggaaatatgtagtccttggcgccgcaatatccactgacactggtgcaggagcagcaggacgcaagagcagcactggcaactggcaactggcaaccgatagtggcagactctggtgcaacagggtgtattatggtcgttaagttattacctacagcagcgcctccgccgcacaatgccaaagtttacacagtcgaaagtttcctagaggagcattccttgccagcagaatgccaggcatgaattgttgttaatgctgccctccatgctgctcctccattcggagtcaaggcaaggcgataggcaaggcgcggatttttccgacgattttttccgctgcacagagaatgcagcataatttggttgggaagacaggcgcagaaaggggaaatggactggctggcatttttattagacagcgcggcccatttgggcgactcctgccactggaattatggtaattaaaatgtgcaaatgccctgggatatcttgattgtttccacgctttgtgttctttatgtgcgtgtcaacttttgcctctaggcatttaataaagattaataacaatttaagccgaaaacttggggagtaatgcacttaatagtgcacaaaccaagacttggggtcaccaaatgctatggcttgggtcaccaactctcttttatcaatcaaactatctgcttatgttaactaatcttttgttttataatcccctcagaaacaacgtggatttggctccaggcgatcggtatgtgcgcatcgcctttgccgaggcagccaaggagattgacctggccatcaacaacaccctggacatgctcttctccaaccgatccgacaaggcgccacccaattatggcgaactactgcgcgtctttcgctttcccactggcgaagctaggcagttggcccgtgcggcagagatctacgaaaggacactggtcaatatccggaaacacgtccaggagggcgacaacctgaccatgaagagcgaggagtacgagttccgggatctgctgtcacgagagcacttgcatctggtggcggagctatcgggctgcatggagcaccgtgagatgcccaactgcacggacatgtgcttccactcgaggtacagaagcatcgatggcacctgcaacaacctgcagcatcccacgtggggagcttcactcaccgccttccggagattggcgccaccgatttacgagaatggattcagcatgcccgtgggctggaccaagggcatgttgtactcgggtcatgccaagccaagtgcacgattggtgtccacctcgcttgtggccaccaaggagatcacaccggatgccaggataacgcacatggtcatgcagtggggtcagttcctggaccacgatctggatcatgccattccatccgtgagttcggagagctgggatggcattgattgcaaaaagagttgcgagatggctccaccgtgctatcccattgaagtgcctccgaatgatcctcgtgtccggaaccgccgttgcatcgatgtggtgcgatccagcgccatttgtggatccggcatgacgtccctcttcttcgacagcgtgcagcatcgcgagcagatcaaccaactgacctcctacatagatgcatcgcaggtgtatggctacagtactgctttcgcccaggagctgcgcaatctgacatcgcaggagggactactccgagtgggtgtccacttcccgaggcagaaggacatgctgccctttgctgctccccaggatggcatggattgccgcaggaatctagatgagaacaccatgagctgctttgtttcgggcgacatccgtgtgaacgagcaggtcggacttctggccatgcacaccatttggatgagggagcataacaggatagccagcaaactgaagcagatcaattcccattgggatggtgacaccttgtaccaggaggctcgcaagatagttggtgcccagatgcagcacatcaccttcaagcagtggttgccactgattattggcgaaagtggcatggagatgatgggcgagtaccagggctacaatccccaactgaatcccagcatagccaacgagtttgccacggctgccctgcgatttggacacaccatcataaatcccattctccaccgcttgaacgagaccttccagccgataccccagggccatctgctgctccacaaagccttctttgctccctggcgtctggcctacgagggtggagtggatcccctgatgagaggattcctggccgttcccgccaagctgaagacccccgatcagaacctcaacactgagctcacagagaaactgttccaaactgcccatgctgtagcattggatctggctgccatcaacatccagaggggcagggatcacggaatgcccggctataatgtctacagaaagctatgcaatcttacagtggcccaggactttgaggatctagccggcgagatcagcagtgccgagatacgccagaagatgaaggaactgtatggacatccggataacgtggatgtttggctgggcgggatcctcgaggatcaggtggagggcggcaaggtgggtccactattccagtgcttgctggttgaacagttccgcagacttcgggatggcgatcgcttgtactacgagaatcccggtgtcttctcacccgaacaactgacccaaatcaagcaagccaactttggtcgagtgctttgcgatgtgggtgacaacttcgaccaggtcaccgagaacgtgttcattttggccaagcaccagggtggctacaagaagtgcgaggatataatcggcattaatctctatctgtggcaggagtgcggcaggtgcaacagtccaccggccatctttgattcctacataccgcaaacctacaccaagcggagcaacaggcagaagagagatctcggcaaggagaacgacgaggtggccaccgccgaaagctatgacagtccgctggaatccctctacgatgtgaacgaagaaagggtcagtggtctggaggaactgattggtagcttccagaaggagctgaaaaagctgcacaagaagctgcgcaagttggaggactcctgcaactccgccgactccgagccggtggctcaggtggtgcaattggcggcggcaccgccccagctggtttccaagcccaagaggagccactgcgtcgacgacaagggcaccacacggctgaacaacgaggtctggtctccggacgtctgcaccaagtgcaactgcttccacggccaggtcaattgcctgagggagcggtgcggcgaggtcagctgtccgccgggcgtggatccactgacgcctccggaggcctgctgcccacactgcccgatggtcaagtgaagacaatggtcaaatgaattacgcatatcgacgtttatccgtagtagccacactcactctaatcaaaaccaaaatggaaacacaccggcaattgcgcaatgagcatgtttaattgacaattaactaacaatgtactgctacacgtgtaataaaataaagcacattaataacccataatcatttatttgtacaaattatgaaacttacttggggcgcttcgaaaatatttttcaaaacgaagtagctcccaatttgagactatctagtctagtcaaatttgatatactttagatgtgtgcccttggctatcaccaagtcgtccttcttgtgcttcagggtgcaatcgatgaaggcaaggtacttgcccaccttggacagattggcctgaatcaccacatcgtcgcccagtttggcgccgtttagaaagtttacactaagatctaccgaaactccgggatgacatggcttggacattagggcgtaggtggttatcaagtccaccagggtcatgatataaccgccgtgcaaaaacttgtacaagttcacatgatcctggtccacctttagctcagcagtgcaggctccatcgccaccgtctacgatcttgacctttaatggaatataaggatgagataatgatattggtaaggagactctatggtgatctaaccttctgtaggtgactttcaaagcccgttgacttgttgataatctcggtgatgtgtttagcgaattcgagtcccttcttgcgagttcccatattatttattgatgttgctttacagacgatccgctagcttctatataactacaaaatgaattagtttgtccgatcggaacgattagaaatatactagatttagttttgtagatagataagtagtcgtaacgtgcacttatatctcaagtgtcagatagtaattgttttacaatagaacaatccaactttattgtatgtatgacgtgtgtaagtttggatgggactaaatccattaaaaaataaatcacagtagtatattaacaaatggattgctttgattttttcaatatttgatttcattatcttcgagtgcagttttccgcttttcgatgaaaagtaaacaattagcaagtatcaaaaaataaggtaaacataatatagcacgatattatgaaatagttagtatttagttaacg

SEQ ID NO: 104 - DNA, 5164 bp, DROSOPHILA
catttggcgcgtgcagttcagttcagttcactcggtcgaaaattgcccggactcgtttaatagcggaatatcgttctaaaattaaacatttcgcggaggcactgagagaaaactatcgctcgaatcgctagagcagataagaccgtttaggataccgaatgttatctcttggaattctctttgtgcagctgcctgagcttctgtgagtcgatatgtgagccgcagtgccacagtgttttagggaccacacttggtgataaccgccgtccagcggcccagtgataagcgagtggttcgaacttccgcccctcgcaggcgattgtcgtctcgagtcgagttgcttgaacagttcttggaccaacatccagttggtgagaagtgcgcgaaactagactgccctcgaaatgcgatttatgctgctcatgctgcagctgctcggcctgctgctcctcctcgccggcggagtgcagtccgtctactgtccggctggatgcacctgcttggagcgaaccgtgcgctgcatccgcgccaagctgtccgccgtgccgaaactgccccaggatacacaaacgctagatttgcgtttcaatcacatcgaggagctgccggccaacgcgttcagtggtctcgcccagctgactacgctttttctgaacgacaacgagctggcttacctgcaggatggggctctcaatggactgacggcgctgaggttcgtctatctgaacaataatcggctaagccgcttaccggcgaccatcttccagcggatgccgcgcctggaggcgattttcctggaaaacaatgacatttggcagctgcccgccgggctctttgacaacttgccgcgtctgaatcgcctgatcatgtacaacaacaagctgacccaactgcctgtggacggattcaatcgactgaacaacctgaagcgcctgcgactggacggcaacgccatcgattgcaattgtggcgtctactcgctctggcgtcgctggcacctggatgtgcagcgccagttggtgtccatttcgctcacctgtgccgctccccagatgctccaaaaccagggcttttccagcctgggcgagcatcacttcaaatgcgccaagccgcagttcctggtggcaccacaagatgcccaagtcgctgccggggagcaggtggagctgagctgcgaggtcaccggcctgccccgcccccagatcacgtggatgcacaacacgcaggagttgggcttggaggagcaggcacaggcggagatcctgcccagcggcagtctgctcatccgcagcgcggacaccagcgacatgggcatctaccagtgcatcgctcgcaacgagatgggcgcactgcgttcccaacccgttcgcctggtagttaatggcggtaaccacccactcgattcgcccatcgacgcccgcagcaatcaggtgtgggcggatgccggaacacccatgcacggagcaacgccactgccatcgccattgccatcgccaccgcactttacccaccagccgcacgaccaaattgtggcccttcacggctctggacacgtgctgctcgattgcgccgcctccggctggccacagccggacatacaatggttcgtcaatggccgccaactcttgcagtctacacccagcctccaactgcaggccaatggcagcctcatcctgctgcagcccaaccagctctctgccggcacgtatcgctgcgaggctcgcaattctttgggcagcgtccaggccaccgcccgcatcgagctgaaggaactgcccgaaattttaactgcaccgcaaagccaaacaatcaaactgggcaaggcctttgtgctggagtgtgatgccgatggcaatccgctgcccaccatcgactggcagttaaatggagtccccctgcctggaaatacgcccgacttgcagctggagaacgagaacaccgaactggtggtgggcgctgcccggcaggagcatgccggtgtctatcgctgcacggcgcacaacgaaaacggggagacgagcgtggaggccaccatcaaggtggaacggtcgcagtcgccaccgcaactcgccatcgagccgagcaatttggtggccattacgggcaccaccatcgagctgccctgccaggccgatcagccggaggacggactgcagatttcgtggcgccacgatggccgactcattgatccgaatgtgcagctggcggagaaatatcaaataagcggcgccggcagtctgttcgtcaagaatgtgaccatcccggatggcggacggtacgagtgtcagctgaagaaccagtttggccgggcttccgcctccgcactggtaaccatcagaaacaacgtggatttggctccaggcgatcggtatgtgcgcatcgcctttgccgaggcagccaaggagattgacctggccatcaacaacaccctggacatgctcttctccaaccgatccgacaaggcgccacccaattatggcgaactactgcgcgtctttcgctttcccactggcgaagctaggcagttggcccgtgcggcagagatctacgaaaggacactggtcaatatccggaaacacgtccaggagggcgacaacctgaccatgaagagcgaggagtacgagttccgggatctgctgtcacgagagcacttgcatctggtggcggagctatcgggctgcatggagcaccgtgagatgcccaactgcacggacatgtgcttccactcgaggtacagaagcatcgatggcacctgcaacaacctgcagcatcccacgtggggagcttcactcaccgccttccggagattggcgccaccgatttacgagaatggattcagcatgcccgtgggctggaccaagggcatgttgtactcgggtcatgccaagccaagtgcacgattggtgtccacctcgcttgtggccaccaaggagatcacaccggatgccaggataacgcacatggtcatgcagtggggtcagttcctggaccacgatctggatcatgccattccatccgtgagttcggagagctgggatggcattgattgcaaaaagagttgcgagatggctccaccgtgctatcccattgaagtgcctccgaatgatcctcgtgtccggaaccgccgttgcatcgatgtggtgcgatccagcgccatttgtggatccggcatgacgtccctcttcttcgacagcgtgcagcatcgcgagcagatcaaccaactgacctcctacatagatgcatcgcaggtgtatggctacagtactgctttcgcccaggagctgcgcaatctgacatcgcaggagggactactccgagtgggtgtccacttcccgaggcagaaggacatgctgccctttgctgctccccaggatggcatggattgccgcaggaatctagatgagaacaccatgagctgctttgtttcgggcgacatccgtgtgaacgagcaggtcggacttctggccatgcacaccatttggatgagggagcataacaggatagccagcaaactgaagcagatcaattcccattgggatggtgacaccttgtaccaggaggctcgcaagatagttggtgcccagatgcagcacatcaccttcaagcagtggttgccactgattattggcgaaagtggcatggagatgatgggcgagtaccagggctacaatccccaactgaatcccagcatagccaacgagtttgccacggctgccctgcgatttggacacaccatcataaatcccattctccaccgcttgaacgagaccttccagccgataccccagggccatctgctgctccacaaagccttctttgctccctggcgtctggcctacgagggtggagtggatcccctgatgagaggattcctggccgttcccgccaagctgaagacccccgatcagaacctcaacactgagctcacagagaaactgttccaaactgcccatgctgtagcattggatctggctgccatcaacatccagaggggcagggatcacggaatgcccggctataatgtctacagaaagctatgcaatcttacagtggcccaggactttgaggatctagccggcgagatcagcagtgccgagatacgccagaagatgaaggaactgtatggacatccggataacgtggatgtttggctgggcgggatcctcgaggatcaggtggagggcggcaaggtgggtccactattccagtgcttgctggttgaacagttccgcagacttcgggatggcgatcgcttgtactacgagaatcccggtgtcttctcacccgaacaactgacccaaatcaagcaagccaactttggtcgagtgctttgcgatgtgggtgacaacttcgaccaggtcaccgagaacgtgttcattttggccaagcaccagggtggctacaagaagtgcgaggatataatcggcattaatctctatctgtggcaggagtgcggcaggtgcaacagtccaccggccatctttgattcctacataccgcaaacctacaccaagcggagcaacaggcagaagagagatctcggcaaggagaacgacgaggtggccaccgccgaaagctatgacagtccgctggaatccctctacgatgtgaacgaagaaagggtcagtggtctggaggaactgattggtagcttccagaaggagctgaaaaagctgcacaagaagctgcgcaagttggaggactcctgcaactccgccgactccgagccggtggctcaggtggtgcaattggcggcggcaccgccccagctggtttccaagcccaagaggagccactgcgtcgacgacaagggcaccacacggctgaacaacgaggtctggtctccggacgtctgcaccaagtgcaactgcttccacggccaggtcaattgcctgagggagcggtgcggcgaggtcagctgtccgccgggcgtggatccactgacgcctccggaggcctgctgcccacactgcccgatggtcaagtgaagacaatggtcaaatgaattacgcatatcgacgtttatccgtagtagccacactcactctaatcaaaaccaaaatggaaacacaccggcaattgcgcaatgagcatgtttaattgacaattaactaacaatgtactgctacacgtgtaataaaataaagcacattaataacccata

SEQ ID NO: 105 - protein, 1527 aa, DROSOPHILA
MRFMLLMLQLLGLLLLLAGGVQSVYCPAGCTCLERTVRCIRAKLSAVPKLPQDTQTLDLRFNHIEELPANAFSGLAQLTTLFLNDNELAYLQDGALNGLTALRFVYLNNNRLSRLPATIFQRMPRLEAIFLENNDIWQLPAGLFDNLPRLNRLIMYNNKLTQLPVDGFNRLNNLKRLRLDGNAIDCNCGVYSLWRRWHLDVQRQLVSISLTCAAPQMLQNQGFSSLGEHHFKCAKPQFLVAPQDAQVAAGEQVELSCEVTGLPRPQITWMHNTQELGLEEQAQAEILPSGSLLIRSADTSDMGIYQCIARNEMGALRSQPVRLVVNGGNHPLDSPIDARSNQVWADAGTPMHGATPLPSPLPSPPHFTHQPHDQIVALHGSGHVLLDCAASGWPQPDIQWFVNGRQLLQSTPSLQLQANGSLILLQPNQLSAGTYRCEARNSLGSVQATARIELKELPEILTAPQSQTIKLGKAFVLECDADGNPLPTIDWQLNGVPLPGNTPDLQLENENTELVVGAARQEHAGVYRCTAHNENGETSVEATIKVERSQSPPQLAIEPSNLVAITGTTIELPCQADQPEDGLQISWRHDGRLIDPNVQLAEKYQISGAGSLFVKNVTIPDGGRYECQLKNQFGRASASALVTIRNNVDLAPGDRYVRIAFAEAAKEIDLAINNTLDMLFSNRSDKAPPNYGELLRVFRFPTGEARQLARAAEIYERTLVNIRKHVQEGDNLTMKSEEYEFRDLLSREHLHLVAELSGCMEHREMPNCTDMCFHSRYRSIDGTCNNLQHPTWGASLTAFRRLAPPIYENGFSMPVGWTKGMLYSGHAKPSARLVSTSLVATKEITPDARITHMVMQWGQFLDHDLDHAIPSVSSESWDGIDCKKSCEMAPPCYPIEVPPNDPRVRNRRCIDVVRSSAICGSGMTSLFFDSVQHREQINQLTSYIDASQVYGYSTAFAQELRNLTSQEGLLRVGVHFPRQKDMLPFAAPQDGMDCRRNLDENTMSCFVSGDIRVNEQVGLLAMHTIWMREHNRIASKLKQINSHWDGDTLYQEARKIVGAQMQHITFKQWLPLIIGESGMEMMGEYQGYNPQLNPSIANEFATAALRFGHTIINPILHRLNETFQPIPQGHLLLHKAFFAPWRLAYEGGVDPLMRGFLAVPAKLKTPDQNLNTELTEKLFQTAHAVALDLAAINIQRGRDHGMPGYNVYRKLCNLTVAQDFEDLAGEISSAEIRQKMKELYGHPDNVDVWLGGILEDQVEGGKVGPLFQCLLVEQFRRLRDGDRLYYENPGVFSPEQLTQIKQANFGRVLCDVGDNFDQVTENVFILAKHQGGYKKCEDIIGINLYLWQECGRCNSPPAIFDSYIPQTYTKRSNRQKRDLGKENDEVATAESYDSPLESLYDVNEERVSGLEELIGSFQKELKKLHKKLRKLEDSCNSADSEPVAQVVQLAAAPPQLVSKPKRSHCVDDKGTTRLNNEVWSPDVCTKCNCFHGQVNCLRERCGEVSCPPGVDPLTPPEACCPHCPMVK

SEQ ID NO: 106 - DNA, 6158 bp, DROSOPHILA
cactggattaactcgcacattcctatgcatccgctcaccgctttgcccacacatgtggttctgttcgatccgctggccgagaacataagcgtgttcctccgtaactaccggctgctccatcgcatcgagcacgcagaggtaacacggctggagggctcgcaggctctggtggaccagtggtcggaggcactgggtgcccagtcacctaatcttgcttctctcttgcagaatcgccaatcgcgcacaggtcgttccattttggtctaccagcgcttgaagaagggcgaggagaatgcatttaatcgcgggccggattcaggacagcacgagccggatgtccacgatcatccgccgctggaggatctcgtcctggccaacgagaacgagaatctgttcaattagataatagagaaaataagagaacccaccaccgacgccctccgttcaaaagcaagaagcaatgacacatttgagattaactaatagatacaaacctatattttgtatccatttttggccttagcaaaagtttttaaaacgttgtcgcccgaagagaacagaaaacagaaacgtagttgatattcgtaggcgcatgttgtgtactctgtgctagttgctaatgtgtaagccatctgagtatttagacgctagaggcaatgtattttacgtagtcgatacaacacacttgatctgtcctttctttaagatctcgaaataaaggttcagtggagtagataaagatttatttgagatttacatattttgtatatcttattggtggtttaaacattaattttcgacgtttcttatttttttttttttaattatctttttaaaatatttagctaattacattttcatagaacagctgtttgaaatgtaactgttcaactttctaatcgatttgtggaataccccgattgtaacttatcgcagctaaaatatcgatggtgtgtcgtaagcctttgcagtcgctctatcgatactatcgcagtggttaactcagcactattcggccgatttcgcactgcattaattaaacgcgttttaattgagtaaagctgtttttatcgcacaaccaccacacacagataatatggctgcttcaatgagggcgctgctgaaagtgcgaggtgcgtattctccacatcggttgcctaacacgcccgatagcctaacagcataataaattatataacttcaatggatttacggcaccaaaagaacaaatatccaagcaattagggagcacctgtcgttccgacgcatctgctgattagtcggcctccattcggattaataagcggctcaatttgcgaatccgcagatacgtggctttgaaatgattaaagagggggagtgcgggggttgtgttcaaggttcgcttgcatgtgacccagcgtacaaacaaccgttttttttcggcaacaagtacagtggaacaccgctttggtgaccatcactttttaacttttctcgtagtggatatacgtgtatacttttaatttaatagttcaaacaaataattgctgcaagcatttgccttcgtcaaaaagttatttaattctaatttagtttgggatattttttccaagctccgatctatatttatgaatatttgcccttagggcatttggcatgaattacttttttgagttctgaaagcatggataaacttagtatcgttctaaaagtcaaactggtcagacctacctggcaaaccatttactttacgaaagcagacttcggtcttcaggaagctggcagtaaggaaggtatagtggcaatccgctgttattccgcaccatggatctgctttcaccgtagctgaattggggggttcaagaacttttggcattcttcaacagttaggacaccattgacttctatcattgttacaactgtcacagggatgaaaccataccatgtttataggtatattcccattaaatcttaggtaactcactgagtataaggatatatccgaaaatcttcatggtgagattgagattgaatgtttcgcaagtgttgcagggttttacaaagattagctgctaattaccgaaacatgtcgtatttaaggcgattaaagcaacaggtgtggaatttcttaacaaatgtcaaggccacaaaaggcggtgtttctaaactttagattacatagatttttaaaatggtaaaaatgaagagttaaatctttattgaaagtgatcaaggatataaaatgccttataatataaaaaagttattttccttatctagttttcctgcatctgggtttaccccggggacaccttccggccttgattttcagaaatactggacatgtaaataaggttaggcgaactgaatacgataattgaattgaacctacgaggctttcccagttcagtcagtttgcactgctcttgtccaacgtgcaaaagactcaagccttggaagttacaggtagcggcaaacgcgcagaatggacttccagcttttataaatccttcacagacactctttccattcgcagtctcgaatatattcataactgcagtggttgaatagttcagaacgtatgtatttactcgcagtttcttgcgtagaaactcactcagaaataataagaagctcaaagctttcataatcgcacgcagattgagtagtttacatataatttaatgctttaaaatgcttctcagaagaattatagaatataggtatttataatgcctttaattgaaacatatatgcatggaaatattggaacaatattactattttaacgagcaacgcggtttaccatggagacattttccgggaattagttcgatgaatcctaaacgaatcgattaagttttctgaaacacaaaaggtgtcaacaattacccacctggttttccgttttctttgcgttcacacgacacccttttgaggtaacttggatttggaccatctaagttacaatcgggaagtattccgcagtgaggatcaagatttagataaattgcttggttgcatttgctcatagcatgcacacttgaaatgactaaaggggatgtaaaagtaaaacaatttcggttagcaacataagctccaaaaaaactcacacagaataaaaacgatgatagctttcatcttgcaaagcgactgatattcttaaagaaaatactcaacttaaatagatctatatatggcatgagttctggaacatattccattcgatctagaaaatcaattatgtgtacttggaaaatgggcaagaaatataggaatttaataaataataaacctttctcgaacgttacgcaaatgaaattatcatgtaactatgtaagtttacacttgcaggctggtttattaatatccaaaatactaaatttccaactttagtcctaaaatgattcattcttacatttttcagatggcttcgtggccggagtgcgctgcaattcgcagtacaacaagacgcgcggcaacttgaagctgaacggcgattcgcgggtgatctgccagggattcaccggcaaacagggcacgttccacagccaacaggctctggagtacggcaccaagttggtcggcggcatttcccccaagaagggaggcacccagcatctgggactgcccgtcttcgcttcggtggcggaggccaagaaggccaccgatccacatgccaccgtcatctatgtgccaccaccgggcgctgcggccgccatcatcgaggctctggaagcggagatccccctgatcgtttgcattacggagggtgtgccgcagcacgacatggtgaaggtgaagcacgccctcatcagccagagcaagtcgcgattggtgggtcccaactgcccgggaatcatcgcccccgaacaggttcgtacatctccagcgcttgagagataagcttggccagagggcaaagtccacgttcatctggtggttttcttatctcttggtatgacgctcgctttgaactacatatatctgtttactattccgttttcaatttgcttattgttaatgtataaacaggcctccattgacacacccttaaatttgggcattgaactttgcacctgaagttggtggaatttgcggacgatacgttttttattaccatttataacgcttatctttctatgcgtcacaaaacttagtgattacccacttcactccactttcagttaagtcaattgtataatcttaaactatgttttttctgattgcagtgcaagatcggcatcatgccgggtcacattcacaagcgcggcaagatcggcgtggtctcgcgctcgggaaccttgacctacgaggccgtgcaccagaccacggaggtgggtctgggccagaccctgtgcgtgggcattggaggcgatccgttcaacggaaccgacttcatcgactgcctggaggtcttcctcaaggatcccgagaccaagggcatcatcctgatcggcgagatcggaggcgttgccgaggagaaggctgccgactacctgaccgagtacaattcggtatgagaagccatcacggatcaatgtatttcattgctaaatgtttttgtatcctattgcagggcatcaaggccaagcctgtcgtctcgttcattgccggagtgtcggcgccacccggccgtcgcatgggtcacgctggagccatcatttccggaggaaagggaggtgccaacgacaagatcgccgccctggagaaggccggcgtcattgtgaccaggagtcctgccaaaatgggccacgagctcttcaaggagatgaagcgtctggagttagtgtaaataattaaaggccataaccaaaccggaatccgtacgccgatcaaagcgtatacgcaaactcatgatgatgaacctaacgttaagctaaaagtgtcgaaaatcgaaattgcattcgagcgaacccaaataaattattgtgaaaaattactagagagaaacgagaggcgttgaattgtgacatgtattccaagaattaagttaactactgccgtaccaccaagttgaactaaaataactcgcaccaaaaccaagatttctaattgttattgcactcggctcattgtttgtgttgcgaacagatttttgccttaattttaaatgcctgctcgaattatcaatgcgaattgtatctgaatgtgtaataaatatgcataaaaacaggatagatgtggtgaattttcgtggttttagctatacaagccatatcctttgaaaatatgaattttcaggtcaatttatttaatctaaactaaaattctttggagaagaattaacaaaacaataatttatgaaaagcaatgcttaccatattaaaaaaagatttaaggaaatttaaaaaaatgtagttttctactttcgatatttaatgggatcgacttgcaaacatcaagagcacacatcgatagagcggaagtttcgattaactcgtgaaatatctggcaacattaatatcgaactgccatcgctttttgtgccagctctaataaacatatatatgttttagggccgcgattgaaaatgcgtgccacaaaggcctaaacaaacttggaaaacaccgcgaaaaacgtcagaagctatagtgccgattcgcatattgttcgccaccccggaaaagtgtgaaaatcgcagataatcaaaagggagagcaaccaaaggaaaagcaacaacaacgactcgccatgggcagcagaactgaaaatggtgagtttctaagaaaatgtccctaaatttcgttagcactgtcccttttctcgcaaagcgtgttggaaatgatgtgaacataataatattagtgcgcttattattactattgcaacattttcggtttttgcagccgccggttgcggttgcattttaaagtgcactacatacgcacacacacacatgtgcacatacaaatttatcacctcgcatgtatgtatgtatgtgacggagtagtgcatgccttttagtagggctgccgggaaggccccgttatctgattccgggtatgtctaattggagttgttagttggaattttcgttcgccgaggaactttattgaaaaaaagttgtagcatggctaataccaggagttcatggccttgacgctcgcaatacatagtgctgcattgaaaataataaattatgggattgttggtagcagattggtagcttaatt

SEQ ID NO: 107 - DNA, 1464 bp, DROSOPHILA
actcagcactattcggccgatttcgcactgcattaattaaacgcgttttaattgagtaaagctgtttttatcgcacaaccaccacacacagataatatggctgcttcaatgagggcgctgctgaaagtgcgagatggcttcgtggccggagtgcgctgcaattcgcagtacaacaagacgcgcggcaacttgaagctgaacggcgattcgcgggtgatctgccagggattcaccggcaaacagggcacgttccacagccaacaggctctggagtacggcaccaagttggtcggcggcatttcccccaagaagggaggcacccagcatctgggactgcccgtcttcgcttcggtggcggaggccaagaaggccaccgatccacatgccaccgtcatctatgtgccaccaccgggcgctgcggccgccatcatcgaggctctggaagcggagatccccctgatcgtttgcattacggagggtgtgccgcagcacgacatggtgaaggtgaagcacgccctcatcagccagagcaagtcgcgattggtgggtcccaactgcccgggaatcatcgcccccgaacagtgcaagatcggcatcatgccgggtcacattcacaagcgcggcaagatcggcgtggtctcgcgctcgggaaccttgacctacgaggccgtgcaccagaccacggaggtgggtctgggccagaccctgtgcgtgggcattggaggcgatccgttcaacggaaccgacttcatcgactgcctggaggtcttcctcaaggatcccgagaccaagggcatcatcctgatcggcgagatcggaggcgttgccgaggagaaggctgccgactacctgaccgagtacaattcgggcatcaaggccaagcctgtcgtctcgttcattgccggagtgtcggcgccacccggccgtcgcatgggtcacgctggagccatcatttccggaggaaagggaggtgccaacgacaagatcgccgccctggagaaggccggcgtcattgtgaccaggagtcctgccaaaatgggccacgagctcttcaaggagatgaagcgtctggagttagtgtaaataattaaaggccataaccaaaccggaatccgtacgccgatcaaagcgtatacgcaaactcatgatgatgaacctaacgttaagctaaaagtgtcgaaaatcgaaattgcattcgagcgaacccaaataaattattgtgaaaaattactagagagaaacgagaggcgttgaattgtgacatgtattccaagaattaagttaactactgccgtaccaccaagttgaactaaaataactcgcaccaaaaccaagatttctaattgttattgcactcggctcattgtttgtgttgcgaacagatttttgccttaattttaaatgcctgctcgaattatcaatgcgaattgtatctgaatgtgtaataaatatgcataaaaacag

SEQ ID NO: 108 - protein, 324 aa, DROSOPHILA
MRALLKVRDGFVAGVRCNSQYNKTRGNLKLNGDSRVICQGFTGKQGTFHSQQALEYGTKLVGGISPKKGGTQHLGLPVFASVAEAKKATDPHATVIYVPPPGAAAAIIEALEAEIPLIVCITEGVPQHDMVKVKHALISQSKSRLVGPNCPGIIAPEQCKIGIMPGHIHKRGKIGVVSRSGTLTYEAVHQTTEVGLGQTLCVGIGGDPFNGTDFIDCLEVFLKDPETKGIILIGEIGGVAEEKAADYLTEYNSGIKAKPVVSFIAGVSAPPGRRMGHAGAIISGGKGGANDKIAALEKAGVIVTRSPAKMGHELFKEMKRLELV

SEQ ID NO: 109 - DNA, 5342 bp, DROSOPHILA
gtggtcgatgctgaaaagcgattctttcagtgcaaagactgcggaaatcgaactactaccgtattcaagttgcccaaacagagctgtaagaattgcaaggggtcgcgatggcaaaggacggctatgatacgggagaaaaagatactgactggtagagaaactctatccgtgagaggagacgaggaaacctttatgggctgcctagcaggcagtgctaatctcaacttgctggtacccgatgaagagtgatgccccaattggccgctatctgttatatttggtttattttattttatattatttcaaataatttttaaaagttaatttaaacatatgcagtagatgcaagtatttacattcattaaagtcataaaagtcatcgataaataagtacattggttcgaatacctaaatatctagagtgcctgtgagattgtttaagatgtaccagatgtactcaatgattaataatgaaggttacttatgattgtttagcttatggcgtaaataaattgaaacttatattatgactgctattacattaaatggacattataaatcaacctagcttactttagcagagttttacaatcttaaattgaaataaatatccaaatacagaaaaccccttttgaagcacaaatattcctttaaaaactttatttattgagtgtaaaaattctttgggataaccattcattcttctggcatataataggacgaacttggcaatttacaaataaagttaattatcttttaagaatatggctttttgaagcaaaagtaataagaagtaataataaaaaaaactaaggctgtctttggctagttaaaatagtgtataaatgcttgggagtatttgaaatcgaaatcggttatcttaaaatccatatttggcgtcaacgtaaagctaattgattatatgtaaaactaagactaatcaacaaacagtttgaactgaaaaacaggcgtgagattagaactctgggaaacactatttctagactgcatcctcagcttgccatcctggactcacctccttcgtttcactgagattcagcaaactagagaaacggaacgagatggtcttggacagatgcttttcaaactccctgctgtccaggttgtctgggatgagactcttgttggtcatatccaggtaggatcgacccctcttcacggggacagaataatgtggcagtgaggtggtcgctggaggttcactggtcatgttgctgtagcttggagtacaactggatttccgaatatttaaggggaatcgcaaatcgttttcgtatcgcaaaacctgcccgttggcggtagcatcaagcaaaggtcgtggtaagtcgtaacccggcggagccgttgaagtcactggcatctcctcctcagactgatcgtagctggtggcctggtcatggatgtcgtaggctattttgggaggtgaccaaaggtgctgcaacgattctggttcgcccaattccgtggttattaaggcggaatcatccccacaataaaggggattcgaaacggcattcgtttccagatctatgtacttggcattgtttcccaatagcttctcaaactccgatgctaaaaacttgaatgagggtcttccatttggctcgtctgcccagcaagttcgaactatagagtagacagcctccgaacagttttctggtctgtccatgcggtagcccgtcttcagcaaggaccacaaattctggggagcaatgccaggatacggagaggctcccagagtgattagttcccagcagagaacgccaaaggaccacacatccgatttgctggtatacacatgatccgctaaagattccggagccatccactttaaaaggggtttccggattaatattaatgttatagggggttaattttgaggtcttaccttgacgggcacacgatctcgggatctctttaaataggcatcgtcctcgtaaacatctcgagtcagtccgaaatctgatattttgcatatcttgccatccgcaaggagcacatttctagcagccaaatcacgatgaaccaactggaggataaagggcgtctatatattggttgaaaaaattatttctcttacccacctttaactcagaaaggtaagccatacccttgcaaatctgccaagcaaaggtaagtaccatcttaacattaacaggctccactccatctgcgaaatctacgccggcacactcgatcttccgactgagtcgaagatagctcctcagagagccataccgagcatactcgatgatcaggagaggtgcttcggaggaggtgcaggcgcctagcagcttgatcacattcgggtgagagacctcctggaggagctgaaactccgaaagcagggccatgtactccactgaattggagcccttcttgagcatctttacggccaccgtggttattcccggcaagccagcgatctcggtggcaaagccctttagcacctgaccaaattcaccctctcccaagaccgtatctagttgcagtttttccctgggaaactcccatttggcatccccactttcgaacctgaagccactctgcagcggcatcaaggcgaaatctccgcctcctgattccggaagagcttgtttcgacgacgtggtcattgattgcttgcccaagcgacgttggagcatctttctctgcgcaatcagcaaacagaggagcaggagaacgaacaatagagggcacgtgatcacgaagaacatgcaggagcgatcgcattcgaaaccggccacatttaggacacccagaagcatgggatcctgaagtggctgattcggaggagtgccccttcgtacccccagcagaggttccgcctctgtttcgttttttcgttttcgcggtttcttcatcttgggttcctcatctaacggagcgcacgagcacttgccattatcctcgcaaatgcaggtacccgaggcactgtatatccctctcttattctcattacttgaatggggacccacgattcttccagctggcgtgcaatcctgcggacaggccataggattcagttcctctaggggatcacagacatgatctggacagtaacgagattcgggtacacaggaaccatatctagtgccgaacatggctgagttggaccccctccactggcaagatccaccacctgtggccaagccgcaatatcgaacgcattgcgattggtatttaatctgggcacatgtctgtgatcgagacttgaccttcagttcgcaactagtattctcgggtctaccatgaaccaagtgcacattgatcactctcacgtgcgacagcctttgctgatcgatccaggtgacattcaggaagtatatggtttccggtgcctcctccaaaacctgtgggttcttcacaaagacaatacccgatgttgaggtaataccaaaagctccaagtttatcctccacaatatcgaatcgaatagatcgtaaccgcatcaagtccaaaaaactgtcaggctggacaactcgaaaattagaagcagccgatctgtatacggaaacatccttatcgtaatccacggtcggaggacttagagatcggcctgcagaatctccattgaattcttcgctctcgaatattcgatgttgacgtgcccgtaggggaagagcttgcggtaattcttgctcagattcgtgaagcttactcagattaatatgatagcaaacattggctgtcgctgacatggcatcgacacggcttacaatggtcagatcccgagcctccaaggacacacaatagggggtttcccggaagacaccgtttcgggagaatcgcagttctatttcaagagaaggaatgtcattaatgcagtttatacaacctttacagattgggattgtgataacttaatacccatactcacgacaactgacgatggtatgtggtctgcccgtgtgatccgcctcgtaggcgtggcagtcgggccgaaacagaccatgagagtcattgtggacggcgtagacaaggtgagcatttgcctccaatgtatccttgtccacgtagattactttttttcccgcctcctcgtcctgtgggatacgaaaaaataacgaggggcatcatattagcagctagtttcattagcatttactgaccagcgctaattaaattccacttggcaccgcctggcaaattgctgcactgccctccaaggatgccctcttggtgattagcattttaattcgtgcacaaggtcaggctggggttttagatcctctgggacctgacatttccctgcgaagtgcttgactcacccctctcctaggttaaaaacccatttaacgcatcccagtaacaaggacattagcagactgtcctctctggacttgggtttacgttggaacggtagctttttttaagacaccacacacgatgcaattaaataagtctcttcttgaccacatgtttatatttgatgaatcatggtgattttagagacaaagaagtctgtttaagaggatcgccacgcccgcaaacctcttcaacggctgagttgatttcatgccaccaattttaaaagaagtcttgtgttttttaaatgttttttaaaggtatcggatagtcgaggtaattgacaacagcgttctctgttgtcagagaaacagaccccaaatattataattttaagaaattgcttttattgtatagcttactgaagttcactcggtagatatatatatattcttaactgaactcgtttccattttgtcccacccatgtccagttgcaactcagccacacctcatcacatcaaacctcttcaacggctgagttgatttcatgccaccaattttaaaagaagtcttgtgttttttaaatgttttttaaaggtatcggatagtcgaggtaattgacaacagcgttctctgttgtcagagaaacagaccccaaatattataattttaagaaattgcttttattgtatagcttactgaagttcactcggtagatatatatatattcttaactgaactcgtttccattttgtcccacccatgtccagttgcaactcagccacacctcatcacaccaaacgctgttcactttattatgggacaagtcggcagcaatttcctcgaaataaaataaaatgtacattattgtatgtacattattttaatgctaagccacccggggtaatttgtaacggcaggactttagtacagagccaattactctagttggagtgagcagatcgctctatctgcacctgaactgacatagttcgcggatccttagggataggcttggctagtttccaacacgacagcattatttccttttgtagcaactttaagggaccc

SEQ ID NO: 110 - DNA, 2889 bp, DROSOPHILA
atgtccttgttactgggatgcgacgaggaggcgggaaaaaaagtaatctacgtggacaaggatacattggaggcaaatgctcaccttgtctacgccgtccacaatgactctcatggtctgtttcggcccgactgccacgcctacgaggcggatcacacgggcagaccacataccatcgtcagttgtcaactgcgattctcccgaaacggtgtcttccgggaaaccccctattgtgtgtccttggaggctcgggatctgaccattgtaagccgtgtcgatgccatgtcagcgacagccaatgtttgctatcatattaatctgagtaagcttcacgaatctgagcaagaattaccgcaagctcttcccctacgggcacgtcaacatcgaatattcgagagcgaagaattcaatggagattctgcaggccgatctctaagtcctccgaccgtggattacgataaggatgtttccgtatacagatcggctgcttctaattttcgagttgtccagcctgacagttttttggacttgatgcggttacgatctattcgattcgatattgtggaggataaacttggagcttttggtattacctcaacatcgggtattgtctttgtgaagaacccacaggttttggaggaggcaccggaaaccatatacttcctgaatgtcacctggatcgatcagcaaaggctgtcgcacgtgagagtgatcaatgtgcacttggttcatggtagacccgagaatactagttgcgaactgaaggtcaagtctcgatcacagacatgtgcccagattaaataccaatcgcaatgcgttcgatattgcggcttggccacaggtggtggatcttgccagtggagggggtccaactcagccatgttcggcactagatatggttcctgtgtacccgaatctcgttactgtccagatcatgtctgtgatcccctagaggaactgaatcctatggcctgtccgcaggattgcacgccagctggaagaatcgtgggtccccattcaagtaatgagaataagagagggatatacagtgcctcgggtacctgcatttgcgaggataatggcaagtgctcgtgcgctccgttagatgaggaacccaagatgaagaaaccgcgaaaacgaaaaaacgaaacagaggcggaacctctgctgggggtacgaaggggcactcctccgaatcagccacttcaggatcccatgcttctgggtgtcctaaatgtggccggtttcgaatgcgatcgctcctgcatgttcttcgtgatcacgtgccctctattgttcgttctcctgctcctctgtttgctgattgcgcagagaaagatgctccaacgtcgcttgggcaagcaatcaatgaccacgtcgtcgaaacaagctcttccggaatcaggaggcggagatttcgccttgatgccgctgcagagtggcttcaggttcgaaagtggggatgccaaatgggagtttcccagggaaaaactgcaactagatacggtcttgggagagggtgaatttggtcaggtgctaaagggctttgccaccgagatcgctggcttgccgggaataaccacggtggccgtaaagatgctcaagaagggctccaattcagtggagtacatggccctgctttcggagtttcagctcctccaggaggtctctcacccgaatgtgatcaagctgctaggcgcctgcacctcctccgaagcacctctcctgatcatcgagtatgctcggtatggctctctgaggagctatcttcgactcagtcggaagatcgagtgtgccggcgtagatttcgcagatggagtggagcctgttaatgttaagatggtacttacctttgcttggcagatttgcaagggtatggcttacctttctgagttaaagttggttcatcgtgatttggctgctagaaatgtgctccttgcggatggcaagatatgcaaaatatcagatttcggactgactcgagatgtttacgaggacgatgcctatttaaagagatcccgagatcgtgtgcccgtcaagtggatggctccggaatctttagcggatcatgtgtataccagcaaatcggatgtgtggtcctttggcgttctctgctgggaactaatcactctgggagcctctccgtatcctggcattgctccccagaatttgtggtccttgctgaagacgggctaccgcatggacagaccagaaaactgttcggaggctgtctactctatagttcgaacttgctgggcagacgagccaaatggaagaccctcattcaagtttttagcatcggagtttgagaagctattgggaaacaatgccaagtacatagatctggaaacgaatgccgtttcgaatcccctttattgtggggatgattccgccttaataaccacggaattgggcgaaccagaatcgttgcagcacctttggtcacctcccaaaatagcctacgacatccatgaccaggccaccagctacgatcagtctgaggaggagatgccagtgacttcaacggctccgccgggttacgacttaccacgacctttgcttgatgctaccgccaacgggcaggttttgcgatacgaaaacgatttgcgattccccttaaatattcggaaatccagttgtactccaagctacagcaacatgaccagtgaacctccagcgaccacctcactgccacattattctgtccccgtgaagaggggtcgatcctacctggatatgaccaacaagagtctcatcccagacaacctggacagcagggagtttgaaaagcatctgtccaagaccatctcgttccgtttctctagtttgctgaatctcagtgaaacgaaggaggtgagtccaggatggcaagctgaggatgcagtctag

SEQ ID NO: 111 - protein, 962 aa, DROSOPHILA
MSLLLGCDEEAGKKVIYVDKDTLEANAHLVYAVHNDSHGLFRPDCHAYEADHTGRPHTIVSCQLRFSRNGVFRETPYCVSLEARDLTIVSRVDAMSATANVCYHINLSKLHESEQELPQALPLRARQHRIFESEEFNGDSAGRSLSPPTVDYDKDVSVYRSAASNFRVVQPDSFLDLMRLRSIRFDIVEDKLGAFGITSTSGIVFVKNPQVLEEAPETIYFLNVTWIDQQRLSHVRVINVHLVHGRPENTSCELKVKSRSQTCAQIKYQSQCVRYCGLATGGGSCQWRGSNSAMFGTRYGSCVPESRYCPDHVCDPLEELNPMACPQDCTPAGRIVGPHSSNENKRGIYSASGTCICEDNGKCSCAPLDEEPKMKKPRKRKNETEAEPLLGVRRGTPPNQPLQDPMLLGVLNVAGFECDRSCMFFVITCPLLFVLLLLCLLIAQRKMLQRRLGKQSMTTSSKQALPESGGGDFALMPLQSGFRFESGDAKWEFPREKLQLDTVLGEGEFGQVLKGFATEIAGLPGITTVAVKMLKKGSNSVEYMALLSEFQLLQEVSHPNVIKLLGACTSSEAPLLIIEYARYGSLRSYLRLSRKIECAGVDFADGVEPVNVKMVLTFAWQICKGMAYLSELKLVHRDLAARNVLLADGKICKISDFGLTRDVYEDDAYLKRSRDRVPVKWMAPESLADHVYTSKSDVWSFGVLCWELITLGASPYPGIAPQNLWSLLKTGYRMDRPENCSEAVYSIVRTCWADEPNGRPSFKFLASEFEKLLGNNAKYIDLETNAVSNPLYCGDDSALITTELGEPESLQHLWSPPKIAYDIHDQATSYDQSEEEMPVTSTAPPGYDLPRPLLDATANGQVLRYENDLRFPLNIRKSSCTPSYSNMTSEPPATTSLPHYSVPVKRGRSYLDMTNKSLIPDNLDSREFEKHLSKTISFRFSSLLNLSETKEVSPGWQAEDAV

SEQ ID NO: 112 - DNA, 3218 bp, DROSOPHILA
acaatttagtcggactaaaatgcaacaaaactatataatttgcgtcgcagccataactcgcgaactctgacccctggcacgcgaggtgaaagggcagtgagagtgacaggtggcgcacaaatcagcaatctgcatgcgaatcggtattcacgtgggccagaatgtgaatatgtgaatacgaatgtgagaatgaatacgaaatgaagacgttcgaaacgaccgtccgaggtcagttaacatttttcagggcactacgcatggcaatccatttgaaaaattcgcagaccgttaggcatattacttgccatttccggcggggcgtaaaaattcaaatttgattgcaatgcggcagaaactgaattatagggctaaaatctgggcaaaggccaaatatgcaaaggaaactaaaaataggcatttaaatgcaaaaggccgcgccttttggcgattgcaaattaacgctaataaataagagaaagcgtcctcgatttgtgtggcccacgatttaccaacaattgcattcatttgcatacgcaattatgcgataattgccacaaggttcccagccccaaaatgtatgctacaaataaggaagagtcgatgtgaaaatggaagggcaaaggtggaaggggaaagcctatcccaccattggtttgctatcttatcagttgtccgcaactattgattcattactcggtggcacagtgggtgtggcagcatcaacgatagtgactcatgggtgaactcaaaaaagaaatggtatggcaatccattttgattttttagtaaggaatatatttataaacatacaaaacattattttatattttatttgagacaatatatgtccactgtgctgccgtgtgtttgattacacggtacgcataattgaggtgctcggaatttatgcggcttatcagccatcgatatgcggttagatataattgctttgcaataagcgacctttactgattgctttctttttatctctggccataaattgcagctattgccccacaaaatgctgccaaaccacgcctgagcctcaatctcaatctcaacctgaactagggccagaaccagaacacaactgtgatcatagacataacaacgatagtggtgccggaggaaagccattggaaaccaggagaaccagcgtcacagccaaagatgagggaatccggggacacagccagcagcctgccagaccgcaactgagcgatttatagatcggcagataataccgcgaccggaaaccaaaatcaatttccccggcgatagcaatcggcagaggaaaagggcaggacatcggacaacagagcagcacattcgccaaaaggaggctgtaatgacgacaattgacgcgatgtagcgctgtgtcgacaatcacatcgatgagatccatggacttggcgaaggcatctttcagattgatatgatggaaggagacaatgctgccctcgcgcttggcacgatcgagtgcctcgcgtcgcttgagggccttttcgcggcgcatctgattcttataaaattcagcaaaattgttaacgatgatgggaataggcaaagcgattaccagaacaccgcatatgcaacacacagtaccaataacctttcccagtgcagttgtgggatagatgtccccgtagccaacagttgtcattgtaatacccgcccaccaaaatgtttccggtattgaaacgaattttgtatccttttcatccttttcggcaaaatatgccagcgaagaaaatatgagaacgcccatggccaggaacagcattagtagaccgagttccttatatgagttacgcagcgtaaagcctaacgactgcaggcccgttgagtgacgggccagcttaaggattcgcaggatgcgcatgatgcgaaagacctgcaccacccgacgcacatcctggaactggtccgttgcattcttattcgtttccaatagaaataacgaaacaaagtatgggagtattgccaatagatcgattatgttaaggccgcccttaaagaacttccacttgtccggcgaggcgctaaacctaagtatgtactctagagtgaaccacgtgatacacacggcctcaaccattgccaattgcggattatcctgtggtgtaccgttgtcaatgtgttgtagttgtggtagggtgttcaacgtcagggctatggtagacaggactatgaatagtatggatatcactgcgataacctgcgaacggtaaagaacaatcgagactttgtcgagaccatgattcagcaacgattcaatttcaatgcaatcaaatcacaacgataatagtaggtaggtacgagtatttgtaaggtatttgatatttggttttggtttttatatttgctatatttggtaggcacataacacgatacgttcattccatatcaagtctgtctttaatacacatcaagttttggtttttgggttttaattaattgtaaaacacggtcacaacaatcagcaaatgtcagcgagttctctccacgagagttcactttgattctgtatgactatctatctgctttttaattgggttaagttgaccatctgtgttagagttctggtctcgaatcaagcttcttctgaagattgttagtcgtaactgggtctgttaattttggttgtaactatatcgtttcattgggcaggggttacgcttcatttggggtcttagttggctttcctaaacagttctttgtacttttcaaaggctgctgtactatatgtgaagtatatatttattcgtcgtgaatccttcttcgtaacacaaaccataagtcaaaatcaaaggttggcaacaaacgaaaacacaaaaacataaaacatgggttgggtatcctaggtctcgaagtttcggggtctctagtctagatcaactctttctctggaaggtgtgggtgtaagtggttgaggtggttctgtggttagtggttttcggtggctagtggttggtgtggtgtgcgtgtggttgtggttgtggttcgggtaatagttgtggtgtgggtaactgtaagtgtgtgttcttgttgtggggacagatcacatgacgcaacacaaggacataacacacctacatacttatcagctatacgtgtgtgtgtctgaacggttctaaaatggtatgagggtgaaccagggggggcactccgtcgttaaataagagacgctacccttggggtctgcagtcgacataatt

SEQ ID NO: 113 - DNA, 3339 bp, DROSOPHILA
ttgcagctattgccccacaaaatgctgccaaaccacgcctgagcctcaatctcaatctcaacctgaactagggccagaaccagaacacaactgtgatcatagacataacaacgatagtggtgccggaggaaagccattggaaaccaggagaaccagcgtcacagccaaagatgagggaatccggggacacagccagcagcctgccagaccgcaactgagcgatttatagatcggcagataataccgcgaccggaaaccaaaatcaatttccccggcgatagcaatcggcagaggaaaagggcaggacatcggacaacagagcagcacattcgccaaaaggaggctgtaatgacgacaattgacgcgatgtagcgcagacttatggtcggcgaacgcgacagggaccgtgaggcggtacgctgggcaacgggtgaatcaacaccgcttcaaaccaataatggagtattacaaatggtcgggcaattgcaaggtggacaggctgctggccagcaacagcaacagcaacaagcgactcagcaacagcaacactcgaagcagcagcagcaacagcagcagcagcaacagcagcaactgcaactcaagcagcatcagcagcagcaacaggacatcctgtatcagcaacataacgaggcaattgcaattgcacgcggactgcaggctgcaacacctgccgacatcggcgataatcagccgtactacgatacaagcggtaatgtcgattgggagcgggcgatgggagccggtggagctggtgcatatggtggcatcggcatcggatctctaccagcagctggcggtgctgcttatcaccttgggccagctaatcccgcaggcctcgtttctcgtcacttggattacggtgatggcggccaccttgctggcccatccgccggtcttcctgctggagctgtgggatcaggagcaggagcgggagccggtgcgggagcatcagtcacgggatcaggatcaggagcagggacaggaacaggaaccggagccggatctggatcgggcagtggagcagcaggcaaggaagttcgctacgcccctttcccagtcgcatcaccaacgcactcgattcccacaacctcccagcagatcgttggcagcgtcggtggcgtgggcgtcggtggtgccagcagccagtcgatttcgggcggtgttcccacccacagccagagcaacaccaccggcgctctgcagcggacacattccagatccatgtcctccataccgccgcccgagccgttcatgatagcccagtcgaaggcggtcaacagccgcgtgtccatcaacgtgggcggggtgaggcacgaggtcctgtggaggacgctggagcggctgccccacacgcggctcgggcggctgagggagtgcaccacccacgaggccatcgtggagctgtgcgacgactactcgctggcggacaacgagtacttcttcgaccgacatccgaagagcttcagctccatcctgaacttctatcgcaccggcaagctgcacatcgtcgacgagatgtgcgtgctcgcgtttagtgatgacctggagtactggggcgtcgacgaactgtacctggagtcctgctgccagcacaagtaccaccagcgcaaggagaacgttcacgaggagatgcgtaaggaggccgagtccctgcggcagcgcgacgaggaggaattcggcgaaggtaaatgcgccgagtaccagaagtatctgtgggagctcctcgagaagcctaacactagtttcgccgcccgggttatcgcagtgatatccatactattcatagtcctgtctaccatagccctgacgttgaacaccctaccacaactacaacacattgacaacggtacaccacaggataatccgcaattggcaatggttgaggccgtgtgtatcacgtggttcactctagagtacatacttaggtttagcgcctcgccggacaagtggaagttctttaagggcggccttaacataatcgatctattggcaatactcccatactttgtttcgttatttctattggaaacgaataagaatgcaacggaccagttccaggatgtgcgtcgggtggtgcaggtctttcgcatcatgcgcatcctgcgaatccttaagctggcccgtcactcaacgggcctgcagtcgttaggctttacgctgcgtaactcatataaggaactcggtctactaatgctgttcctggccatgggcgttctcatattttcttcgctggcatattttgccgaaaaggatgaaaaggatacaaaattcgtttcaataccggaaacattttggtgggcgggtattacaatgacaactgttggctacggggacatctatcccacaactgcactgggaaaggttattggtactgtgtgttgcatatgcggtgttctggtaatcgctttgcctattcccatcatcgttaacaattttgctgaattttataagaatcagatgcgccgcgaaaaggccctcaagcgacgcgaggcactcgatcgtgccaagcgcgagggcagcattgtctccttccatcatatcaatctgaaagatgccttcgccaagtccatggatctcatcgatgtgattgtcgacacaggccacaatctctcgcaaacggacggcaacagcaccgaaggcgagtccaccagcggacgcaatccggccaccaccggaaccggatgctataagaattacgaccacgtagccaacctgcgcaactccaacctgcacaaccgacgcggatccagctctgagcaggatgcagtgccgccctacagcttcgacaatcccaatgcccgccagacctccatgatggccatggagagctatcggcgcgagcaacaggcactgctgcagcaacagcaacagcagcagcaacagatgttgcagatgcaacagattcagcagaaggccccgaacggaaatggaggtgcaaccggaggaggagtggccaacaacctggccatggtggccgcatcaagtgcggcaacagccgtggccaccgccaccaatgccagtaatgccagcaataccgcccccgggtcagagggcgccgagggaggcggtgatggagatgggggcggtgtcgatgacgacaacctttcccaggccaagggactgcccatccagatgatgatcacgcccggggaagtggccgagctgcggcgccaggtggccctggagaacctgcagaaccagcggatggacaacctggagcaggacgtgcccgtggaattcgagtgctgtttctgcacgaccaagggtttgccgggatgccatggcgagtgtattccattgcgcgcgaatagcgtttag

SEQ ID NO: 114 - protein, 985 aa, DROSOPHILA
MVGERDRDREAVRWATGESTPLQTNNGVLQMVGQLQGGQAAGQQQQQQQATQQQQHSKQQQQQQQQQQQQLQLKQHQQQQQDILYQQHNEAIAIARGLQAATPADIGDNQPYYDTSGNVDWERAMGAGGAGAYGGIGIGSLPAAGGAAYHLGPANPAGLVSRHLDYGDGGHLAGPSAGLPAGAVGSGAGAGAGAGASVTGSGSGAGTGTGTGAGSGSGSGAAGKEVRYAPFPVASPTHSIPTTSQQIVGSVGGVGVGGASSQSISGGVPTHSQSNTTGALQRTHSRSMSSIPPPEPFMIAQSKAVNSRVSINVGGVRHEVLWRTLERLPHTRLGRLRECTTHEAIVELCDDYSLADNEYFFDRHPKSFSSILNFYRTGKLHIVDEMCVLAFSDDLEYWGVDELYLESCCQHKYHQRKENVHEEMRKEAESLRQRDEEEFGEGKCAEYQKYLWELLEKPNTSFAARVIAVISILFIVLSTIALTLNTLPQLQHIDNGTPQDNPQLAMVEAVCITWFTLEYILRFSASPDKWKFFKGGLNIIDLLAILPYFVSLFLLETNKNATDQFQDVRRVVQVFRIMRILRILKLARHSTGLQSLGFTLRNSYKELGLLMLFLAMGVLIFSSLAYFAEKDEKDTKFVSIPETFWWAGITMTTVGYGDIYPTTALGKVIGTVCCICGVLVIALPIPIIVNNFAEFYKNQMRREKALKRREALDRAKREGSIVSFHHINLKDAFAKSMDLIDVIVDTGHNLSQTDGNSTEGESTSGRNPATTGTGCYKNYDHVANLRNSNLHNRRGSSSEQDAVPPYSFDNPNARQTSMMAMESYRREQQALLQQQQQQQQQMLQMQQIQQKAPNGNGGATGGGVANNLAMVAASSAATAVATATNASNASNTAPGSEGAEGGGDGDGGGVDDDNLSQAKGLPIQMMITPGEVAELRRQVALENLQNQRMDNLEQDVPVEFECCFCTTKGLPGCHGECIPLRANSV

SEQ ID NO: 115 - DNA, 4533 bp, DROSOPHILA
ccaaattgcaataagccatacagaattgcgacttttcaaaacccaaccgagtcacttaatcaagaattaaaatatattccttgatgaaaataccagacgaattaacgtaagcgtatctttttaaattctagcatacctacaggcaaaaaatataacaaaatatttaaaagacgtcttttcggcggtgtatgtatatacatttcctcaaagcgagcatgataatattaaatgcgatatattttggatagataaaaatagtttaataaccttaaaatattagtatctttaagctctgtaccaaatagaaccacttataaaatccatctctctacaaccacgtagacaaatgtaggccacacgtggttcatcagctcaggcttttgtttaatataaaaaatatacatacaatatgtagatatgtcataaatatacatacttcatgatttacagataacaagagaacgtatttggacaaacatttatttccgtttgttattagatgtaaacgatatgaaaaagatgtctaacaagatgcatgagagtcgacagattgagtgttagccagtgaccgcgtttgtccacgatttactggcttgttaaataattttgagataagatgcaatgagcgtcgcgacagttgcttatgttattgaatctagttaacttctctttaggtataatactttggcagccaaaaactaagaatgagctaggcaaaaggtcctgacaaagatgcaacaaactaaaattaataaacaaccaactcggacgctgacatggcagtaagctaatggttaatgcgaaaatgactaagggtacgacttagagactaaactagaaggcttaacgactaaaggagctttgattaactttcgcaatgcgggcttgcgctgccgcccctccgaagctataaatagtttttaactagctttatacatgtgtgtttggttgaaaataatttacactttttggttgcctttagctgcgctgtcggcttgggttacgtgcatatttcgctgctggtggcgcaggaattactcgacacattggcgttcagcgctcccgttcccgtggacatgctaaccggcagactggatgcggatgaagctggtgctgcgggtggtgtggtggtggagtctggttcagcctgttgggcttgggcttgagctgccagattgttcgtcttgctgttttccagcttggccctaatgagggcctcctcgcgttccttggcatcgaagtaccagacggtgatggcatagcgggtacggtgagcgggctgcacttcgtggggattccgaatgtcagaccagaagaatatcaggcgatcaaacttgggctcaatatccgccactgtggttccgggtgttggccgaattctgtttgttgattaaagttaggttgattttcatatcacaggtatatttattacacctaccgcagaatgccgccactttcccgcgcatcccagttgatattcaggtagtatatggccgttataacgcggccatccttttggggattgtccacatgcatgacgtagtgagttcccgatcccggataacaagcgaccattgcctaagattaaggaatcatattttagcataatctcaaaggtattttcacagcatatgcttaccctcgtgcgctccctgatgtggtagttgcccaagatgccattatccttcatcgtgttaacacgatacaccacagagtcaatctgaaaggtaaaattagattatacttcttaacttaagtaagcaagtagtttagggaccataaaagtatttcttttgtacgttgctcacctgattggtcagataccagacattgctgcagcccggctcattgccaccaacccacttgatcttatcgcctcggatcttgtcaccgcgcaccgcgggtgcatcgggcgtctggttggtcaccacttggccatcctggaaggctcctgcgttgtacatgcttcgaacctcgttgaggatcttcaggcccgtctccatccccaggaagtcgtccaccacggacagaccatactggttcatgtcgctgatgatgttacggcacagatcctcatagcggcgctcactgcggaaaatcagaagggaaacaaagatcttatgttaattacgttcccttttagtagagagacgaagagaaaaagtatatagacctttcaagaccgttaatctgtaactgaattagagataccgatgtgagtgaggtcaccttggggaaacccctgcatctaattaatgttcacgcttttccttgctatttttagcacaaaagttcgattgcgcttaagcttttttacaggcgtttgagcaacgggtactgcgatgcatacaattttacgacttttttatgatgcgcccataaaacaaatattttcatacatgtcggtggttcccagtcacgtaggccacccagaactcaactggcccagatgatcgcgaaattccggataagcaacgcaaagcaacacattgcgaaaaatatgaaacagagatgaaacatttcgcacaagttcacatgcgccattcaaagtcataaagtcaaatggttgtcgcaaaaatacaaatattactgaaacgtgccacgctgttgatcgaattcccagaatgggatggggagaactatctgcacgcaacgcaggaaagcaaattcgctaccgccaacacattaatatacgaattcaaaatcagcggctgtctaaatattacgatacacgaaagacgacattgacgaccacaaaccaaaactgttaaccggttttattgacattcgcatagcccaagttaatgcaaaccataattaacagattataagaggtgtgaaatccagaagagaaaatagttaatactcagcccgagaaacaactattctaaaaaaacgaatccaacacctaaaatgatgttcattgttgaaaaagtttaaaggaattttaaaaagtagaatgagatttgtattgtaatagcaacatcgttttcaaaagccccttagcttaaaaactctttttaaaattgaaacttaaagttaattcggggaaattagattagatacctaagggcaataaatatttatatccttcactgtcatgtggacactcttaattctctccttaggaggtttccttaattatagcctcattttacatttgttccttaggaactttaattcagtaattaaaatatcattaccgcttgtccaaaagttcccgaaagtactgctcagcattggcaggatgtgccgagtgtttaaaaaagtttttgtagtccgtggtcgtggaggttatcattttgccttgattagtcagcttgcttctcactgttatcacaagaactctattactcttgagacagctttaagactgaagtcctatctttgtatctccacagagttattagttgttgttgtgcagagaaagggtgaattaagttcttggcatttgaattgtttcaggatccttttttagataccctgaattggttaattactgttcttgggagatgacgggttctcaaacgactcctccagaatttcacgtgcaactgaagggagtttataatttgcagcgagttttatgcgaaggggagcctcgaattttagagggaaagagtgcgagttatacgtacaccggcggttatattatatggtatataggtgcaaatgtgttggtggggaggtacgtattattgcagtttgcatttgttggggccggctgcctatatatttcacttttcgctttgtttcactggcagatgtttgttttgatttgactttgtttatgcacagttagtcacgtttgtgtattactcagcttcggttaactaatttaagtgaaatgtgaagcagctgaaccgaaccgcactcgtcgccgttcgttttccgaatgcggcagctgagcaggtcgctctcgctctttaccgttggttacgaaggagagagaggcagagcgttttaagagcaggtgaaaacaatctagctattttatggccaaaaactagattatgagtgctcgaattctggtgtgttagtcgaacatgtgttaacgtttataaattaaatggacatctacgagcaatacttgaggcatttaaaccccagttcaaaattggctaaggtgaactgtacgtctatcccggattcggaatacaatcgtttaatacgataacatcaagatcgtagaaaaggtttagtttggactacaaattgtagttcgtttgctgtaaccaaatttttctagctattttctgtccgcctcccaaatccgttcatcactatctcagagcgtccatgaaactacgagtaaatcagaaagttgggggcctgggaagcagctaaataatcgaaggagaagcagccgcttaaggcgataagcagcaccttggtaggtgagagcaaataatgaaaaatacgtacatattggtaaaaggtaaaaggcagctgcagatagcgaaaaaccgaactgaacgtgcaatttatgggatcggataccccgcaaggttccagaaagcgggaggaagctac

SEQ ID NO: 116 - DNA, 1210 bp, DROSOPHILA
agtcgtttgagaacccgtcatctcccaagaacagtaattaaccaattcagggtatctaaaaaaggatcctgaaacaattcaaatgccaagaacttaattcaccctttctctgcacaacaacaactaataactctgtggagatacaaagataggacttcagtcttaaagctgtctcaagagtaatagagttcttgtgataacagtgagaagcaagctgactaatcaaggcaaaatgataacctccacgaccacggactacaaaaacttttttaaacactcggcacatcctgccaatgctgagcagtactttcgggaacttttggacaagcgtgagcgccgctatgaggatctgtgccgtaacatcatcagcgacatgaaccagtatggtctgtccgtggtggacgacttcctggggatggagacgggcctgaagatcctcaacgaggttcgaagcatgtacaacgcaggagccttccaggatggccaagtggtgaccaaccagacgcccgatgcacccgcggtgcgcggtgacaagatccgaggcgataagatcaagtgggttggtggcaatgagccgggctgcagcaatgtctggtatctgaccaatcagattgactctgtggtgtatcgtgttaacacgatgaaggataatggcatcttgggcaactaccacatcagggagcgcacgagggcaatggtcgcttgttatccgggatcgggaactcactacgtcatgcatgtggacaatccccaaaaggatggccgcgttataacggccatatactacctgaatatcaactgggatgcgcgggaaagtggcggcattctgcgaattcggccaacacccggaaccacagtggcggatattgagcccaagtttgatcgcctgatattcttctggtctgacattcggaatccccacgaagtgcagcccgctcaccgtacccgctatgccatcaccgtctggtacttcgatgccaaggaacgcgaggaggccctcattagggccaagctggaaaacagcaagacgaacaatctggcagctcaagcccaagcccaacaggctgaaccagactccaccaccacaccacccgcagcaccagcttcatccgcatccagtctgccggttagcatgtccacgggaacgggagcgctgaacgccaatgtgtcgagtaattcctgcgccaccagcagcgaaatatgcacgtaa

SEQ ID NO: 117 - protein, 325 aa, DROSOPHILA
MITSTTTDYKNFFKHSAHPANAEQYFRELLDKRERRYEDLCRNIISDMNQYGLSVVDDFLGMETGLKILNEVRSMYNAGAFQDGQVVTNQTPDAPAVRGDKIRGDKIKWVGGNEPGCSNVWYLTNQIDSVVYRVNTMKDNGILGNYHIRERTRAMVACYPGSGTHYVMHVDNPQKDGRVITAIYYLNINWDARESGGILRIRPTPGTTVADIEPKFDRLIFFWSDIRNPHEVQPAHRTRYAITVWYFDAKEREEALIRAKLENSKTNNLAAQAQAQQAEPDSTTTPPAAPASSASSLPVSMSTGTGALNANVSSNSCATSSEICT

SEQ ID NO: 118 - DNA, 4136 bp, DROSOPHILA
ttattgatgaatcacttaacattcattgtatacccttcagctaatcttccaatataagatgcttatgcactatcagcggatcacacaagttttaaccaaaatctttcggaagaatttagattaaacaatgactttaataaaaactacagaagaccaataagatgataccctgtaggcgcctggcaattctgtatttcctacattactactttccaacttccttgggggaaaagctgtgctctgctcctgattaaatctcgagttgatcgctcggttgcacacacattagacccactatttcatggattcgcatggcagtttctcatgacaatctttgaggctggccaagacaagcgtgcgttttggtattgcgtaagacgaccagtttgcagccagccagctaggaggagctactctctccctagcttttcgccagaataaaggtctaattgagatgtctcacttacagtagcagctggtgactttcgcacatgatcttaccaaggacatgaggcattgtgtagaaaaaagaaaactatctctacttaagctgtgtggttaacaggcagccacccactggagctaccacagatccacatgctccacgatcattagccagattcaatttcctcattagtcgcactcaattatgtgccgacgagacggctccgcagcgtccactggaggatgagggatcaatagttcggggctggcgggaggatcggcggcaactgctttcccaaaacagtagtggctggagaaaactcgttgatcgttttggacgtaatgggaaagctattatgcagctttaattcaatcggcctgctagttgtgtgctctgagctaatgcgattggctcgttgtcggattgtttgtatctcggtgtcaaagactttagatatccagagccggggagctacaggaaacccaaaccgaagctccactccttccgcctggctatataaaaagcattgttgccatctcggccggcagtaggaaattcgaattgaccgcgttaccgtcaccgtcaccgtctccttgcccgccgcagtcggccgtcattgatcctcgtcacaattatcatcgcatcgcattgctcatttcatcgttaaacgatcggatcatttgattgatcgatcgcatgtgcgaaggattaaagcgatgagaagatcgaaagtgagtgatcgatgtgcatgggattattacccttaaaagtgtgccatgaataggagtagtgatttggtggcagtgattttgagcatatccttggactacatgctaatcgatcgattttacataacaacatgtttgattcacaaaagcaacttactgttcgacttctgatcgggtcttcacttgaaccaaacaatcttcacctcttacttatccatgaccgatagacttaacttgcagtgccatccagttgaaataagagattcaatctttattactgctgatttattccaaactctgttcataacacatttaaaagaataacatgcagaccaccactgcaatacacaatttaaaacttgattatttccttggattgacttgcataacatttacgaatcgcttgatgaacttaccaacatcattcgattaaaggtctaaataggcgggacttaaattagtattagattaaagccccaatcacaacaatcccttattaaattgaataagatgatcacaaaaactagggccttactaacccaaattggattcgaaaacgaaagagtgcaaatgaagagagttataactagaaaaccaaatttcccagattgcccgctttcacacaatggccgcgttgggcctactgctgctggtgggcgtgcatggagccacgataatcagcatcaagtacccggataagcccgccgtggagccgcagccggccaagagggatctcagcctgagctacgcagccaccaacatcgactccaaggagggtacccgcgtgaagaccatcacggtgatcaagaatgtgggaggcatttcggcgcccgaagaagctgcggccttgggatcctccatcgccagcagccacaaccacaagcagcagccgaaactgatcattgatcccagtctgcacaagagcgaggagtgggcaagtgctttccgagacaactttgactcctacggagcactgcccgatgtgcccgacatagatgacctattcgagtttgtcaatcgcaagaagcccgagggtgaaaagaaaccggaggaggtgcccagccagaaggaggaaagggtgccgaaggagttgcaaaagccggcggaggagaccaccaccaagaaagccggagccagtgagcaaagcgagggcgggatcgtacccagtggcaacatcgatagcgacgaggctgtggtcgagaagataaagggtgatgccgaactgttgccgcacattaagcaggccaacatcctgcgcctccaggcggcccacgcccaagcccgctcgggagtacgaaccaaggagtcgctgatcgccgtcaactactccacgcccatgcatcaggtgagccagtacttcgacaactatgtccaagcggtgccaaatggctacgactacccaaagccctgtggcatgcagcctggcaacagtatccaagtgaccacgccttcaggccgcacctacgacattccgcagagcaacagcagtggcactggtggtggcaaccacccgtacttggctccagcgctcacaaagaagacgcagattccgccgatcacggtgcagcctccggtgcaacagcagcagcctcagcctcccaattactcctccgtgaactcgattgtgccgcctatagtgcaaccgcagcctcagggcaatgcaaatcttccacagcagccgcaacagcctccggtggtgaatcctccaaacggaggtatcctgccgcctctgggaacgggcggtatctccaccagccagcgtccctatgtggcgcccaggctgcgaaacaacggcctaggcatcagcagggcgcccagcactccgggcccgattcagattcccgggcaacctggcctcgtgggtaacaacaatccacagcagaccccgaacttccgcacgagcatttttggcggtggctcaaatcgtcccaacacgctgcgatcgcgtggtctaaagtattgaaaacttaaactaagtgtacactcttaaaaacagtcgaaattatagttcttagagggagattaccatcaaaattgccaatcgaagccagcattgtggctgcatttatccatatatcatttataattatagaaatatattttaaaaattgtttgatagccttaaagttatgtaccaatatgaaatagtggtatgttttccgatcaaacagctattaagactatttaatggtaagcgctataaaacccaattgatatgttgccttggcaatgctaaacaaatccgttgttttattttctgcattttattagcatgcttgttaataagagatctttcagttcctgagtgatcctagctaagcaagactttgtatcggactacctatgtttcggtttaaagccaattcaggtatgttcgctaatacaggtatttactacgaccaagagcaatatatatatttctacccccgaatgtgtgacaggcggtacacaatttattcgcggaaatgtatttacataatgcctttcatcttgaaatcgaatctggaacggggctgctagtagaaccgagactgtaccctaagcataaaatatgaattgcacaccgaaacgaaacagagcgcaaagaggaatctgcgagtcgttaagcaccaatcaatactgatcaacatacttttgggtaatggttttaaccgattttcactgtttccagcagtttcttggtttttcttctcgctcccgtgcagtgttgttgttgctgcttcgaagtcgttgatgttgaagcatctccacgggaagaagcagaagcgaaacgaacgaagaggagaagcggagggggcgaggtgtcgctgttttaagtacgagtactgaatttattcaatgaactttactcaccatgaaaaccattcaaaactccacttattctggaccaccaatgcacaaaaacagttgggtttgttttggctcaattgctatatatttattttgattattcctgctgatga

SEQ ID NO: 119 - DNA, 1532 bp, DROSOPHILA
ttcgaattgaccgcgttaccgtcaccgtcaccgtctccttgcccgccgcagtcggccgtcattgatcctcgtcacaattatcatcgcatcgcattgctcatttcatcgttaaacgatcggatcatttgattgatcgatcgcatgtgcgaaggattaaagcgatgagaagatcgaaaattgcccgctttcacacaatggccgcgttgggcctactgctgctggtgggcgtgcatggagccacgataatcagcatcaagtacccggataagcccgccgtggagccgcagccggccaagagggatctcagcctgagctacgcagccaccaacatcgactccaaggagggtacccgcgtgaagaccatcacggtgatcaagaatgtgggaggcatttcggcgcccgaagaagctgcggccttgggatcctccatcgccagcagccacaaccacaagcagcagccgaaactgatcattgatcccagtctgcacaagagcgaggagtgggcaagtgctttccgagacaactttgactcctacggagcactgcccgatgtgcccgacatagatgacctattcgagtttgtcaatcgcaagaagcccgagggtgaaaagaaaccggaggaggtgcccagccagaaggaggaaagggtgccgaaggagttgcaaaagccggcggaggagaccaccaccaagaaagccggagccagtgagcaaagcgagggcgggatcgtacccagtggcaacatcgatagcgacgaggctgtggtcgagaagataaagggtgatgccgaactgttgccgcacattaagcaggccaacatcctgcgcctccaggcggcccacgcccaagcccgctcgggagtacgaaccaaggagtcgctgatcgccgtcaactactccacgcccatgcatcaggtgagccagtacttcgacaactatgtccaagcggtgccaaatggctacgactacccaaagccctgtggcatgcagcctggcaacagtatccaagtgaccacgccttcaggccgcacctacgacattccgcagagcaacagcagtggcactggtggtggcaaccacccgtacttggctccagcgctcacaaagaagacgcagattccgccgatcacggtgcagcctccggtgcaacagcagcagcctcagcctcccaattactcctccgtgaactcgattgtgccgcctatagtgcaaccgcagcctcagggcaatgcaaatcttccacagcagccgcaacagcctccggtggtgaatcctccaaacggaggtatcctgccgcctctgggaacgggcggtatctccaccagccagcgtccctatgtggcgcccaggctgcgaaacaacggcctaggcatcagcagggcgcccagcactccgggcccgattcagattcccgggcaacctggcctcgtgggtaacaacaatccacagcagaccccgaacttccgcacgagcatttttggcggtggctcaaatcgtcccaacacgctgcgatcgcgtggtctaaagtattga

SEQ ID NO: 120 - protein, 445 aa, DROSOPHILA
MAALGLLLLVGVHGATIISIKYPDKPAVEPQPAKRDLSLSYAATNIDSKEGTRVKTITVIKNVGGISAPEEAAALGSSIASSHNHKQQPKLIIDPSLHKSEEWASAFRDNFDSYGALPDVPDIDDLFEFVNRKKPEGEKKPEEVPSQKEERVPKELQKPAEETTTKKAGASEQSEGGIVPSGNIDSDEAVVEKIKGDAELLPHIKQANILRLQAAHAQARSGVRTKESLIAVNYSTPMHQVSQYFDNYVQAVPNGYDYPKPCGMQPGNSIQVTTPSGRTYDIPQSNSSGTGGGNHPYLAPALTKKTQIPPITVQPPVQQQQPQPPNYSSVNSIVPPIVQPQPQGNANLPQQPQQPPVVNPPNGGILPPLGTGGISTSQRPYVAPRLRNNGLGISRAPSTPGPIQIPGQPGLVGNNNPQQTPNFRTSIFGGGSNRPNTLRSRGLKY

SEQ ID NO: 121 - DNA, 6839 bp, DROSOPHILA
accattttcatttcggttgcgatttgggcgctaatgcactgaaaacaaaacgggcttaatactgataaggcttttaagtggaaacacaatgtgttccaacctacaaagtaatttctttaaaaagatagtacccaacttggtgtaaatgatcttacttaggggatgatgctcaactaatttggtgattttcctagtgcactttcgttgtttgccaaggcggcttgacttgagtctcgggtttaacatggctttaataattgacggcacgccaggccaggcggaccggaacaatgtcaggatattagctaatgccgcaaatgcatcctggcaactgccagcatagcgacaatttcatgccagctgcgcacacacaacaaatgcgcaacaataacaattaaaattggaaactgcagcagcaatctagattgttaggggagtgtcctcggcgcaggaagagccgggccatcgagtggttcaaccttggcctaacagcacagcacgcccatgccacactcattcgtatccgcatccgcatcctcgactgcgcattggagaccataattatccaattgaacaataaacagatgcctgccaggcttgagtcaatagacaatggctgcggcggagtgaagttgagccagcccagctggcatcctttcaaatgttgttgcagcggttgatgttgctcctgcatttgctgtattgtggtcattgtggcatcgtcgagagtttgtgtgcaactattgccctacggcagacgagagtgatgagttttgccggccaggagtagtgttgtctcttggggatcttaattgagttaaatgtgagtgtgatttaacaaaatatgcctgcactctgaatgtgttattaaatttcagaataaaaatcgaaataaaagagatgtttttaattaaagaattttaaatggaatgtcgcaattgaaggccaatttaattgtttgttttatacccatttataaattttaacggaccaagataaagaatgctaattaaaaatgatatgagataacacagaactcatagcaaataggtaaaatcataagccaaacgaattaagccaattaaattagacatgttttatttaatttaatattcgtatctctgggcatctctagtacaaaagaagaggctgatgaacccaaagcagctttggaatagggtaaactctagaatatactaggggatttcagtgcataaaccgaattcgcctgccggccaagtcaagtgtaataatgtgccaaaaacgtttaggaagccacaggatgtcggacaattggcaaaaggcaactgtcgtccggctgagtggacacgggtcgggtcagtggactgaacagtggacaggacactgcttgcattcctttgtctgggcgaaaatgtttatttaatgaatatttattaacactaactaattttggttttctccgctttgtttgctcccattttggctcacaggtgactgacgaccaggacggccagcaatgtgcagacggtcggtggttgaaattgctggcaggactcagaaccagaccgcaaggatcaacccaatcaaggagcagcaattgcagctgtgaatgcatcagcgcaactggcaaccggcaactggctactttttatatatacacatccagaacgaaatgcgtttttgcagctcggccaacaaggagatcagcacacggatagcagttgatagatgaactaaagcaaatgccctccaattgcagcttttgatgcaaaacttaaggcaggggcccaacacagaacccaacttgactgatagtttaaactacttactacaaagtaatcgaacaacataattacaaaaacgaaagggctgcaataaatttttaattattgttaagaacaactcgttaattgccaaatatgtgttgcctgatgatctaaagctgaacaaaacttaggaacatatatatacacacacatatatatatatagataataataatctaacattaatcctaaaaaaccgccacgaaaagctcaagatcaagagttagcgccaggagacacttgcttaagccatgggcaacaaatgctgcagcaagcgacaggatcaggaactggcactggcctatcccactgggggctacaagaaatccgactacacctttggccagacgcacatcaacagcagcggcggcggcaacatgggcggcgttcttggccagaagcataacaacggtggctcgctggactcgcgctacacgcccgatcccaatcatcggggtccgttgaaaatcggcggaaagggcggcgttgacatcatcagaccacgcaccacaccaagtgagtactttcgcgaataacattggattgtccaatctaatatgcgtactatctattagtctactattagtagctacagtgaaaccccctttgtaccagaacctttaacttgtctaaattgcattccatctatgcaattttttttttttatttagttagttcagttaggactctaaccatttcattcccaaacggaagttgtgttacctacagctatggatttgaaatcctttgccctgaattttttcacgaatttaaccaatttcatataaatgaagctaaagtggtttggattttcgctgtttgttttcgtattatcatgcattagtaattagctgttggctgttagtctctcctgggtcgtgggtggagtgataattccagcatttaattagtaatttgactttttgcctgccacagagattggcttttacccgctggttggccttgtgtttgcataatgtggcagtcaggcaggcagccagccagccagctagctagctagcgaactaacctgccacataaccaacgttcatccaagtcaccagtgccagggctccgtagtaccccacatccataattagagttcccctcccaggaggttcagaggtggagtaaagtcatttgccaggtggcagcgcaattctcatatttgcagtggtaatacgatgagagtcgttaaccttgaccacttctcgtgtgcgtggcctagtaatggaaggaaagaagggggtctcattgctgctcttggtgttggtttaatgccaccttgacggcgatattgcactccatatgacacgacattgcgtttacgagaccccagggagttgggcaaggagttgcagctggggaggaggttttcaagttgccagcagcagggcaggggcttgttgggctatgtttgcacaagaaaattgtaaggttcagtacaggaaattcaagggataaagaaattatcaatgcaaataaagggggttctgtttaaaagtagcactttcaaagtggcactctaaaagtagcacacatacttaagccaagcatactatgaaggcattaactcgttaactcctcttaagaatctttacattttgtagcaacctatacaaatttccataaaaaatcggtcacttaggtgtaccattgaaatgaacgaattattttgttgagaggacagacctcgctggcagccgattaactgctggcatttctatccgtactgccttatagcatatatggccgtaaagccgcttaggtcgtgtaaacccaccgagaggttgagtgcttggccagtgatttgtgccgactttgtcagcacgaactttgcattcggcatttggcatgggcatgtggtgatgatgaaaggtggggttcggcgaaccagaagggtcaaaggaggaagggcgggcgttgcaatggagggcagcgagcggccaaggcaactgaactggcaaagcggcgagagcagtttatttatgcgttgcctcgatgtgagctaaatcaattagccaaatgcaagtcagtgccaaaaattgtggcttggcagcgttttcgaggcacgaaatgaaattgtttcgttgtttatggccccggcccctagaaaagtatgctatccaatttgcaatttgcatttggcaccctcaacgtgcccatactttaactcattaaattctaattaagtttcggtcatggctggcaaattggttagtcaaaataggcaaggaaaataaaaaaatattatttcccaatttgtcgccataaattgcaatttaaggacgcaaatcaaatttgcccagccagacgaaaattgccactaacccgactcgtcctcttttgcctcatcctttccacttttttttttatatataacttccagccggtgttcctggtgtcgtgctcaagcgcgttgtcgtggccctgtacgactataaatcccgcgatgaatccgatctgagcttcatgaagggtgaccgcatggaggtcatcgacgacaccgagtccgattggtggcgcgtcgtgaacctaaccacccggcaggagggcctcatcccgctcaatttcgtggcggaggagcgcagcgtgaacagcgaagagtaagtgccctgcatccattacaatttaatttattttgggtactttttacaagagctaatctagcatcttaatattaagtatttcgattaaatattaaacggcctcttctattcctagctggttctttgagaatgtgctacgaaaggaggcggacaagttgctgctggccgaggagaatccgcgtggcactttcctcgtgcgaccttcagagcacaatcccaatggctactcgctgtcggtgaaggattgggaggatggacgtggataccatgtgaagcactaccgtatcaagccactggataatggcggctactacatagccaccaatcagactttcccctcgcttcaggccttggtcatggcatacagcagtgagtatatagatttcgaatagtatgggactctaaaacctattaattaatttccttatctctgaagaaaacgctcttggcctgtgtcacatattgtcgcgtccctgccccaaaccgcagccccagatgtgggacttgggtccggagctgcgcgataagtacgagattccgcgctcggagattcagctgctgcgcaaactgggacgcggcaactttggcgaggtcttctacggcaaatggcgcaacagcatcgatgtggcggtcaaaacgctgcgcgaaggcaccatgtccacggctgctttccttcaggaggccgcgattatgaagaagttccgacacaaccgcctggtggccctctatgccgtttgctcgcaggtaagtgctataaatctattgtgattaatgtgtattaacttgaactatgaatcgcttgcaggaggagcccatttacatcgtgcaggagtacatgtccaagggcagtctgctggacttcttgcgcgagggcgatggccgctacttgcacttcgaagatctcatctacatagccacccaggtggccagcggtatggagtatctagagtccaagcagctcatccatcgcgatctggcggcccgtaatgtgctgatcggagagaataatgtggcgaagatttgtgattttggactggcgcgtgtcatcgcggatgacgagtactgccccaagcagggatcccggtttccggtcaagtggacggcgcccgaggcgatcatctacggcaagttctcgatcaagtcggacgtgtggtcctatggcattctgctgatggagctgttcacgtacggacaagtgccctatccgggcatgcatagtcgcgaggtgattgagaacatcgagcgcggtttccgcatgccgaagccaacgaatcactacttcccggacaacatttatcagctgctgctccagtgctgggatgctgtgcccgagaagcggccgacattcgagttcttgaaccactacttcgagtccttctcggtcacgtcggaggtgccgtatcgagaggtgcaagactaaacagagtccagcctattcacacacatcaccaacactctctcacacgcatacacacacgtacgatatatatatatatagtatataaagttatacatatattatacatttatatgcatatttactataattcttaagactttttaatggcatagttgcataccaaccaaccaacacacatgaactctatatgtatggtatatgtatgtgtttaagcgtatcttaacaattcagaaaccaactacaaacaaaaaaaaaatcaacaaaacaaacaaaaaaactaagatcggaaaacaaaattttatattttacacgcaaaactattttataatttatatacctaactgtatgtactatggaaatagaaagtatttaactagttttttaagcttaaccgaaaagggaaaggcgccgagaaatgataccaagaaatcaagaaagaaattgaaggcaactctattgaatttcaaatcgaatacagctacaatttaacgctactttaatcggtgcttacgttttatgtataaacaatccaatccaatccaatctacaactataactttttgatcttaacctccctctgctgaatagttttttctgatactttccacacacacacgactatcgactaagccaagtattatttgactcaatcaaaccgtatcaagaaatcgaacatttatgcaaaacaaattgttgctaatgagaaactccaatgatggcatttacttataaggtggcgtccaccactcgtctctacttccaaatcagaaatctacacgatctatcacccgaaacatagtatgttgcttcctcctcgagcaggtgaagctaggaaaaaaaaataagtaagaaaagcgaaaattgcattttgtacaaatcattgaaaaggagagaaaaacgcatttgacatatttcgttgttagcaattgaaccaatgaatgtttatagtacatttaagtttatgccaaaattattgtttatactttgttcgtatacttaagc

SEQ ID NO: 122 - DNA, 2293 bp, DROSOPHILA
gaatgctaattaaaaatgatatgagataacacatttggctcacaggtgactgacgaccaggacggccagcaatgtgcagacggtcggtggttgaaattgctggcaggactcagaaccagaccgcaaggatcaacccaatcaaggagcagcaattgcagctgtgaatgcatcagcgcaactggcaaccggcaactggctactttttatatatacacatccagaacgaaatgcgtttttgcagctcggccaacaaggagatcagcacacggatagcagttgatagatgaactaaagcaaatgccctccaattgcagcttttgatgcaaaacttaaggcaggggcccaacacagaacccaacttgactgatagtttaaactacttactacaaagtaatcgaacaacataattacaaaaacgaaagggctgcaataaatttttaattattgttaagaacaactcgttaattgccaaatatgtgttgcctgatgatctaaagctgaacaaaacttaggaacatatatatacacacacatatatatatatagataataataatctaacattaatcctaaaaaaccgccacgaaaagctcaagatcaagagttagcgccaggagacacttgcttaagccatgggcaacaaatgctgcagcaagcgacaggatcaggaactggcactggcctatcccactgggggctacaagaaatccgactacacctttggccagacgcacatcaacagcagcggcggcggcaacatgggcggcgttcttggccagaagcataacaacggtggctcgctggactcgcgctacacgcccgatcccaatcatcggggtccgttgaaaatcggcggaaagggcggcgttgacatcatcagaccacgcaccacaccaaccggtgttcctggtgtcgtgctcaagcgcgttgtcgtggccctgtacgactataaatcccgcgatgaatccgatctgagcttcatgaagggtgaccgcatggaggtcatcgacgacaccgagtccgattggtggcgcgtcgtgaacctaaccacccggcaggagggcctcatcccgctcaatttcgtggcggaggagcgcagcgtgaacagcgaagactggttctttgagaatgtgctacgaaaggaggcggacaagttgctgctggccgaggagaatccgcgtggcactttcctcgtgcgaccttcagagcacaatcccaatggctactcgctgtcggtgaaggattgggaggatggacgtggataccatgtgaagcactaccgtatcaagccactggataatggcggctactacatagccaccaatcagactttcccctcgcttcaggccttggtcatggcatacagcaaaaacgctcttggcctgtgtcacatattgtcgcgtccctgccccaaaccgcagccccagatgtgggacttgggtccggagctgcgcgataagtacgagattccgcgctcggagattcagctgctgcgcaaactgggacgcggcaactttggcgaggtcttctacggcaaatggcgcaacagcatcgatgtggcggtcaaaacgctgcgcgaaggcaccatgtccacggctgctttccttcaggaggccgcgattatgaagaagttccgacacaaccgcctggtggccctctatgccgtttgctcgcaggaggagcccatttacatcgtgcaggagtacatgtccaagggcagtctgctggacttcttgcgcgagggcgatggccgctacttgcacttcgaagatctcatctacatagccacccaggtggccagcggtatggagtatctagagtccaagcagctcatccatcgcgatctggcggcccgtaatgtgctgatcggagagaataatgtggcgaagatttgtgattttggactggcgcgtgtcatcgcggatgacgagtactgccccaagcagggatcccggtttccggtcaagtggacggcgcccgaggcgatcatctacggcaagttctcgatcaagtcggacgtgtggtcctatggcattctgctgatggagctgttcacgtacggacaagtgccctatccgggcatgcatagtcgcgaggtgattgagaacatcgagcgcggtttccgcatgccgaagccaacgaatcactacttcccggacaacatttatcagctgctgctccagtgctgggatgctgtgcccgagaagcggccgacattcgagttcttgaaccactacttcgagtccttctcggtcacgtcggaggtgccgtatcgagaggtgcaagactaaac

SEQ ID NO: 123 - protein, 552 aa, DROSOPHILA
MGNKCCSKRQDQELALAYPTGGYKKSDYTFGQTHINSSGGGNMGGVLGQKHNNGGSLDSRYTPDPNHRGPLKIGGKGGVDIIRPRTTPTGVPGVVLKRVVVALYDYKSRDESDLSFMKGDRMEVIDDTESDWWRVVNLTTRQEGLIPLNFVAEERSVNSEDWFFENVLRKEADKLLLAEENPRGTFLVRPSEHNPNGYSLSVKDWEDGRGYHVKHYRIKPLDNGGYYIATNQTFPSLQALVMAYSKNALGLCHILSRPCPKPQPQMWDLGPELRDKYEIPRSEIQLLRKLGRGNFGEVFYGKWRNSIDVAVKTLREGTMSTAAFLQEAAIMKKFRHNRLVALYAVCSQEEPIYIVQEYMSKGSLLDFLREGDGRYLHFEDLIYIATQVASGMEYLESKQLIHRDLAARNVLIGENNVAKICDFGLARVIADDEYCPKQGSRFPVKWTAPEAIIYGKFSIKSDVWSYGILLMELFTYGQVPYPGMHSREVIENIERGFRMPKPTNHYFPDNIYQLLLQCWDAVPEKRPTFEFLNHYFESFSVTSEVPYREVQD

SEQ ID NO: 124 - DNA, 6565 bp, DROSOPHILA
tgggtaatggttttaaccgattttcactgtttccagcagtttcttggtttttcttctcgctcccgtgcagtgttgttgttgctgcttcgaagtcgttgatgttgaagcatctccacgggaagaagcagaagcgaaacgaacgaagaggagaagcggagggggcgaggtgtcgctgttttaagtacgagtactgaatttattcaatgaactttactcaccatgaaaaccattcaaaactccacttattctggaccaccaatgcacaaaaacagttgggtttgttttggctcaattgctatatatttattttgattattcctgctgatgatcggcctgaaaaatttatattttcctggcaacacaaaaagtgaaatgctgttttgtaattcctacgcttgcgagggtttggtgacagaaaacaacatggctgacacgaaaagtgtgacctgtagtcgtgcagcagaaaaaaatcactccgaagaccacgggcaccctgtgagcaaaatatgaaggggtttctgaaatgcgatttggttaattgttaaaaacaattctaattcgttagtcactatatgacgtttatttaaaacaataaagtaaccaaacaattacatttattaaccttttaaattttaatataatctatggtatatgttgatcttgcaagattgtgctggagtattgaacaattgaacattaacgagtcttaaatgtgcaagtgctacaaaatatttttccctgttaatttaattgttactgctaacttaagtttgttaccatattagttggaattgcttatgttattttatccgaagtcaagcggagcgcaagtgataagatgcgcctgtgcgcgtgatgcacagtgtgaacacttgtggtatttaattagcaaacgaaaagaaaataactacgcagcactcccacgcaaatactgtaaaacatatgtttcggtattttttatgtattggcacgcagattttagcgcttagtgtagttaggtcacacaccaacacgattcgtgcgtagttttcatttattttgctccgctttccttcgctgttttcacacccacgatccgcgaaaaaaacatccaggaatcgtgttcaaacattggcaaacatattgcgtaccgccgcggccataagtcaaccgctgtaggccattcttttagccccaaacaagagcgacgacgtcagtgggcgacgcgactggcgtcaggtgaaaaaaagaaagaaaaacgtattgagatttgaaaatctatataaaacgggtgcagcgaaattaaacggaatttgcaactgtgaaaacgctctaaagcgtggagagttgcatttgaaaaaaggtaattagcgtaccaattaaaaaaggaattgttcagtttgtgcgtgcaggttttctgcatgtgtgtgtgtttgtgtaaaagttgttttccctgaaatggcaggttgtggattacccgattcgatgacgaaattattgagctcgttttctgtgttttcgttgttgtcaatgtacttttgcattgataagcaaggtgttagtgtacttgtgtgtgtttgtgtgtgcgtgagtggaagagcaatgaagataagctcgagtcttcttctttccccactctccaaaaggtcgtttcgcatatggtttattgacgctgcatatgtttttgtttttgcctgaaattcaatttacccactgaagccccacagcaaggcttccgacctccaacacaccctgctccataattaccaacttaccgcgcctccttttccctcacaatcatcgcaatatggcttttactcgtctcttgccacctttggagactcttcttcgcttggagacttttgcttggccaatttctgtgtatctccgccagcagcaacttgttgttgcttcttctttgtgcagctgattgtgtttcgcttagccttctctcactcttcttctgcctcttcttttggccatttacttctggctttcggtgtcgccgagattcgtaagcaaatttcaagcgtttaacatttaacgctttgcgttttgctcacaaattcgagttcaacaatgcgagtattattaacttttgcacgagttcgtgactcattcgttatcattaacgtgatttttattcccctaatgggaaactcttgtcagcacaactggaatactcacaatataccataagtattcaaaacatccaaagagtttttatatttgaataccatttctggagataaaatgactctataatcacaaaatatcccatttgttaaaactaaatcataaaaaaaggtgtttattacaccttttttttgttaagtttattaagtttttagtgtttcccaaccctttagtggtgagtcagtgtttcgagctatcttgtacttgatgttattaaaaatgattggtaaaggcactcctcaaaaaaagagttttttttttaaatggtgttgaataaataatatcggaatttaccatgggcgatacccttttttcccactgttcagcaaggaactttgacatttcattttacttcctgttcgtcatttccgatattttcaattctatttcacttcgatttgtaggttttgcctttttggaatattagagtaagtggattccacgcaagattttaacattattctgtatttcccccctgtttcctcgaatgcttatcgcatttcttggcccccataatcctcttgaactgccatatgtttccgttccaccagaactttcagtttatttgtatccattgcactttcggttatttttgtacgcacaatagcatcgctgctcaaaaagctccccattcgagattatttaaaaaaaaaaacttcactcaaatggactcaagatctatcaaatatgtaattcattctgcttgctttgcactcgcctattgattggttggcattcccaggcgggtgaaatcgatatggagcagtttgaagtgaccctgagacaaggtggaaggtgggtgtggaggtggccataactttccttggctgcgccagagtccattattaatattggattgcgtgatgatctaatgcgcgcgcctctgtccctctgctcccaaaatcccaacccaatcccgttcaccacccgccgcccgccgccaactcttttgtttgtttttgtttttgttcctgctgccgctccacattccccactttgcttcttgctgacccaaatccgtccaaacattgttgcagtgctgtcacaaattttggggcaacatggaaaagattcatagaacacatatgaacttatcaagataagaacattttcataataaaccttaaaaatccatattccagggcaataaaaacacacagatattaatgcacatacataatggatgtttatttaaaatcataattattcaatgactattattcaacatcttgcacatgactggattcacaatttctgaccaagcgtgttgtttaaacctttatataagtgcgaataattcgaaagcatatgaaaatacaaagaaataattcactaatgaatttagattatgagttaggagcttgaataaatcaggtgtaactataatatagctaagagcgcagcacagcagtgctgaaatggggtttcgtgtctctgagtaagaatgtcattttcggagcaatgttcgtgtgaaagtcgagacgagaacgtaaacattttgcctgcctagctgtctgtgctgagcacttcaactggccgcacaatagctcctgaacctagcccagttacacccacgctaatcggtcttcctcgttctggattccattgcagcatgagcacaaccgccgccagtctcatcgaggcggctctaaatgccagtagtggaaacgccacggctacaactgcgggatcgcttgaggctacagggaagcccaactacgtggtgcaggtaaagaacactccgatgagcacgccgctggacccgctgctccacgtgggcgatggcatcttcctgcagacaaagaccgcccaggttctagctggggtgtgcgtctgggccgccctcttcatcacatgtcaacaggtgagttaaggcgtcattggtctgagttgtgtactaatggatatctttggcagatctaccagcacctgcgctggtacacgaatccacaggagcagcgctggatcgtgcgcattttgttcattgtgcccatctatgccacatactcctggatcagtctgcttttcttcaactcggataacgtttacatctacttctttacggtgcgcgactgctacgaaggttcggctgatttgattttgaatgatttttgcccatcgactaattgctaaccccatttccatccagcctttgtcatctacaacttcttgtcgctgtgctatgagtacctgggtggcgagggcaatattatgtcggagattcgcggcaagcccatcaagacatcgtgcctgtatggcacctgctgtctgaagggcaagacctacacgattggcttcctgcgcttctgcaagcaggccactctgcagttctgcctggtcaagccgctggtggccttcattatcatctttctgcaggcatttggccactaccacgatggcgattggaggtaatgtggtttatctttaatgacccgcgttattgcatctgaaatggtggcataaaaacaacgagcgtgcgcaataaattaccaactgtaaaccagtaaatctgccattaagtaacactttgcaaaagagagaacttataggtacatatcattcccactaataatatctccttatctaaattgcagtgctgatggcggttacatttacatcacgattatctacaacatctccgtgtcgctggcgttgtatggcctctatctgttctacttcgccacgcgtgatctgctgactccgttcgagcccgtgctaaagttctgtaccattaagtccgtcatcttcttgtccttctggcagggcgtgggtctggccatcctggagaaggccaatgttatctcgcccattgtagacagtgcaggcactgttaccgtggaacccggtaccgtctccgccggataccagaacttcttcatctgcatcgaaatgctgttcgccgccatcgcgctgcgctatgcattcccctatcaggtgagttttggaatgtcggagtgggctagattttacgcagctatttacgatttttggtgattagatagtgctgacttgagtgctttttttcggttatttcggtgtttattaagcggctttccttacacttgttagatatgtgaaaggtattcgtgtaatgctgacttggctagaagaaatcagctaaaacgaagtgcttgcagtaaaaataacttaaatgttgtatgctctttgtaggtctacgcacgcagctgcatcagcgatggccacggacggtctgtcaccatgcagtccatttccagcagtcttaaggtaagctggaatatttccctgggaattcccgtatctaaaactcccgcaatccttcgcaggaaacaatgaatcccaaggatattatgacagatgctatacacaacttccatccgcagtaccagcagtacacgcagtacagctcaggttggtttttactcgctttctcgtctttttagcccaacttcttctctttgtgctctgtgtctgtggcatgttcgttcttttcatcgagcctgcttaacttatcttatctcttgtgttcgtcgctctcatttaatgcatttcgatgcgaatttccattaccatttccattccattatcgttatgtttttcacacttttgtttttctttcttgttttcttatcttttgcagaagtaacctcggctcagcgttacgaaaagctctaaatcaatatcaaaagcaaaactctagcgatgctcgctactaaacactaattgcaatcacaattccacatttccgagcgggacgcgatccgaaagcgaagcaaacaagtgtacttatagccctagcgccttagccctagcttaatgccccacagtatcccccgaaaccaagctcagagaggaagatacgtactaggcctagttacttacttactcactccacaaaacgctgaaagctgaacagaaattaacttagccagtccattgagttcagggcttttagagttgcctctgcgtctgtgtttctgtatttcctacgtttacactctacacctaaacttaagcgttttttaaaacaacttatttagacgttagctatgtacgaaacgaactataatattgtacaatattatgtatttgtaaacaaagattttattatactgtatgcaacaatggcagtcgctgaacaggattccccattcaagcgatcttcaagctagtttcccctcagcatttatttacgtgtttccgtttcgctcaaagataccaaaaacgaagtttttccttcttttattttgatttccccttttgaccacccttttgtgataagctctcgtcgtccttctatttacttctgtttgtaaatgtttaaaccaattgtataaaatatctaaaatacttagcaataaatgtacgataagcttgacaactgtttgcctcgcctcgttttcttcgttgc

SEQ ID NO: 125 - DNA, 1520 bp, DROSOPHILA
cacacaccaacacgattcgtgcgtagttttcatttattttgctccgctttccttcgctgttttcacacccacgatccgcgaaaaaaacatccaggaatcgtgttcaaacattggcaaacatattgcgtaccgccgcggccataagtcaaccgctgtaggccattcttttagccccaaacaagagcgacgacgtcagtgggcgacgcgactggcgtcaggtgaaaaaaagaaagaaaaacgtattgagatttgaaaatctatataaaacgggtgcagcgaaattaaacggaatttgcaactgtgaaaacgctctaaagcgtggagagttgcatttgaaaaaagcatgagcacaaccgccgccagtctcatcgaggcggctctaaatgccagtagtggaaacgccacggctacaactgcgggatcgcttgaggctacagggaagcccaactacgtggtgcaggtaaagaacactccgatgagcacgccgctggacccgctgctccacgtgggcgatggcatcttcctgcagacaaagaccgcccaggttctagctggggtgtgcgtctgggccgccctcttcatcacatgtcaacagatctaccagcacctgcgctggtacacgaatccacaggagcagcgctggatcgtgcgcattttgttcattgtgcccatctatgccacatactcctggatcagtctgcttttcttcaactcggataacgtttacatctacttctttacggtgcgcgactgctacgaagcctttgtcatctacaacttcttgtcgctgtgctatgagtacctgggtggcgagggcaatattatgtcggagattcgcggcaagcccatcaagacatcgtgcctgtatggcacctgctgtctgaagggcaagacctacacgattggcttcctgcgcttctgcaagcaggccactctgcagttctgcctggtcaagccgctggtggccttcattatcatctttctgcaggcatttggccactaccacgatggcgattggagtgctgatggcggttacatttacatcacgattatctacaacatctccgtgtcgctggcgttgtatggcctctatctgttctacttcgccacgcgtgatctgctgactccgttcgagcccgtgctaaagttctgtaccattaagtccgtcatcttcttgtccttctggcagggcgtgggtctggccatcctggagaaggccaatgttatctcgcccattgtagacagtgcaggcactgttaccgtggaacccggtaccgtctccgccggataccagaacttcttcatctgcatcgaaatgctgttcgccgccatcgcgctgcgctatgcattcccctatcaggtctacgcacgcagctgcatcagcgatggccacggacggtctgtcaccatgcagtccatttccagcagtcttaaggaaacaatgaatcccaaggatattatgacagatgctatacacaacttccatccgcagtaccagcagtacacgcagtacagctcag

SEQ ID NO: 126 - protein, 348 aa, DROSOPHILA
MSTPLDPLLHVGDGIFLQTKTAQVLAGVCVWAALFITCQQIYQHLRWYTNPQEQRWIVRILFIVPIYATYSWISLLFFNSDNVYIYFFTVRDCYEAFVIYNFLSLCYEYLGGEGNIMSEIRGKPIKTSCLYGTCCLKGKTYTIGFLRFCKQATLQFCLVKPLVAFIIIFLQAFGHYHDGDWSADGGYIYITIIYNISVSLALYGLYLFYFATRDLLTPFEPVLKFCTIKSVIFLSFWQGVGLAILEKANVISPIVDSAGTVTVEPGTVSAGYQNFFICIEMLFAAIALRYAFPYQVYARSCISDGHGRSVTMQSISSSLKETMNPKDIMTDAIHNFHPQYQQYTQYSS

SEQ ID NO: 127 - DNA, 3948 bp, DROSOPHILA
ggccctgttaagtggtccacctacggaagtggatgtagatctgattgcaggctttgtgcgctatttaattgatcaggatctgaaggtcacgccaatgaaaacgctgcagggcttgatttgggcgcagggctacgctaatggagagctgaagggccagtaagttccccattcaatattctcctatcatggccatataagttttacaatctgaactctagaaggttatcaaagaaaaggcttacttaacgtctgttcccaaaaataatttgggtgtctttctgagatccaattatacagcttggtgattttttaaatatgtatgctagctatattctccgcacgggaatgtttaacttttgctgatttcaatagttatcagataacattcaacatagtaaccaaaagtacaacgcaacaactcattattattgataattaattaattatctataaatgttattatagtgtatacgaagacgtccctgcagcttttgaggcttggcgtgctgctggcctccagattgcagtctactccagcggcagtgtggctgcccaaaagctgatattcggtcatagtttggccgggaacctgcagccgtacttgagtgcttatttcgacacccatgtgggccacaaacaggaacagcagtcctataaaaacattgccaagcaattgaaggaggacccgaagcagatactctttctcacggatattccaggaggtgagtggctgatccacacgaatcctcatccgtaacatttttaatgtgaaattatattttagaagcggccgccgctcgctgtgcgggcttgcaagccataattctgaagcgtcctggaaacgccgccctagcagacgatcaaaaaactggattcgagttgattccggactttaaaccacttcacaacctgaaagttccggtcaataaatcccaggcttaggtcattccaaaaaagtatacatatattgtgactatgtgcttgggaattaggtgaatctctagaggaaagctcgatctgcgctgcacaggtcgtcaccgctgtcgtggctgggcgtctcggtcgtgagcccctgcggccgtcgttcggaccgcttgcttcgttgagactgcctcgaacaggacttttctgagccatagaccttacgcagttgctgcagcttagtatccgcatcgggaacaggaaactctgactttttcttcctacgttgccggctcccctcgcacgaatgacgcagttcctcggtccggcaggtgtgggtgagcttgcccacttctggaccccagaacgtgggtccttccagaagaaggggagcggatttgacccgttgacgcatcatctccatatgcagttcgtactgacgctcctgaaaagcctgctctgccttgcgagtggccaaccgaatggatagcagtgccttgtgggattcgctaaagaaagaacactgaatgtgtgcgaaacttaatatttggtgaactactcacttcaaggacagtgatttccaagccggcgttttcctcacctcccaatcgaattgcggacgaggatcatgataagtgcagttgttcttcagctccttaaccttcttcctagatacttcagccctcaaagttgccgctagattaggacgagataccggatgcaacggggacacactgggcgttctcctctggaccggttcctccggcaactcatagatgctcagcggtggtagtggcttctcatcctttacgctagaccctggctttggtttccttactcttccgcgtcttcctcgacctcttgctgcgctggaagcactactacttcgcttcgacgaggtggtgggtgattgaatctgtatcttgggaatttcctcctgcttgctgagtgggaaatagttgcttcgcgcaggctgagctagtttggaaggcttcgaatgagcctctaaggcaatcccttgaagatcattgacactaaagcacctgcgcagcatttcccttcggcacttggcccgttctgccgtgtgctggccaggattggcagtcttctggcagcggttctgcgtctgactttgcttgttggtttgtgtttgagttccgttgctgctcgtggactttggcctgcggaactccgcttcgaagctcttaagggacctcttgaaatccgcaacctccactgcaaagtcctccttaaaacttttcagacgactcaagtccctgaggcactggtcgtactcgtcgcttagacaactggaattgggagtatggacaactgggcgggtagcgcatctatcctgttggccggggatcactaagattgctggcggaggaacaggatccagcaccaaaggacgtttctttatctttttccccttggaaggccgctttttagactttccatgacccacagaacagctgctgacactggcacttcgctccacagttggagcagttgctgcctgagatcgcagttcacggctggtgcttcgcaggctctccagagttgagtagaactcaactcggtgcaggtgcttcacatcacgatagtctagggaaagcaaaataattgtggtgagtatgtgtctttctaattatccatctttcttattttaaatcattgcacattcattcaaagactaatgaaggacaaaactcaaggtaagttgaatttgaaacggaagagcaagaaatcctttaaatactaaccccgaagattacatttcaaggtgcagacatttccaagctgaactcaccaggtatactgtcgtagaatttagctagggacctgacccccatctggctgctccacgcaggtgtctctgcctctggctgcgaaatgtgagcctggtcggtcggcttctttccaccaagggagctgagcttgggccgattgtataccggagccggacagttattgcacggatcgatgggcactttcacacaggaattcagatagtgcgagctcatgctgcgggaagctgaagtgttcctattggaaaatctttaattgttgcaaacgcgctttatcaataccaagcacaacatactgttgttgccagcggtaacctcccactgtttgtttttgtgcacttccgttttgggcacaccattcgccaagtcacgcaccgcattgctgtcctggtttcggatgcacttcgtctgcgcaaccgcaagggctgggaaaatctgagttcaggtcccagtaagctagatacccttccccagaatgtattaattgattgatatactgatgtttgtgtgaaagttccgcagaccaagttgtaaagaaaatcaaaaaaatattttgtggtcctaacaagtcatacaccaatcaagcggtagttaaccaagttttaatatgatatggttttaaaataaataagtaagtaaggagttttttatttattcaaattcattacaagttagggaattaaatcaaatcgtactgagtgcttaaatggggaatcaatcaatgcgattttaagcaagaattttgtataatttttgccacttaccagcaccaattaaagaaattatgttttttggcctttttttagatttcgcgtgctccttgggctacgctttaattgatgaattacttgctatgatcggacagcaactatgcagactttcattatcgtttatttgtatatatgtagtaggatggtactaagtggtcttaaaatttatggttcaatgaatacaaattctttaataaattatacgttaatcgttgaaaagggtgttaagggtagatagatacgcttcatatcctataaattcttgatcagggtcaaaagcctagtcgatctggccgtgatcatctgtcaatatgaccgcctcgatctcgatctcactaaagaaagttgagattagggatgcagacgtagacgcatcgcaagtttttttcccgcattgttaccacgcccactctaaagccagcccacaaaccgaacaatacggcgtc

SEQ ID NO: 128 - DNA, 1689 bp, DROSOPHILA
atgagctcgcactatctgaattcctgtgtgaaagtgcccatcgatccgtgcaataactgtccggctccggtatacaatcggcccaagctcagctcccttggtggaaagaagccgaccgaccaggctcacatttcgcagccagaggcagagacacctgcgtggagcagccagatgggggtcaggtccctagctaaattctacgacagtatacctgactatcgtgatgtgaagcacctgcaccgagttgagttctactcaactctggagagcctgcgaagcaccagccgtgaactgcgatctcaggcagcaactgctccaactgtggagcgaagtgccagtgtcagcagctgttctgtgggtcatggaaagtctaaaaagcggccttccaaggggaaaaagataaagaaacgtcctttggtgctggatcctgttcctccgccagcaatcttagtgatccccggccaacaggatagatgcgctacccgcccagttgtccatactcccaattccagttgtctaagcgacgagtacgaccagtgcctcagggacttgagtcgtctgaaaagttttaaggaggactttgcagtggaggttgcggatttcaagaggtcccttaagagcttcgaagcggagttccgcaggccaaagtccacgagcagcaacggaactcaaacacaaaccaacaagcaaagtcagacgcagaaccgctgccagaagactgccaatcctggccagcacacggcagaacgggccaagtgccgaagggaaatgctgcgcaggtgctttagtgtcaatgatcttcaagggattgccttagaggctcattcgaagccttccaaactagctcagcctgcgcgaagcaactatttcccactcagcaagcaggaggaaattcccaagatacagattcaatcacccaccacctcgtcgaagcgaagtagtagtgcttccagcgcagcaagaggtcgaggaagacgcggaagagtaaggaaaccaaagccagggtctagcgtaaaggatgagaagccactaccaccgctgagcatctatgagttgccggaggaaccggtccagaggagaacgcccagtgtgtccccgttgcatccggtatctcgtcctaatctagcggcaactttgagggctgaagtatctaggaagaaggttaaggagctgaagaacaactgcacttatcatgatcctcgtccgcaattcgattgggaggtgaggaaaacgccggcttggaaatcactgtccttgaacgaatcccacaaggcactgctatccattcggttggccactcgcaaggcagagcaggcttttcaggagcgtcagtacgaactgcatatggagatgatgcgtcaacgggtcaaatccgctccccttcttctggaaggacccacgttctggggtccagaagtgggcaagctcacccacacctgccggaccgaggaactgcgtcattcgtgcgaggggagccggcaacgtaggaagaaaaagtcagagtttcctgttcccgatgcggatactaagctgcagcaactgcgtaaggtctatggctcagaaaagtcctgttcgaggcagtctcaacgaagcaagcggtccgaacgacggccgcaggggctcacgaccgagacgcccagccacgacagcggtgacgacctgtgcagcgcagatcgagctttcctctag

SEQ ID NO: 129 - protein, 562 aa, DROSOPHILA
MSSHYLNSCVKVPIDPCNNCPAPVYNRPKLSSLGGKKPTDQAHISQPEAETPAWSSQMGVRSLAKFYDSIPDYRDVKHLHRVEFYSTLESLRSTSRELRSQAATAPTVERSASVSSCSVGHGKSKKRPSKGKKIKKRPLVLDPVPPPAILVIPGQQDRCATRPVVHTPNSSCLSDEYDQCLRDLSRLKSFKEDFAVEVADFKRSLKSFEAEFRRPKSTSSNGTQTQTNKQSQTQNRCQKTANPGQHTAERAKCRREMLRRCFSVNDLQGIALEAHSKPSKLAQPARSNYFPLSKQEEIPKIQIQSPTTSSKRSSSASSAARGRGRRGRVRKPKPGSSVKDEKPLPPLSIYELPEEPVQRRTPSVSPLHPVSRPNLAATLRAEVSRKKVKELKNNCTYHDPRPQFDWEVRKTPAWKSLSLNESHKALLSIRLATRKAEQAFQERQYELHMEMMRQRVKSAPLLLEGPTFWGPEVGKLTHTCRTEELRHSCEGSRQRRKKKSEFPVPDADTKLQQLRKVYGSEKSCSRQSQRSKRSERRPQGLTTETPSHDSGDDLCSADRAFL

SEQ ID NO: 130 - DNA, 4311 bp, DROSOPHILA
gcactcagatacatgcgatatgtatctaccaaagatgcagctgcacaaactatgctttcctcctcgtttccttcttttccaaagataaatttatgtttgcattttgcgagcgatttcgtgttctctgcttcaaagtgagtttagttttacttgtagctaaccttaaagtgacgtcttacttctttaggtttcaagttacagcttgaacttcaataacaatatttctccttgaatttgtgttggtttattcatatttacttggaattttgggaaagcccaaagatacaaaaatttttataggtactcatttacttttactttatttcagttgtagttacttttaagtattatgtaagtaattaaataattttggcggcttagtgttttttatcataccataacaagcaaagatgaatgcaaaaaagcaactgtcaaataggaacaacttatacaccttaatgcccaaatgtgcgacttcaagggctcacacctatgtgaggattactttacacacacgtcagcaaaaagggatcaatttactgccatactttttccctcttaaggaaaaagcctttcgatacgtaaatatcttaagctccaaaacgtgtccgttccgattaggatccactagaccaggagagccttcgatgacttggggctttcgtcacagaagccaaacgggaaaagagttgtttgcgtcttatttggctattttcagggcttagacgctcatttgtctctgaatcgagcctgatttaataccttgtttacctattttcgtaggcagagttgattaatggttttggcttcttggccagcggtttaaagacggagaccgtgattctctgctaccgcaattattttcctcattggaaacttgaaatatttctgccggatttccaccggaaagacaatcaattccagctttcccattataaaatttatctccatcgtttccttcaattgaaatggcgttaattaacatttctttttcgtgtcaatgcactgtgaaaactttgaaatgaaaggtaaaatatattattacaaattgttggtttttaatcatagttgaggatataagattgagatactttttttgaacgtttaaaaatccaaaataaatttcaaataactaaataattgcccttacaaatatgccttgagttttttacatttaatttgtttccgtgtacttaacagttgggtcgcgtgactcctcgggcagttcatcgtcttcctctgccggttcctcgtcatcgggaagtgggggctccagctcatcctcctcatcgtcgtcaacgtcctcctcgtcggctggaagtggaagtcccgccaagtatccggtgctggtcttcgtgcacggcgaatcatatgaatggaacagtggcaatccatacgacggatccgtgctggccagctatggacaaatattggtggtaaccataaattatcgcctcggagtgctgggtaagtgctgtgcacactcaaatcctaatgctaattgatatgccgagtgcatgaccaaaagaacgaaggacagccggacggacaggcgagtgaggtcagtgcaatggagcgaacgtgcgccaacctatccaccctcttcccagtctttcagactccattcaacctcctttcaacctcccttctcatccatcccatccagctgcaacatcaactgcacttccgctgtagcaactgcagcagctaccaggcgtacatttattccataatccaactaatttagctgcagtctggctcaaaattcttcaacggcacagtggttgtttaatttgaaaggcagacgttttttatattataccttccaacgttaattaatttttaaggaagccattaaacgcttcaaagagcatccccatttaattcaggaacttgttcgacaaatggatcgtcgtgatcaatcacatttaaagatccattatttagttcagtttccggcagctcaattgaccactgtgcattacccgataccctgtgtaaattcaaatgcacagacgaaataagtgtgacctcatttggcaccaaccccacccattcccttcggtctttcggcaccctccctgaatctgcctaccccctctgctgctgctgctgctgctgccgccgccgccgcctctgttgttgcagaggaaacggaagtgctgacatcatgatttgcacgcgtgactttgcacattttccgcgcgcgggagagcgggaaaaaagagtggcgtttgacattttaaataggcaaagcgaccaacgactgactgcacgagtacgcggcgaatcgattaaatttccattcgcgagccaatcaggcggcaaggaaaactgaaaactgctgattaagtgcgggaaaccccggcaactatttgcaggctttctgaatgccaacacggaccgctactccaaactgccagccaattacggcctaatggacatcattgcggcgctgcactggctcaaggagaacatcgctgccttcggcggggatcccaacagcatcacgctcgctgggcacggaacaggagccgcctgcgttcacttcctcatctcgtcgatggccgtgccggagggtgagtactaccaccaatatcaaactgaccgtagcaacctacttgcatgtgtcagtccccaaatcatttgtcactcgggaaagtaataagtttgtccacttcaatttaaaagagttatcgtcgcaaattcctcaattcattcaacgttgcagttacgctaatttactttgtaacctgatttataaataacaaacaataaagaatagaaaaatatataaatattaatttaaaatagagatatcttctatatcttctttcgctaggctaatataatattacttcccaagaatcccgagctgatttttgcttgttctctctcattttcaaggcctgctcttcaaccgggccatcttaatgtccggatccggtctggccccctggtcactggtcagtaatccggccaagtacgccgccatcgtggcccaccacgtgaactgcgcttccgacctcccgcacgcccacctcatgaagtgcctgcgcgaaaagacactggaccagctgctcagcgtgcccattcgtccgccggagtttggcttcgcctttgggcccagcatcgacggagtggtcatcgacggcggcgactatgtgccccccgcccccggatcgccggcggcacaagcgcaggctcaagcctccacggccgccggcaacggattgggcggagaggcgggaatcgcagctgccggtggctggggaacaccgggacaactcgagaatatcggtaggttttgaattccatcatagttgcatgcaaaattaaaatggaataaaaaatctgtatttcgaccgtatgccaataggttaaagtgtatcattcatatttcctgttcgtagtggtgaaatccacttgtttagttttgataaacgtttaattctgattttttttactgcattgtgctactggaaaataccccattattaaaaaaagttttgtataatgtattaaaatgtgatctgtcttatttaattaggttaaaaaatgaaaaggggttaattaaattcattacatttggtattagtgcatctgaacgcgggtttcgttaactcgcaaattactttcatttcctgtgcataattaaaataaattataatgcgatggttttccctctacacttttcatcccaacacgactccaacggcttttgctgctgatgatgatgatgatcttggcgatgatgaacacgatgtttcctcacacatatggttgcacgaatgcccaacaacactcacgctttcacaacgcgcggcggactttttaattaatgcagtattaatgagaaaaactgccattaacaagttgtcaaggtaagttgggccaggccagcaaatgcttaattatttttacctgaactactgcccctacacaaacccgtacatatggtgtgattacacaaggcaaaaatacattcaaactactttaagcccggtattgtgtttttattttaatgtttgagtaatatggaaatttgtatcaaaatataaaatgccttataccattaagtttaagtttaagttcatatggtaaatgctcattttaagtaatgtactgtttttcccagtgcatgacttcgagtaaacagagtatggaccataattaatttaaagtttcgacttcttttggcaagcttgtgtttgctttgtcgggtgtcaaaggagctttatcttgacttttgccacggtacgagcagtttgtttagccggcgataagatttggccacaaacctgctttggg

SEQ ID NO: 131 - DNA, 897 bp, DROSOPHILA
atgcactgtgaaaactttgaaatgaaagttgggtcgcgtgactcctcgggcagttcatcgtcttcctctgccggttcctcgtcatcgggaagtgggggctccagctcatcctcctcatcgtcgtcaacgtcctcctcgtcggctggaagtggaagtcccgccaagtatccggtgctggtcttcgtgcacggcgaatcatatgaatggaacagtggcaatccatacgacggatccgtgctggccagctatggacaaatattggtggtaaccataaattatcgcctcggagtgctgggctttctgaatgccaacacggaccgctactccaaactgccagccaattacggcctaatggacatcattgcggcgctgcactggctcaaggagaacatcgctgccttcggcggggatcccaacagcatcacgctcgctgggcacggaacaggagccgcctgcgttcacttcctcatctcgtcgatggccgtgccggagggcctgctcttcaaccgggccatcttaatgtccggatccggtctggccccctggtcactggtcagtaatccggccaagtacgccgccatcgtggcccaccacgtgaactgcgcttccgacctcccgcacgcccacctcatgaagtgcctgcgcgaaaagacactggaccagctgctcagcgtgcccattcgtccgccggagtttggcttcgcctttgggcccagcatcgacggagtggtcatcgacggcggcgactatgtgccccccgcccccggatcgccggcggcacaagcgcaggctcaagcctccacggccgccggcaacggattgggcggagaggcgggaatcgcagctgccggtggctggggaacaccgggacaactcgagaatatcggtaggttttga

SEQ ID NO: 132 - protein, 298 aa, DROSOPHILA
MHCENFEMKVGSRDSSGSSSSSSAGSSSSGSGGSSSSSSSSSTSSSSAGSGSPAKYPVLVFVHGESYEWNSGNPYDGSVLASYGQILVVTINYRLGVLGFLNANTDRYSKLPANYGLMDIIAALHWLKENIAAFGGDPNSITLAGHGTGAACVHFLISSMAVPEGLLFNRAILMSGSGLAPWSLVSNPAKYAAIVAHHVNCASDLPHAHLMKCLREKTLDQLLSVPIRPPEFGFAFGPSIDGVVIDGGDYVPPAPGSPAAQAQAQASTAAGNGLGGEAGIAAAGGWGTPGQLENIGRF

SEQ ID NO: 133 - DNA, 3826 bp, DROSOPHILA
ggaactggccagggcgccaataactgcgtgtaaagatttggcctgactttcggccgagggcgggtattccgtagactgtatcagatcctttgtgcccaggtgggtcgagacgtgagcaagcgtttcggtgctaagtagataactggcgatcgcctggagtccttcattagggaccttcggtaactggtgctgcaggaaggcctcaacgtaggcacgggcaatttgttggcccttctcgaccagatcgctattgtgaggcatctggaggtcagactcctcaatgcctagctgccgacgacgatcctcctcccgctctgcaaacgatttctctgtaaaagcacgctgcagctccgacaattcaaaggattcgcccaaacgcttgccgaacgcgaagagctccgatcgctggttccactccacgaacccagaacgccgctctggcttttgtggtcctagtttcttctgccggtgggcgagctcacgtaacgttggcgaaacccatcgcttgatgtggcgcctcgtttgcactgccgaaaatcacgattactgactggcattaggtgaatccgggttactcaccagtcggtgagccctccaagagcttgacacgagccaggagaccaacagcactgcgtaagaatgacatctttaaagcgatcttaaaaataagtaacgaatatgttttcgcgcatgggaactagtgttgcacgggtttttgtggcagtgatggcagtctaaccgtaaatataattttataacttataacttaacttatacattttaataatatttgtttcttgttgtttctatatttattcagagatgtataattaaaaaaaaataataataactaaatatgtttctttatgaattataattttatcatttaatcgagtaattataacgaaaaatactttcagctttttatttagcgttttgtagctaaaaggcgccagtactaaattgcgttggtggcacccgctcgttttccaacactcccgcaatagacgccatgtacatgtctgtgtttgtgtatgcgccaagaaaatttaagtcgcggaatattaacaaggaatccctgccagaaacagggcattgagagaccacagaagaaaatatacccaacatggcactgcagacatacggggacaagccggtggccttccagctggaggagggcggcgagtactactacgtgggctcggaagtgggcaactacatgcgccacttccgcggcattctgtacaagaagtacccgggaatgacccgcatcgtcctgtccaacgaggagcgcaagcggctggctgagtccggcctcagctcccacatcttagccagctctgtatcgctgctccgcgccgtagaggtggatgatatcatggccggcaacgatgaaaagtaagtgggcgtcttacctaagtaatgtccccagaatagtaactaaatagggcctttcctaaaaattccaattaacttcgttgatatctacttcctactagtcctacttaaacgtttgtttttaaatgtttaatccaatggtatcaagtaatccttttatcaaatataagacatgtgtacatttggctgaagattcttcattttagtaacattgttaatgaccacttagttaaaaaccacttatcattctgaagtgaagacgtatacaaacacacatagccacacactgcccagttattttgaaaaaatatggaaaaatgtcatagacatttttggcaaagctgccacaatagtctgtatgattgacaacgatttccaattgagcacggagaattgtattattgtcagaatgttgggtaaattttgcctgcttgcagggccaatcagtcaatttgctaacagttgatttaactaaccatgaatctccgtcccaggtatcgcgccgtctccgtgaacacttccgatacgccagtgccgcgggagagcaagtcaaagaagcagccacagtatgtgcccacgatgccgaactccagccacctggacgcagtgccacaggccacgccaatcaaccgaaaccgagtgcacacgaagaaggttcgcacattcccgatgtgtttcgacgacacggatcccacggctagcctggagaatgcggcgcagaaggagtgcctggtgcccattcgactggacatggagctagagggtcaaaagctgcgcgacaccttcacgtggaacaagaacgagagcatgattactccggagcagtttgccgaggtgctgtgcgacgacctggacctcaatcccctgccctttgtgccggctattgcacaggccatccgacagcagatcgaagcctttcccaacgatccccccatcctcgaggagacctgcgaccagcgggtcattgttaagctgaacattcacgtgggcaacacctcgctcgtcgaccaggtcgagtgggacatgtccgagaagaacaacaaccccgaggagtttgccattaaactctgtgcggaattgggattgggaggagagtttgttacggccattgcctacagcattaggggtcagctatcgtggcactgtcgaacgtacgccttcagcgaggcccctctatcaacgattgatgtgcccttccggaatcccagcgacgctgacgcatgggcgccattcctagagacgcttaccgacgccgaaatggagaagaaaatccgcgaccaggaccgcaacacgcgcagaatgcgacgactggccaataccacaactggttggtgatcttccgccgatccagcaatgtgtcactaatgtaatcctcctattaagtaccattatgcatcccaaataaatgtgtgtctgtcgattttaaaacctattgtcttctacgcgctacttccaaaaaaaatagttccaaacgatgttacaaaataagctgatactctttactgcttacgctaaactcgaatccttattctacattatccaatactaactttctgccgaatcgggcttgtcttggtcctgatcgccgtcgtagaactcgttcttagcatcaaccagcttgtcctcatcggctacggatattcgcacgtcgggatcactcgcctcctcccggttgctgcgcagctcctccaagtccacatcaggcggggtctgcaccatttggacgctgggcgagtgctggcacatcttaaggttttcatacacatgcttaacgatgagttcaagatactgctttgagttagcattatcttggcgtgagttaatctctggatggagtgtaaagtcgggggcgaaaaagtcgtaatactcggtggcgggtaggtcattttcaatgtcttggtccaccagcagcgaggtctcgtgcgtccagcagcgggccacgttccgtaaggtgtagccaccgcctccgaccaccaatgtgggtacgttcagttccttcacaaatttgacacactcaccatgtcccttggtgctcagggagaagcaacctagtcgatctccagctagtgaatccgcgccacactgcaaaacgatagccgtgggccggtagaagtccataatggcagaaattatgggtttgaacacctgaaaatagctctggtcatcaatgccctcctttagcggcacattaacgctgtagtatcgtcccgattcggcgcctatctcgtacatgtctcccgtgccgggaaaaaagtagtttccgtatttgtggaacgaagccgtcatcactcggtccgtaaggtagaacgcctcctgcaccccgtcgccgtggtgcacatcgatgtcgatgtagagcacccgaggatggtacttaagcagctccagaatgccgatgacgatgtcattcacgtagcagaatccgcttgcc

SEQ ID NO: 134 - DNA, 1332 bp, DROSOPHILA
gcaatagacgccatgtacatgtctgtgtttgtgtatgcgccaagaaaatttaagtcgcggaatattaacaaggaatccctgccagaaacagggcattgagagaccacagaagaaaatatacccaacatggcactgcagacatacggggacaagccggtggccttccagctggaggagggcggcgagtactactacgtgggctcggaagtgggcaactacatgcgccacttccgcggcattctgtacaagaagtacccgggaatgacccgcatcgtcctgtccaacgaggagcgcaagcggctggctgagtccggcctcagctcccacatcttagccagctctgtatcgctgctccgcgccgtagaggtggatgatatcatggccggcaacgatgaaaagtatcgcgccgtctccgtgaacacttccgatacgccagtgccgcgggagagcaagtcaaagaagcagccacagtatgtgcccacgatgccgaactccagccacctggacgcagtgccacaggccacgccaatcaaccgaaaccgagtgcacacgaagaaggttcgcacattcccgatgtgtttcgacgacacggatcccacggctagcctggagaatgcggcgcagaaggagtgcctggtgcccattcgactggacatggagctagagggtcaaaagctgcgcgacaccttcacgtggaacaagaacgagagcatgattactccggagcagtttgccgaggtgctgtgcgacgacctggacctcaatcccctgccctttgtgccggctattgcacaggccatccgacagcagatcgaagcctttcccaacgatccccccatcctcgaggagacctgcgaccagcgggtcattgttaagctgaacattcacgtgggcaacacctcgctcgtcgaccaggtcgagtgggacatgtccgagaagaacaacaaccccgaggagtttgccattaaactctgtgcggaattgggattgggaggagagtttgttacggccattgcctacagcattaggggtcagctatcgtggcactgtcgaacgtacgccttcagcgaggcccctctatcaacgattgatgtgcccttccggaatcccagcgacgctgacgcatgggcgccattcctagagacgcttaccgacgccgaaatggagaagaaaatccgcgaccaggaccgcaacacgcgcagaatgcgacgactggccaataccacaactggttggtgatcttccgccgatccagcaatgtgtcactaatgtaatcctcctattaagtaccattatgcatcccaaataaatgtgtgtctgtcgattttaaaa

SEQ ID NO: 135 - protein, 370 aa, DROSOPHILA
MALQTYGDKPVAFQLEEGGEYYYVGSEVGNYMRHFRGILYKKYPGMTRIVLSNEERKRLAESGLSSHILASSVSLLRAVEVDDIMAGNDEKYRAVSVNTSDTPVPRESKSKKQPQYVPTMPNSSHLDAVPQATPINRNRVHTKKVRTFPMCFDDTDPTASLENAAQKECLVPIRLDMELEGQKLRDTFTWNKNESMITPEQFAEVLCDDLDLNPLPFVPAIAQAIRQQIEAFPNDPPILEETCDQRVIVKLNIHVGNTSLVDQVEWDMSEKNNNPEEFAIKLCAELGLGGEFVTAIAYSIRGQLSWHCRTYAFSEAPLSTIDVPFRNPSDADAWAPFLETLTDAEMEKKIRDQDRNTRRMRRLANTTTGW

SEQ ID NO: 136 - DNA, 14534 bp, DROSOPHILA
gttctctcgggtggcgctcgtctcccatcggtttcgctgctcgagccaaatgcttggaagtcaaagtctcgcccgaccatagtttcttattggatttcaaaccagtcgcttcgtgcacgcggcgttcgactacgcacacacacacacccatagcgcgctggcattgatatacatacacaggcaaatacacgacgccccaagttcgtgtgatgtagtgctgtagtggtgcgattaaataatactccacaaaaggccaaataaattacataaaatctaaatcggaataaaaataagtgtattctccctccgtgttgtgttcaaagtatttaaccgattgttttcattagtcaaattaatgtagtacaacgtatgagtgtgagccagttcctagaaaaataagagggcataaaaaataacagacacatacagcgtctcgtttcttataaattttcctactgcgtcggaattattgtcttgattattgttgtttctggcgaacttttgtgatttgtttcgagaaacatactgcggcggtttcataattgtgcaaatcaagggaagcacaatacgaatgttaagaatcaaagctaagaattaaataaaattaaagccgcacacatacatatacacaggcacgcgcagagtcgaaaaaatacgcgcgctcgctctgtacagtgtgtgcgtgtacgcggtggctggctcttcttcttcattcgtgtgcccattggaatttgtaccccaaatcgaaattacaacatagacaaacaaagagcgcccgtctgccccagcacctaaacgtaagtgtgtgcgtgcgagagtcgtttcatttgcattcttgtttagcgcactcccgctctctcttcgtgcgtttttcattcataagcacatttttactatttggaactgcaattttttacactaagcttgaggacagacaagaatactgtgaaaatccaatgtagatgaaagcaggccgtgctttttccatcaaagtaatcgcaaaaagtcgagattaacacaagttcaaaattattcgttaaattttagaacagaattttgaaatgaacataattcaggtactgtgtcatccacatataaagaacttttattctaaaaacaaataatcgtccgatcggtgtggtctgtccaataaaaattcacggcaaaggcgttggctaaaaatacaaagacaaacgagtcgggtaaaaaacaaataaatgataaaaaagactaaacaaatttcgcgaattttgtattactgtgaattgtatgcttggtgatgcacactgctatctagcagcattataaacttttcgaccaaaagctgttgaaacgcaacgataaagatattatagcaatcgcataagtatacatacatacgcagttcaacaaaatatttttgtcatatacaatagttcttgaattagtcttagaggctcgtttgccatttaataaatgacaagctagaaaaaacgctaatgatagcttaaccttttttttttttttcttttttgtgtggcctcgacaaaagatttataattttaatgtgtcaaaacaaaaatattttgtgtaaatttatcgtgtacggttttggtgtttctttcgtaataaactttggtcacataccttgagatagacatcgctacccaccgttttctggctatttctaatcaaacgtcctctttgtgctgcattttttgctttcaattggctgcattctgtagacgaaaatcttatttataaatataaattgaacatggacgcaggggcagaggcagtgtcaagacgcgcagaagggggatcggttgggtggctgcaaaacgttcatcggcgttggcctggcaataaaatagattaatttaaatgtcatttttgtctagacgccgcagacgacgccgacaacgagacgtcgagctactctgctctatgtttatagatcggttacatatatccccgacatccccatcccaattcgcatcccccacgtgatatagcggatcttcagttttttttttctctctgcattttctttttccccaatacacgcccactctaggtacactttctcgattcttcgaaatttttccacagcatctttatggacgtggatcttcttcatatcgccatttcaacgctcgtttcgatgcaaatgagcttttcgggttttgggtgacgtggaaatctggttaaacccatgtaatggacaacaatacaattcggaattttgggtatttcctgttttgttatcgctgtcagtgccattcaccaattgcttgactagtttcagccgctgacgcagatcgtcgtcttaattagcgtcgcagacgacaaaaatctcaataaagtgggtaggcaactttttttcaaatgtttcttttttttattttaatacgttaaagcggcagagttcaaatatctgaaaattgtatgtttattttgtttggattgactagtgggtgtatcacagcgcgctgttgaggtcatgttttaacatagaaagaaaagagacggctttttctgattgccaatagtgtcgcgggagctgcgggtataaaaagtaaaccaaccgcattccaatccgagtgacgcacattggacccctcatgacgacaattactattgagggcttcttgttggccgtagataatacacctgttttagggacttggggacggggcttcttggggccttcccagacaaaacgatcaatttttaaatcgatcggattttttcgaaatgaagcttcttttttgtcttttgttcgtctgggttcccacgtcagggtccaaatccccaactccaaagcctagttccattcgtatcttaatctttcgctcgttgttgctctaaaattagccaccagctgaaactttcattgacgcatttgctcaccttgtttttatggttttttgatttttattcacattttgagtttgtgtgtctgagttttatggtttgtccgttgcataattaataatctgggctgaaactgatttctttcttatctgagttgggcttttgccgaataatgtgatgtacaccgtacgctatagttgcgctcacttgatttacttatgtggtcatcactttagcctgtgggctgctgctgattttgtagctaaaggcttccctcgagcttttaattccttaagaaatcacgccacaaaatttatttttcgctaatggtaaactggcgaataaagaaacacaaacgaaccaataaacgagaagcgaacgaaaacaaagccaaagtccagcagcataaacttctaatagaaatgtaaacaggtggcaatgaactttattatatttttatgctccaagtccttgaacccgccaaaatcaaagtcacacaaagtaaaacgcaaagcaaaaacaacacggcaatgaacttgacgtcaatggcggaccattgggccgcctgttgtcgttctgccttttgtggacctgttcttgagttccgctttggagcatcggcttcgaggctttgcggttgttcagcagaaaattagtttatagcatgtcaaatttctcgtttaatataagtctggaaaaatcatgaaaagttagtgagtttcagaggaagttacgaccatttggaattcaagcagtactgagcaaaatatccaaacatttaatcgaaacaagaaggtggaggcaaattatattttatattaaattaaatattgttttaatcgcaaatactttgcatatatttttccagatcaacggtacacagcaacagctccaattgccaggcagcggcgctagcggaatcgcagcggcagccgtaatcacggtagcatcggattgcggcgaaaactgcagcagtaacggcaccgagcatcagcagcacttcaacattgctaccaccacagcaacttcggcgacagaggcaacaatgccggctatggccaaggagaaagcatcagcaacagtgtccttgggcgagtcgaatttcagagatatcaacctaaaagacttggccgtggtcgtcgaagcggcatcgcggctgcaccaccagcaaaacgtatgcggctgcggagcggtatcgtctactgagaacaacaacaacagtcgctacggcagcagcaagtatctgacaaacggtaagcttaattctgagttactcaaatagagtatgtttcaagttgttcttaaaacactgaacattgtccgtttgcaacatgtttttgcttcgacgctaacacaatctctgcttttctctggcaggccacacgtcgcctttggcggcagcggttgctagcaacagttcgtcggtggccacgacaccgcattgcagaatgttgcacaactgcagtctgcagcagtaccagaatgacataaggcagcagacggagatattggacatgttgcggcagcagcatcagcagggctaccagtcgcagcaacagcaacaacagccgcagcagcagcaggaacaacagcagcagcaggagcaatcgcagcagcagcaacagctacagaatcctgcgcccaggaggtctccgaatgatttcattttcggtcgttacataggcgagggcagctatagcatagtttatctggccgtggatatacactctcgccgcgagtatgcaagtaagtcctttttagttttcagtgggtacgataactagttagtaggtcggcgcatcattcgaccgatgcccgcccacggtatttcaacggcacttgtatggcctctgcttggcgccagcgcgagaatgcggtcgcaatgtagacgcggcgcttttgttgccactccgcttagtttgtcacctgcatcgcttattttcaatattgggatgagccccaatacaaacgcgggccgctgcgtcttcggcgtctttccttgggagtgtttgcacgattatctcatattcaaactggtcaacatgggcatacgatttcttgcgctccttgctttcaaacagcattttctacctgctgggcacaaaatgaggaaaaattttggggacgctcacgtgacccttttgttattggtaatttcatcagtcagtctatcaaacttgctcgaaaacgacacgggctgttatcagagtgataagccaaatttcgttctgtagctccttgcttttgttttgcttgtttatcgattaaagccaaagctgacgttggcgactatctggcgtcgggctcgcgcgcaccatcagctgtttagtttttttaatgcaatttaaattaacggcaaataaaccagtctgaaaacgagctgaaaagcagcttttaggtgttcactagatttctagagccattgttttaaaaggctatgcattgccacacaccactagagtgcatttatactgacatatttttccaccttgtgtttatttgtgctaagccaatttgcttaaagattttcagttgtgcttttcagtgggcgtgtacgccgtgagtggcggaataattttgcctcgccagcagctaatcaataccgtcacaagaggagggaggcacgtgttgcataaatgcaaatgcaaacacaatgacgcacacaagcacgcacagaacaatgggagctgagaaggagcacaacggcacgttgtcagcagaacgcatttgcagtgaggggcgaagactttgggggcatttggtaaaactaaataattggaatttcttttgttgaaaaaaaaaattccgatgcgatgcccctgcctaaagctgttattactgctctggccgctttaattgcatgtaaagatgaaggcaataataacaaagtctagttatgtatgtatttaaaaataggaagcgcactcacacaagtcgtaaacagtttccccaaggcgtgtcgctccgttaaattaataaacatattattcatacttttgacattgaatccgatgcagctggtgcactaaatattggcaaactatggttgtgcaatcgggagcagagtcgacgcttgtttgaaggtcagtgttcgtttttcggcaggtttgtgtgtagttgccctcaacctaatgggtttcatagtcagcaacatttcctccaaccacgtacacatcgcagcacccactggtgcagacgcctcccacgcacgagaaatgaacacgcacgcaaattcacgatgaacgcagcagttttcgttttcatgcgccccatctctttcttgcctacccactttaccggcgtcattgttgttgttttccctgttcgatgacgacaacggcgtctatttgacgccatacgaatttcagtttaggcttttcacatttcctgcgcagctatgtatgtatttcaccatctttggcaacaacatatgccacattcttggggttccttcattttccgctcgcttacctgtatttcgaatttttagattcttgcgatggaagattttaacaatgcgtgctcgtgcagataatcctgatttgagcaagggataaggagaggcggagggagagtcaacagcagctgttggtttcctgagttgcttacacttaccatgcagtcgtgtacagttatgtaagctagttttagtcgggaaagctgagaacttccaaaatactggtctgctagtcggatatatgtactatataaacattttcaaagtactccactttctccacctctgtttttgaccattgaacttgtacgcgcaatccttgcctcgaacccgtttgcttccatatcgggcaacgttcggatttaccatcaagtttttcatctcctcgactccatattctttattgggggttgctgtctggtactttcttagcagtcacctatgttccagctccactgcgttatttttaattacacgtttatttttggacagcagctggttctgcgcagccgcagctgcctgaggccgggggtattcaactgaaatagtcacttgcttggctgcctagggggttctgttttggctccgtaacgagatattggatcggagaactgggacgttcaacccatgactcgactcctgtcggtaaaatcctttccagcttactatcaggcttattcataatattctgtcttacaccttgccttatctttcttttttatgtggttgcgacatctgtcgtcgtcggtagaaggtaaaggggtttgtgtggtaaggtgtctcctgcacgtgtcaaggacatttggtgggctattggtccgcccgacgctttagggccaaaattaaatagctttttttattgcactcgcacacactcgcttttcgttgtttctcgtcggtataccgaaaaatcctcccaaagggtcaatacacttttgttagcctggagcaagagaagcatcacacaataataataataaaaaatttgcaagagtacacataataagccaactcgaaaactccgcacccagattactgtgaaagctgctaaattaaaacgcggcgtgggagttttaccatgtcgatcggtgaggtgcacttagggaatgacgagagtattatgctaactgtaggtgagttctttaagaatggcgagtagtagcccagtcatagaacaccaaagcaagagacaaccgtatttgcaggctctaagctctctgtcccactatcgagtcctcgtagtctattttttttttatactttcatccacttctttttaaggactacagaagttgagcttccgcattttggcgggcgctttcccatcctcaaaggtaaaaatcgtgttccgtcttttgaaaagccggattttagacgttgtcttccagtagcaaaaacaacgtgcaaccacgagaaggttgctcaatctttattttgatttatttatagaatatgtattcgtgtcctgctcacgcgcggcactgctttatcgacgagttcacactagctttctggtcggtgtagtcaatctgtgtagctctatctcgctctgtcattctaaaactcgttggattgcattccttgcagcaacaagttgcagtcttggtattttcattgttcgccttgtttttgatttctgcattttatttgtgacttgattaaccagcctatgatacgatttttgtgctatatgtatattagagttgttgtggccaaaataaggcagttgaaaatttggcactgtgaccaaaaacccaaaacaaggaggatgatggtaaaatgttaaaaaacaagtacttctgatttagcgggataaaccgaggtggcaactctaagacctcaagagcaagcttcgggcaaatatttatgcttagacggcgaattgggacgttttttttttttactgctttgcagctgtttgttgggtttttacttatgtgtttactttcggtgatgtttgtgttgttgttgcacatgctacacggcagcggaaaagagaaacggagaacggcagcaagttcaaggctaagattatcaggaggtcaataaacctaaccaatcgggaaaaaacacagaatatcagagtagagccgcaagtgaattaataatgtgactttttttaaattaaggtgaagaaaaaggccaggcatgcgaaagcatccagaaaaaagaaggtgaaataggtaatgtgtttattgcataggatcggaatgataatcatcgtttttttgttacattttgctgcgcaacaaatttttgaaggtcaattctgtttttacgcacccatttgtgctgctctatcgcttgggaaatttaaaacgcgtaaaaaacattttcgttcggttctttttgatttctcgattattgattgttgttgctaccgctgtgctgtgttaatcttttaattgctgtattttgtttttcttctttgtgtttattttgttgctactcgaccgacgacttatcgcccccgatgttttttagacaggattccgattcaatttcgtattctattggatttttccctgttctgtttgccctcttttgccgcgaatagttgttttgatcttgatagagggacctccaaaaaataaatgcaaatttatcttgaactttatttttggcaatagacttataatagtatgaaaagttgacagatatggttggggctaatttattatttttagcattattttcaacagatttgtgattttccgttgcgattgtcagccaaaggctggctattcgtgattggaaaataaaataagggcgggcagaaacaaaagggaaactactgataagcggtcaaaactctctcacaatcattataaccgttaaccccgcacgggagggtgtgggatgcaagtttgaaacaccgtttcatacggcccaactgtgtagttcctcttgcgcctttggatctctcactctccgtctctcccactaactctccctctttactctctctccttccctctctctcttttcgcgaattccagttcaataaccagttttaaatttatttagctctgaacgagatggagttcataagttctgtgcttgctgtggttttctgggggaccggaaagcggaaaaggggcggaagtcaaaaacaagtttctctaagggcgctcgctttcatttgtctcgctgttaattaaacaatttgatctgagttctgacatcaaaattccactctcgtctctttattgtttcaccgtctttctttcataatagaagtctgtccgcactaaaacctttctatttcaacaggtcataaaagggtcgcaagaaatttctgattggaccacaaaaatttagggggaagtccatcagactgaaaatttggtcgcattttgccaaaaaaaaaaaaaaaaatgtgtgctgctagctggtttgtgtgctgttttattattctcacgcgttcactttgtgtgcttatacctacatatatagcatttttaaattcaattatttaatcacttgcattggtatacgtatatctatgcctttgcagttgccaagagctgtttccgcaagcaaaatgtggtttgcccgcaactctgacttaccgatagttgcctgcactaagtaaaaatattgtggatactaggttctagaaacatgaattcttcaattaaatatgtatgtaatttcatctacacttgtagataccatattaactccaatctgaccctatcgttttcgatcttctccttgcagttaaagtatgcgagaagcggctgatcctgcgcgaacggaagcaggactacatcaagcgtgaacgcgaggtgatgcaccagatgaccaacgttcccggcttcgtaaacctgtcgtgcaccttccaggaccagcgttctctttactttgtgatgacgtacgcgcgaaagggcgacatgttgccatacatcaaccgcgtgggtagctttgacgtggcctgcacgcgccactacgctgccgagcttctgctggcctgcgagcacatgcaccgccgtaatgtggtgcaccgcgacctcaagcccgagaacatcctgctcgacgaggacatgcacacgctaatcgccgacttcggttccgccaaggtgatgacagcccacgaaagggctctggccacggagcactgttcggagcagcggcgcagcaactccgatgaagacgatgaagacagcgaccgcctggaaaacgaagacgaagacttctacgatcgcgattcggaggagttggacgacggcgacgacgaacagcagcaggaagagatggactccccacgccatcgtcaaaggcgttacaaccgtcaccgaaaggcaagctttgtgggcactgcccagtacgtttcaccggaagtgctccaaaatggacctataaccccggcggcggacctgtgggcactgggatgtatagtttatcagatgatcgccggcctaccgccattccgtggcagcaacgattatgtcatttttaaagagattcttgactgcgccgtggacttcccgcaaggctttgataaggacgccgaggacctggtgcgcaagctgctccgtgtcgatccgcgagaccgcctgggtgctcaggacgagtttggatattacgaatccattcgggcgcacccattcttcgccggcattgactggcagacgctccgtcaacaaacccctccccccatctacccatacttaccgggcgtaagtcaggatgaggacttcaggtccagctatactgtgcccggggatttggagcctggccttgacgaacggcagatatcgcgactgcttagtgcagaattaggcgttggcagcagcgtggccatgcccgtcaagcgatcgaccgcaaagagtaagtgtccacgtggtgccccagaaaaatacgttggctaatgaatgtattgtttttcttcagactctttcgacctgaacgatgccgagaagctgcagcgtctcgagcaacaaaagactgacaagtggcacgtttttgccgacggcgaagtgatcctcaagaaggggtttgtcaacaagcgcaagggtctgtttgcccgcaagcgaatgctccttctgaccacgggaccgcgactcatctatatcgatcccgtgcagatgatcaaaaaaggagaaattccgtggagcccagatctccgagcggagtacaaaaacttcaaaattttttttgtccatacggtaagtgtttacctatggtgggataaggatgcacgaggcgcaactcggaaaaccgagaaagcataagtttgttgaaccgatgacatcacagcttatagttcgtagccagtcacacgcctactgaaaagcaatttgagcgttagtttatgtcccgggcacgtgttggctatgaaagcaaattaaatgcggcattgaaaactgcacacgcaaggcagataaaaactcaaacttgtttggtgaatgggtttaaaattagcgttgcgctcaactaattttactcttttggtttcattgcagccaaatcgaacctattacctggatgatcccgaaggctatgctatccactggtcggaagctattgagaacatgcgcaagttggcctacggagatccctcctccacatctgcagtgtcctgctccagcggcagcagtaatagcctggctgtcatctcaaattcatccgccgcctcctcaagcaattcgcccacggtgaaacgcagttcccccgtaaacgctcctcaagcttcgacggcgtctgacaaccggacattgggtagcaccagaacggggacgtcacctagcaagaagacggcgtctaagtaaacgtagtcctatttatagcaatgtgaaattaatttagttgaaatttagtgcaaacgaagcgatggcgtagaagagggcgggaatagaagtaagcttagaagtagaagtaagtgatgaaggggaaataatgatcgtgtctctagtgctaattagaaccaaatttctgttttccgatttgtattgtgcttagggcgaaaatataacactagaataaacttatctaaagtaaaatacatctataacgactaagtaaattcaatttaaaatttaaattaaatatttatatacagcatacataaatacaaatatattcgtatttagcgcgtagttagtcgcaattgaaatgaattacacacggaggcaaggtggcattgtaggcttaaattaaaagtaatttcgtgaagcaaactaaaatccgtatttaaatggtataatactaggaaattatctggaaactgtaatatacataatatgtgtatgtacgtcggagaaataatttttgtttctgttatcgtgggaagatcacatatatgttaatataaattttgtaaacagtgtaactatgtacagaactatgtgagctatatgcacacggcaaaaagaccctaagtcgtggggaaggagatgggaatgagccggaaaaccatcgatgtcacaaaatcggtgtttttccagcttcacgctcaactgtttaggtaattctaatatacagtttaacgctaattatcattatttatcattctcattatgcttttcgtttacctatttgccctataatgaaatgtataagacttgagctaccctaataaaagaacgaattttaaattatatttttattttgtaagggctaccactaaaaactcaacagtcgttcaaagattgtcaagattggcggtcgttgtctctccaactgactccaattgaatgtgtgtaaaacaagtcttatacaaagatatatgtaatagatgtaagacagactgcaaagtttcttgaaacaaattagttaaatgttgtaaatgtctaagttgctaccactgctactactagaacgcgcccatcccctcccatatttacctttaagctacagtaattaagtgatgagcagaggtgtagagtaaggagtcgaagttgaaagaaagcaaaaaatacattttgtacatacatatcgccgttggtcgatatacatctaaacataatttaattttttgttacttttaagtaaattatttttggcgacctaagtaaattaaaattaacgcaatatgcaacaacacacataagtatacaattaattaaattaaacgaaaattacgatttattaaacgatgtcatagaacggagagccactgatagtgagagaaatctgtaaaataaatatttaaacaaattatatattatctatatatgagtaccagaacaagaatgtcaaaaaagagaagcatgtaaaaataaaaaatatattacgagtaaaacaaaaaaagataatcgagcgaaaggaacgtatcattaacaggaaaaattaaagaaaaatacaaaaacatttcaaagtaacaaaattacgataaaatttgtttttattttggttcgtttggttattacaattggcaatatctaactgattgggtaataagtgcgcgtatcccagtatccaacgttgcaaaatgatacaacatttcaataggtttcaaaatctacgtaagatacacataaaacgacctgactactttgttctaccctacgcttgtgctgcagtacctaaaatcgaagaaagagtacagtgaacagggctaagatatagaaagacagctctatttctgcaatccaaaaagggcttgccctaattaaaataattgcaaatgcattgcgcttcaaatccagaagccttttttaccttttatagcctacaggaaaaaagaaaaaagaggagataacggaaagacccataaaatcgaaaagtgcataggtaaacctgtaggacgattagtggaatactaaaatcatcatatgttttaatcaataagtattccaattttaccaggggcaagtgtatgcgaattctttcagtacgagtatttaatatatttatttttatcataattgtataaaaacctgaagctccaaaataacttgatcattttgagaaaaatattaataaaaattatttttttgtttattttcttattatttagttacatataattttattttatgtttatgtttttataatttttattttattattcattatattataataaatagattcgttgaatagtattaatattggatttgaatgcagcgatgcgttttacgcatttcaaatccgaaactcgcttagatcacacgacgtaactttataagatatataaatcaaaaataactgttattttgaaagagaaaaaatgatgttgtttgaaataaaggaacaaaaaagcgaaaaacagaaa

SEQ ID NO: 137 - DNA, 3968 bp, DROSOPHILA
aaaaagtcgagattaacacaagttcaaaattattcgttaaattttagaacagaattttgaaatgaacataattcagatcaacggtacacagcaacagctccaattgccaggcagcggcgctagcggaatcgcagcggcagccgtaatcacggtagcatcggattgcggcgaaaactgcagcagtaacggcaccgagcatcagcagcacttcaacattgctaccaccacagcaacttcggcgacagaggcaacaatgccggctatggccaaggagaaagcatcagcaacagtgtccttgggcgagtcgaatttcagagatatcaacctaaaagacttggccgtggtcgtcgaagcggcatcgcggctgcaccaccagcaaaacgtatgcggctgcggagcggtatcgtctactgagaacaacaacaacagtcgctacggcagcagcaagtatctgacaaacggccacacgtcgcctttggcggcagcggttgctagcaacagttcgtcggtggccacgacaccgcattgcagaatgttgcacaactgcagtctgcagcagtaccagaatgacataaggcagcagacggagatattggacatgttgcggcagcagcatcagcagggctaccagtcgcagcaacagcaacaacagccgcagcagcagcaggaacaacagcagcagcaggagcaatcgcagcagcagcaacagctacagaatcctgcgcccaggaggtctccgaatgatttcattttcggtcgttacataggcgagggcagctatagcatagtttatctggccgtggatatacactctcgccgcgagtatgcaattaaagtatgcgagaagcggctgatcctgcgcgaacggaagcaggactacatcaagcgtgaacgcgaggtgatgcaccagatgaccaacgttcccggcttcgtaaacctgtcgtgcaccttccaggaccagcgttctctttactttgtgatgacgtacgcgcgaaagggcgacatgttgccatacatcaaccgcgtgggtagctttgacgtggcctgcacgcgccactacgctgccgagcttctgctggcctgcgagcacatgcaccgccgtaatgtggtgcaccgcgacctcaagcccgagaacatcctgctcgacgaggacatgcacacgctaatcgccgacttcggttccgccaaggtgatgacagcccacgaaagggctctggccacggagcactgttcggagcagcggcgcagcaactccgatgaagacgatgaagacagcgaccgcctggaaaacgaagacgaagacttctacgatcgcgattcggaggagttggacgacggcgacgacgaacagcagcaggaagagatggactccccacgccatcgtcaaaggcgttacaaccgtcaccgaaaggcaagctttgtgggcactgcccagtacgtttcaccggaagtgctccaaaatggacctataaccccggcggcggacctgtgggcactgggatgtatagtttatcagatgatcgccggcctaccgccattccgtggcagcaacgattatgtcatttttaaagagattcttgactgcgccgtggacttcccgcaaggctttgataaggacgccgaggacctggtgcgcaagctgctccgtgtcgatccgcgagaccgcctgggtgctcaggacgagtttggatattacgaatccattcgggcgcacccattcttcgccggcattgactggcagacgctccgtcaacaaacccctccccccatctacccatacttaccgggcgtaagtcaggatgaggacttcaggtccagctatactgtgcccggggatttggagcctggccttgacgaacggcagatatcgcgactgcttagtgcagaattaggcgttggcagcagcgtggccatgcccgtcaagcgatcgaccgcaaagaactctttcgacctgaacgatgccgagaagctgcagcgtctcgagcaacaaaagactgacaagtggcacgtttttgccgacggcgaagtgatcctcaagaaggggtttgtcaacaagcgcaagggtctgtttgcccgcaagcgaatgctccttctgaccacgggaccgcgactcatctatatcgatcccgtgcagatgatcaaaaaaggagaaattccgtggagcccagatctccgagcggagtacaaaaacttcaaaattttttttgtccatacgccaaatcgaacctattacctggatgatcccgaaggctatgctatccactggtcggaagctattgagaacatgcgcaagttggcctacggagatccctcctccacatctgcagtgtcctgctccagcggcagcagtaatagcctggctgtcatctcaaattcatccgccgcctcctcaagcaattcgcccacggtgaaacgcagttcccccgtaaacgctcctcaagcttcgacggcgtctgacaaccggacattgggtagcaccagaacggggacgtcacctagcaagaagacggcgtctaagtaaacgtagtcctatttatagcaatgtgaaattaatttagttgaaatttagtgcaaacgaagcgatggcgtagaagagggcgggaatagaagtaagcttagaagtagaagtaagtgatgaaggggaaataatgatcgtgtctctagtgctaattagaaccaaatttctgttttccgatttgtattgtgcttagggcgaaaatataacactagaataaacttatctaaagtaaaatacatctataacgactaagtaaattcaatttaaaatttaaattaaatatttatatacagcatacataaatacaaatatattcgtatttagcgcgtagttagtcgcaattgaaatgaattacacacggaggcaaggtggcattgtaggcttaaattaaaagtaatttcgtgaagcaaactaaaatccgtatttaaatggtataatactaggaaattatctggaaactgtaatatacataatatgtgtatgtacgtcggagaaataatttttgtttctgttatcgtgggaagatcacatatatgttaatataaattttgtaaacagtgtaactatgtacagaactatgtgagctatatgcacacggcaaaaagaccctaagtcgtggggaaggagatgggaatgagccggaaaaccatcgatgtcacaaaatcggtgtttttccagcttcacgctcaactgtttaggtaattctaatatacagtttaacgctaattatcattatttatcattctcattatgcttttcgtttacctatttgccctataatgaaatgtataagacttgagctaccctaataaaagaacgaattttaaattatatttttattttgtaagggctaccactaaaaactcaacagtcgttcaaagattgtcaagattggcggtcgttgtctctccaactgactccaattgaatgtgtgtaaaacaagtcttatacaaagatatatgtaatagatgtaagacagactgcaaagtttcttgaaacaaattagttaaatgttgtaaatgtctaagttgctaccactgctactactagaacgcgcccatcccctcccatatttacctttaagctacagtaattaagtgatgagcagaggtgtagagtaaggagtcgaagttgaaagaaagcaaaaaatacattttgtacatacatatcgccgttggtcgatatacatctaaacataatttaattttttgttacttttaagtaaattatttttggcgacctaagtaaattaaaattaacgcaatatgcaacaacacacataagtatacaattaattaaattaaacgaaaattacgatttattaaacgatgtcatagaacggagagccactgatagtgagagaaatctgtaaaataaatatttaaacaaattatatattatctatatatgagtaccagaacaagaatgtcaaaaaagagaagcatgtaaa

SEQ ID NO: 138 - protein, 752 aa, DROSOPHILA
MAKEKASATVSLGESNFRDINLKDLAVVVEAASRLHHQQNVCGCGAVSSTENNNNSRYGSSKYLTNGHTSPLAAAVASNSSSVATTPHCRMLHNCSLQQYQNDIRQQTEILDMLRQQHQQGYQSQQQQQQPQQQQEQQQQQEQSQQQQQLQNPAPRRSPNDFIFGRYIGEGSYSIVYLAVDIHSRREYAIKVCEKRLILRERKQDYIKREREVMHQMTNVPGFVNLSCTFQDQRSLYFVMTYARKGDMLPYINRVGSFDVACTRHYAAELLLACEHMHRRNVVHRDLKPENILLDEDMHTLIADFGSAKVMTAHERALATEHCSEQRRSNSDEDDEDSDRLENEDEDFYDRDSEELDDGDDEQQQEEMDSPRHRQRRYNRHRKASFVGTAQYVSPEVLQNGPITPAADLWALGCIVYQMIAGLPPFRGSNDYVIFKEILDCAVDFPQGFDKDAEDLVRKLLRVDPRDRLGAQDEFGYYESIRAHPFFAGIDWQTLRQQTPPPIYPYLPGVSQDEDFRSSYTVPGDLEPGLDERQISRLLSAELGVGSSVAMPVKRSTAKNSFDLNDAEKLQRLEQQKTDKWHVFADGEVILKKGFVNKRKGLFARKRMLLLTTGPRLIYIDPVQMIKKGEIPWSPDLRAEYKNFKIFFVHTPNRTYYLDDPEGYAIHWSEAIENMRKLAYGDPSSTSAVSCSSGSSNSLAVISNSSAASSSNSPTVKRSSPVNAPQASTASDNRTLGSTRTGTSPSKKTASK

SEQ ID NO: 139 - DNA, 3391 bp, DROSOPHILA
aaaaatcctctttttacttaaggaaaattcttatattatatatatatatatatatatatatatatatatatatatatatatatatatatatacttgcagctccaacaaaattccgtcttcattcaatgcgaaactggagctagactccagcaaagacgacaccattcactccacaagcttgaacaagaagctggtcaagattaaaaagttcaagttggacgatatgaaggagatggtgggcggctgttgcgtttgttcagacgagcgggggtggccggagaacccgctcgtctactgtgacggccagaactgtactgtggcagtgcaccaggcgtgctatggcattgtgacggttcccactggaccctggtactgtcgcaagtgcgagtcccaggagcgaacctctcgcgtccgatgcgaactatgtccctcgcgggatggcgcccttaagaagacggataatagcgggtgggcgcacgttgtttgcgccctgtacatcccagaggtgcgatttgggaatgtgaccaccatggagcccatcatattgtcattaataccgcaggagcggtactcgaagagtaagctatgtttaaatgttttatatttacatatattatttaaaaaatgttactcattgaaaaattataacccctgtttgttaaactagccttagctaaatggcaataattaattacaatccgtttccattttcagcttgctatatttgccaggaaattggcaaaccaaatcgtgccaatgttggcgcctgtatgcagtgcaacaaatcgaattgcaagcagcagttccacgtcacctgcgcccagagccttggattgctctgcgaggaggctggtaactatctggataatgtgaagtactgcggctactgtcagcaccattacagcaaactggtgcgtatgtgagggatagcattcgtgatttttccgttcaaattcttgatactttgcagaaaaagggcggcaacgtcaaaacaatacctccatataaacccattcaacatgacacctcttccgattcgtgttcgtcgcccgagaaggagatcgattcaaccatgaactccgcgacaacttcggccacaatcataaagattaccagcagcagtggcagtgctggtggcagcagcaatgttttgaatgcaagctccagtgctggaatctctgctggaagcagcagtgggagtggcgtatcatcttccgcaaagcagcgcaagagcaatgcatcaagtaaatcatctagcagcagtagcagtagctcgtcatcctcaacaggaggggctcccaacccctcctcgagttctgtgcattcgggaagtgctagcaatatgacaggaggaggaagtgtactaccagggagtagcaacatcggcaacattagcaatagtttaaacaataatctgcccggaggcagttcgtccaccagcagtgctggaaacgtgcctggtggaagtgggggaattatatcagcttcgagcggtggtgctacgcaatcgacaagcagtcaatcgtcaacagcaccaggaaccaccaaatcatcggccagcagttcgagcagtagtagcaacagctacaaggagaaacatagcaaaagcttaagcaaatccacatccagcaaggacaaggatggaaaagatagctctaccaattcagcgaataacaatttcacaaattcatctgcatcatcaacatcttccaactcctcgtcgacacgagagaaatcctcatcaaagctttctaagaacaaagactccaatcaagtacccagtgccaccagcagcttaagcacaacgagcagtatcaacacccagcccagttcgtcgacttcaactgctacagctggatcgggcggtactgggactcatgtgagcagttcggctgccagtggacttaactcagctccttccacaaccaatgagcattcaaatcatgcccacacccttagcacaaatggaaccggagccggaagcgcagccggaaagttgcaatcagtcagtaatctgagcaacagtagttctggttttggatcggatctgcgatcagtcagcacatcctcaagctccactgtgaacgactccaccggaggattcggtagtaattcgaattcagaaagggagaatttgtcaggcgctggatcgtcggcaagcaacatgcctggaacaatagctcctggtactggtggcgtatcttccagtgcggccactaatctaagcaccaataagggaggctcttcgtcatcgacggcgaatagccttacatctacgagcacttcctcaggcagctcctctaactcgtcatcgaaaaaacgaaaagcggattctgctaagtccactagcagtatttccacctctggctccgctctggaggataacaataggtggggaacgagaaacgcaaagaaaaggtcttttacaatttacatttttcaaaatttggtagttacttagtttacgcctgattttaaagaaacaaatgggactgtgttgcacatctatgatttgcaaaattgttaatttatcgaacacccggtgtagacaactcttttattttgttattctaaataaattgtaataattagaacataatgtatattaaacagtgcccaatgttactgagaaaccagactttttaaatatgtttttgtaatttcattgaaaaaggcaacttttggaatccgtttcgtttattagagaatatactaatactaaaataaccccgtataagacctttttctactgaaacaatgtatagaaaaaatcacactaatatatttttcggttgtttctgtagcttaatatcccgctatgatatcaaagatgttcaagttgcactgacgcctctaacagattttgagaaggaaatcgagaagagctccaagagggtaagttgattttttctttgtttatcttttagcatactattaatagaatgataaacaactcagttatcgttccgaaatattgagttaatataagcttttttacttttaaggaaacttgtttcggatctcttgagtgatttttgcgaaacattctcttaaagtgttttctctctttttggatacaatgttgctatattaatgatggttcccattatcttttacacttgtatacaacttgtcatttagtttttctctgatcaaacctaaagagtgggacagagagtactactatattcgtttcactcgccaaaagttttgaacgcaggcgccttgccaatttttgtatcatacttataagtggaaatgcaattgcaaatgcatgttaaaaatgttttgagaaattctgccgaaggtgcgcgttaattatacaaaaggtgttgcccacccgttcttgtctttaagaaattccgtgtttttcaatgctaccccttgaact

SEQ ID NO: 140 - DNA, 2103 bp, DROSOPHILA
ttgcagctccaacaaaattccgtcttcattcaatgcgaaactggagctagactccagcaaagacgacaccattcactccacaagcttgaacaagaagctggtcaagattaaaaagttcaagttggacgatatgaaggagatggtgggcggctgttgcgtttgttcagacgagcgggggtggccggagaacccgctcgtctactgtgacggccagaactgtactgtggcagtgcaccaggcgtgctatggcattgtgacggttcccactggaccctggtactgtcgcaagtgcgagtcccaggagcgaacctctcgcgtccgatgcgaactatgtccctcgcgggatggcgcccttaagaagacggataatagcgggtgggcgcacgttgtttgcgccctgtacatcccagaggtgcgatttgggaatgtgaccaccatggagcccatcatattgtcattaataccgcaggagcggtactcgaagacttgctatatttgccaggaaattggcaaaccaaatcgtgccaatgttggcgcctgtatgcagtgcaacaaatcgaattgcaagcagcagttccacgtcacctgcgcccagagccttggattgctctgcgaggaggctggtaactatctggataatgtgaagtactgcggctactgtcagcaccattacagcaaactgaaaaagggcggcaacgtcaaaacaatacctccatataaacccattcaacatgacacctcttccgattcgtgttcgtcgcccgagaaggagatcgattcaaccatgaactccgcgacaacttcggccacaatcataaagattaccagcagcagtggcagtgctggtggcagcagcaatgttttgaatgcaagctccagtgctggaatctctgctggaagcagcagtgggagtggcgtatcatcttccgcaaagcagcgcaagagcaatgcatcaagtaaatcatctagcagcagtagcagtagctcgtcatcctcaacaggaggggctcccaacccctcctcgagttctgtgcattcgggaagtgctagcaatatgacaggaggaggaagtgtactaccagggagtagcaacatcggcaacattagcaatagtttaaacaataatctgcccggaggcagttcgtccaccagcagtgctggaaacgtgcctggtggaagtgggggaattatatcagcttcgagcggtggtgctacgcaatcgacaagcagtcaatcgtcaacagcaccaggaaccaccaaatcatcggccagcagttcgagcagtagtagcaacagctacaaggagaaacatagcaaaagcttaagcaaatccacatccagcaaggacaaggatggaaaagatagctctaccaattcagcgaataacaatttcacaaattcatctgcatcatcaacatcttccaactcctcgtcgacacgagagaaatcctcatcaaagctttctaagaacaaagactccaatcaagtacccagtgccaccagcagcttaagcacaacgagcagtatcaacacccagcccagttcgtcgacttcaactgctacagctggatcgggcggtactgggactcatgtgagcagttcggctgccagtggacttaactcagctccttccacaaccaatgagcattcaaatcatgcccacacccttagcacaaatggaaccggagccggaagcgcagccggaaagttgcaatcagtcagtaatctgagcaacagtagttctggttttggatcggatctgcgatcagtcagcacatcctcaagctccactgtgaacgactccaccggaggattcggtagtaattcgaattcagaaagggagaatttgtcaggcgctggatcgtcggcaagcaacatgcctggaacaatagctcctggtactggtggcgtatcttccagtgcggccactaatctaagcaccaataagggaggctcttcgtcatcgacggcgaatagccttacatctacgagcacttcctcaggcagctcctctaactcgtcatcgaaaaaacgaaaagcggattctgctaagtccactagcagtatttccacctctggctccgctctggaggataacaatag

SEQ ID NO: 141 - protein, 657 aa, DROSOPHILA
MKEMVGGCCVCSDERGWPENPLVYCDGQNCTVAVHQACYGIVTVPTGPWYCRKCESQERTSRVRCELCPSRDGALKKTDNSGWAHVVCALYIPEVRFGNVTTMEPIILSLIPQERYSKTCYICQEIGKPNRANVGACMQCNKSNCKQQFHVTCAQSLGLLCEEAGNYLDNVKYCGYCQHHYSKLKKGGNVKTIPPYKPIQHDTSSDSCSSPEKEIDSTMNSATTSATIIKITSSSGSAGGSSNVLNASSSAGISAGSSSGSGVSSSAKQRKSNASSKSSSSSSSSSSSSTGGAPNPSSSSVHSGSASNMTGGGSVLPGSSNIGNISNSLNNNLPGGSSSTSSAGNVPGGSGGIISASSGGATQSTSSQSSTAPGTTKSSASSSSSSSNSYKEKHSKSLSKSTSSKDKDGKDSSTNSANNNFTNSSASSTSSNSSSTREKSSSKLSKNKDSNQVPSATSSLSTTSSINTQPSSSTSTATAGSGGTGTHVSSSAASGLNSAPSTTNEHSNHAHTLSTNGTGAGSAAGKLQSVSNLSNSSSGFGSDLRSVSTSSSSTVNDSTGGFGSNSNSERENLSGAGSSASNMPGTIAPGTGGVSSSAATNLSTNKGGSSSSTANSLTSTSTSSGSSSNSSSKKRKADSAKSTSSISTSGSALEDNN

SEQ ID NO: 142 - DNA, 2626 bp, DROSOPHILA
ctaactatgtaatagatcttgatccgctgctcagaactagcatctgcggcctgcagcttgagcaaaaagctgttgaggattttgtccgctgcatagggcgcatctcccgatacacaaactaaggcgatcccggtggcaggatggaagagccgctgattgacatcgctgagatgcggtagaattacgcccagaatagagctctggtagctgtggcttatatccggtatgtgagcagctctctccaggagcgcagacaacgccttaagggaagctttcagtatctcctcattgtcatttcctggaaaagtctctgttttcagagcctgccatatctgatcgaagtgcggctccagaacggaaggcgggaacttcacggcagcttggtgctgtaacaataaatagcatgtataaaaagaggcatttcaaaatgttacgttttcttgccagcagttctatggagtccagtttggcaaccagcaactcactctccagcttttctatggccagtaccactgtgccctcagcgaattcgttgttggctaccaggcagttagtcaacttcttggacaattcatcacgggttatggccgctggatcctgcttgctgggattaaagtcgattggaaagtaacacgcaaagatctcaaacatctcttcggccaaatgcagcagcggatacgttgacaagaactcgggcatgaagctgaaaatgatgtcaaggttgcgggggtcacgctcgccgtcaatggaattgatcaggccgtagacgaagtcaccggccatcgcttgcagctctgtatcgggaagaaaattgatttgtttgagttgtaatattgtgtaatattttctaaaaataacggaaataaaaggtactaagattgtcgcaaatatctgttcgactagttaaaatcatctaattataacttttttgcacactgacttgtttaaatcggattaaagcaatgtcaatgtatctttcatgctaaaatgaaatcagggctcaccgtcctggaagttttccgtcaagtactggaaaatgtggaacagcttggtgcggtcgctccgcgtctgcgactggcaggtggtgtgctcgaagaatgactgcagaatctggggaatctgggcgcgcggtagagctttcatgtgaaccagggcgtcgattccatcgataatggctggcattacgttgtgatggtcgcgcaggcggtccatgtaaaaggtgctgaggaactccagctgccgctcttgcagcagatcctggggcagtgctatcaacacggcggagagcaagttggttccggccacacgctcctccatgtccggagaggacagggcgaagcccagtgcctcggccagagcagatatgtcatatgccttggcggtcagatctggaggaaacaaagaatctctatgagaagggcacattcgacacggatgcgggtgtaaacctgcccttggctatctgtgtggcggaattcacaagcttctggtcgcttttcagagccttttccagggtggcgcgcgtgggcgttgtcattgcggcaccgtcgcttgagtggtgtctaaatttaaatgagtttaagcacgttaagccgaaatgttaagaaccgataaccgatgacttgtcgtactggccttatctatatcacagcgatgccagactggtgttacagtagtgcaaatgttttagcgattaatatagcttttattgcagtggcgctcagggatggtaatgtgtggctcggagacaaattctagaactggaaaatatacttacatattgtatattgatttataatcgatagacacgatacggagattttctttttattttcttgtaattcgttgtaaatttagaaatatatttttagcagctctggaaacaatcgatagtcgccgactgttgcacacagggaacgcaacagggtggtcaagtgtccgcgccgatgtatcgataagccccgcatcaccagagcacgcacatcactagtattacaaacacaggcaggcagcagtttattttagctaccgcagcaccttaaactctgaattaaatagtttacgcattcattttgcgctcggaacgccgcgtaacaaagctagtacactaatgtccataaccgtaagtcgcccgcgaactgctcagctgcaattgtaggtgtgcggcggcgagacgtcagcgctgctgttgttgttgctcttgtggttgctgcagctgcagacgcccccacatagctggaaataaaataagaagcataagaataagaaatacggtgaagtgtcgaatgcaaagtgcagtttgctgtgtccagaggcttgcaattaactcaaattctatttagatcgcattaattcgacccattgtgcgcccgtgtgcgtgtgtgcgaaagtgtgtgttgtgtgccgctgaaacctgagctgagtgtgcgtgtgtgtgtgcgagcgttaattttgttgtttttactattgtgttttttgtttttttttttttttttgcatacgacgatttgagtcgagttgaaagaatcattcaaagccaacaaggtcgaacgccttattcggctcataactacctaatacattttccaatcggcatttggcccacgtcccgccttggaggcggaat

SEQ ID NO: 143 - DNA, 562 bp, DROSOPHILA
acaagtcatcggttatcggttcttaacatttcggcttaacgtgcttaaactcatttaaatttagacaccactcaagcgacggtgccgcaatgacaacgcccacgcgcgccaccctggaaaaggctctgaaaagcgaccagaagcttgtgaattccgccacacagatagccaaggatctgaccgccaaggcatatgacatatctgctctggccgaggcactgggcttcgccctgtcctctccggacatggaggagcgtgtggccggaaccaacttgctctccgccgtgttgatagcactgccccaggatctgctgcaagagcggcagctggagttcctcagcaccttttacatggaccgcctgcgcgaccatcacaacgtaatgccagccattatcgatggaatcgacgccctggttcacatgaaagctctaccgcgcgcccagattccccagattctgcagtcattcttcgagcacaccacctgccagtcgcagacgcggagcgaccgcaccaagctgttccacattttccagtacttgacggaaaacttccaggacggtga

SEQ ID NO: 144 - protein, 157 aa, DROSOPHILA
MTTPTRATLEKALKSDQKLVNSATQIAKDLTAKAYDISALAEALGFALSSPDMEERVAGTNLLSAVLIALPQDLLQERQLEFLSTFYMDRLRDHHNVMPAIIDGIDALVHMKALPRAQIPQILQSFFEHTTCQSQTRSDRTKLFHIFQYLTENFQDG

SEQ ID NO: 145 - DNA, 5980 bp, DROSOPHILA
gccagaaaaaccacataagcatgaagaaatcttgacgggttccagaagaaccggaaactcgcgcaacaactttcaaaagaaattcggctcattcgaaatttttatgaaattctggaaacacgcacatgcattggataagtataagcggcatattggtccagtaatggttgtgaagaagcgttcaaaaaccaattcaaagccaattaacgtcatgtacttcaaaaattattacgaaaagggtttacgtctaaggaaggaaaggttgaataaaatcaaaagcaataagaaaattaaaatgccttcaaaaagccctaaggagtccgtagctaaagaaatcattgaaaatgccaatataccacaatctcacccagaaacaaagaaatccacatatgtttcaaaacacaagagcgatacatatgcgacccttgaggaactgatcaacgatattgatgacatcgccataaatgagaagttgtctgaatcgattgagccagtgaaaaccaagaaagacagtaaaacaccgaagctgttggagaacactcccaaaaagaagccaaagaatttcaaaacggcacttagggttttcaagcccgaagagaaggttatcccaaaatcggataatatgccgagctcaaatatcaagcccaatcccgtttccaagttggacaaatccaaattaagtaagccgaagactgaaaaatacattcctttgagggttttcaatacaccaaaagaagacgaagacaagtcatggatatattgggatgagttggcagtgaaaagcctgcgaaaaccaactcaagactagcacttcatcctcagaaacccaagaaggaagttgggcagcctcttcatcctttgaactgaaactaacctaacgaatctcagcacgtcttgccacaagtgattcctactatgagctgatctcacaactttctcagccttcgaaccctaagcaccaaattcaaaatttaacaggtatttcggtagtcccttctagaacatgaaccaatgtcgtctgaggagcctggcgcggatcaggaggagcctgacactgggtttgcggggaactgaccaacacgtcctcgcccgtcaagccctccgcaccattcaaacgacctcacagcggcgaggtgtccatgatctggactccttcgccaatggatgcagtgccgcctacatcgagggactctacaacaagtggaagcgcaatcccagttccgtagatgaggtgagtcctataattactttatatttataacgtttgaataattatattatatatttataataataataaaatgtgtatttatccaattgaatctgcgtccagtcctggaacgagctcttcagcagcaacgattggtccagccccaagagaagtcctcttcaggtttcgcactcccggaagtacagacgtcctccggttgaaaggatagctgtgaaggctcggtcgggcgaaaggacggcttccggtggcgcatctgcagctccagccgcacctcccagcgactggaagaacattgatgaccaccacgtgatccaggccatcatccgtgcctatcaatcgcgcggtcacttggccgccgatctggatcccttgggtattgttggtccgaagaagcgtacgtcggtggatggcacccagcgacatgccgccagggaggtgctccgccagcacttctcctatatatttagtaagccaattattgtggttagaagttatctaactgaataactgaatctatatacctttattgcagatgacctcaataccgtgttcaagttgccctcatccacaatgataggcggtgatcaggaatttctgtcactaaagtgggtttccaatagatccaatccaccgagaaaataataagtacctttcttcccaccagagagatcctggatcgcttggagcgcatctattgcggccacattggagtggagtacatgcagatcacgtcgttgacaaagaccaactggcttcgcgaccgtttcgagaagcctggaggcctggacttgaccaaggaggaaaagaagctcatcctagagcgtctcactcgctcgacgggattcgaaaacttcctggcgaaaaagttctcgtcggagaagcgtttcggactggagggatgcgacattatgatacccgctataaaggaggtggttgaccgggccacggaccatggcgtggagtcaattttaataggtacatctcatgggaccaaaaccttttctatcactaatccaaaacgtcttctaggaatggcgcatcgagggcgcctcaatgtcctcgccaacatctgtcgcaagcccatttcggacatcctgtctcagttccacggcttgcaggccaccgattccggatctggcgacgttaagtaccatctgggcgtgtttcaagagcggctcaaccgacagacaaaccgcatggtgcgcatcaccgtggtggcgaatccctctcacttggagcacgtcaacccggtgctcctgggtaaggcccgagcggagatgttccaacggggcgacacatgtggcagcacggtgatgcccatcattatccacggagatgcctccttttccggtcagggcgtggtctacgaatcaatgcatctgtccgacttgcccaactacaccacctacggcaccattcacattgtgtccaacaaccaggtgggcttcacgacagatccgcgtttctcccgctcctcgcgctactgcacggacgttgccaaggtggtgaatgctccgatactgcacgtgaatgcggacgatccggaggcgtgcatccagtgcgctcgcattgccatcgactatcggacacgattcaagaaggatgtggtcatcgacatagttggctaccgacgcaacgggcacaatgaggcggatgaacccatgttcacccagccgctgatgtaccagcgcataaaaaaactgaagccatgcctccagctctacgccgataagttgatcaaggagggagtcgtcacggatagcgagttcaaggcaatggtgtcaagctacgaaaagatctgcgaggacgcttgggccaagtccaagaccatcaagaccataaaggtgagtcgatttgctgacaagccagtcgccccattcaattgataatctgcatttcgcagtattcctcttggatcgactctccctggccaggattcttcgagggtcgcgatcgcctgaaactgtgccccactggcatcagcacggacaccctgaagacgattggcaacatgttctcgactcctccgccgccggagcacaagttcgagacacacaagtgagtacagaatggatgggttatattccttcctaaccatggcaatcctttccaggggcatccttcgcatactggcccagcgcacgcagatggtgcaggacaaagtggctgactggtcgctgggcgaggccttcgccttcggctcgctccttaaggagggcatccacgttcgactatccggccaagatgtggagcgcggcaccttttcgcaccggcaccacgtcctgcaccaccagtcggaggacaaggtggtgtacaactcactggaccacctctatcccgaccaggcgccctactccgtctccaacagctccctgtcggagtgtgcggtccttggcttcgagcacggctactccatggccagtcccaatgctctggtcatgtgggaaggccagtttggggacttctgcaacacggcgcagtgcatcatcgacacgttcatagccagcggcgaaaccaagtgggtgcgccagtccggagtcgtcatgttgctgccacacagcatggagggcatgggcccggagcactcttccggccgcattgagcgcttcctgcagatgagcgacgacgatccggacgtctatccggatacctgcgacgctgactttgtggctcgccagctaatgaatgtcaactggattgtgacgaatctctccacgcccgcaaatctgttccactgcctgcgccgccaggtgaagatgggcttccggaagccgctgattaacttctcgcccaagtcactgctccgccatccgctggcgcgaagtcccttcaaggacttcaacgagtgcagttgcttccagcgcatcattcccgacaaaggacccgccggcaagcagcccgactgcgtccagaagctggtcttctgctcgggaaaggtctactacgatctcgtcaaggagcgcgacgatcacgagcaggtggagacggtggccctggtgagggtggaacaggtgagacgcctcccaacgcgacacctcttcttgttcatgataaccatgattgggcgcatcctccagctctgtcccttcccctacgacctgatcagccagcagctggagctgtatcccaaggcggagctgctgtgggcccaggaggagcacaagaacatgggcgcctggtcttacgtgcagccgcgtttcgacacggcgctcctcaagaacgaaaacgaatcgtaagtcctagatagtagtacaccccgtcttccaaatgtcaaggtgcaatgccaggccttgggctactccccttcgggtgattcaattaaggtgcgattagcgtcgacgcaccttcagatcggtgtcaatcggtgttggtggcgcctcctccgcggacgccttccccacgggcatcgctcgccagccgagattccgaggtggcaagatggcggcgggctgcgtcatggtgatggcgattagcgatggtgatacccgagccaaaagcatgccaaccgcacaggttttagttaggatacccagtgtttggcgagcacgaaggggtatgtccatttgcatggtctatataaaagaaatctttgcagatttgaaatggccaaattcgattccaaactgaaaaacgactgttttcaattcctccctccaaaactttcagaaactagctctattgtttcaagtaacttaatttagtgcttatggcacttaatcaaagtactaggcactaatcagtgtcactagttgagtgttgataccgctttgtgtgccaaggttgttctgccccaaagatattttacaaacttgtaaaacgcttcttctgtaaactctgccaaatatatagttgtttggttttcggtggtgtaacgcacttggcctcgccagagttcatctggcgcccccgaaagttcgtttgcctgctcccccacctctacctaaccatatagtgaggtgattctctgacctggttggcgtaataatttagggtctagttgttagtaagctccgaaacgatcaattgccgtcggctccaaataatttgttgaatttggcaactgcgttgttagtaattggcccgatccgaacgacctcgttgcagatcgcggacagccatgtcgatgttggacatcgcattgtgctcgcagagaactggcgcaaggaacttggcacagattcgcggcgtttgatagcgaaacacatccccgcatcaacggttgcccgtgttcgttcgccttatagaccctatagatattgtatctcgccgctccaccaaagtctcattcgcatgcgaatccaacaatggtcgtccctaataacgccagtgcgctgcgctagatttctgcgctgatttatggaaacaatattgccggcccgaccacgaaacagcacgtctgggggaaattcaaaataatattatgtacgaaagagatatatgatttcatgagcaaaaaaaaaaaaacaaaaaaaaaacagcctgcgaggactcttctctgcacttgaaatctttgatgtttcggtcttcataagtgtttccaactatcgctcaactcgaaattccgaacatatagaatgaaatgtgctttgtttttcaattgcttggtgcaaatatgtaggtgcactggaaaaaatataggttctataaatatctaagctatttccttcacttttgacgctatgaaccgatttatctttcatcatttattttccattaaatgtaattgatttattaaaattacctgatttc

SEQ ID NO: 146 - DNA, 3231 bp, DROSOPHILA
aacatgaaccaatgtcgtctgaggagcctggcgcggatcaggaggagcctgacactgggtttgcggggaactgaccaacacgtcctcgcccgtcaagccctccgcaccattcaaacgacctcacagcggcgaggtgtccatgatctggactccttcgccaatggatgcagtgccgcctacatcgagggactctacaacaagtggaagcgcaatcccagttccgtagatgagtcctggaacgagctcttcagcagcaacgattggtccagccccaagagaagtcctcttcaggtttcgcactcccggaagtacagacgtcctccggttgaaaggatagctgtgaaggctcggtcgggcgaaaggacggcttccggtggcgcatctgcagctccagccgcacctcccagcgactggaagaacattgatgaccaccacgtgatccaggccatcatccgtgcctatcaatcgcgcggtcacttggccgccgatctggatcccttgggtattgttggtccgaagaagcgtacgtcggtggatggcacccagcgacatgccgccagggaggtgctccgccagcacttctcctatatatttaatgacctcaataccgtgttcaagttgccctcatccacaatgataggcggtgatcaggaatttctgtcactaaaagagatcctggatcgcttggagcgcatctattgcggccacattggagtggagtacatgcagatcacgtcgttgacaaagaccaactggcttcgcgaccgtttcgagaagcctggaggcctggacttgaccaaggaggaaaagaagctcatcctagagcgtctcactcgctcgacgggattcgaaaacttcctggcgaaaaagttctcgtcggagaagcgtttcggactggagggatgcgacattatgatacccgctataaaggaggtggttgaccgggccacggaccatggcgtggagtcaattttaataggaatggcgcatcgagggcgcctcaatgtcctcgccaacatctgtcgcaagcccatttcggacatcctgtctcagttccacggcttgcaggccaccgattccggatctggcgacgttaagtaccatctgggcgtgtttcaagagcggctcaaccgacagacaaaccgcatggtgcgcatcaccgtggtggcgaatccctctcacttggagcacgtcaacccggtgctcctgggtaaggcccgagcggagatgttccaacggggcgacacatgtggcagcacggtgatgcccatcattatccacggagatgcctccttttccggtcagggcgtggtctacgaatcaatgcatctgtccgacttgcccaactacaccacctacggcaccattcacattgtgtccaacaaccaggtgggcttcacgacagatccgcgtttctcccgctcctcgcgctactgcacggacgttgccaaggtggtgaatgctccgatactgcacgtgaatgcggacgatccggaggcgtgcatccagtgcgctcgcattgccatcgactatcggacacgattcaagaaggatgtggtcatcgacatagttggctaccgacgcaacgggcacaatgaggcggatgaacccatgttcacccagccgctgatgtaccagcgcataaaaaaactgaagccatgcctccagctctacgccgataagttgatcaaggagggagtcgtcacggatagcgagttcaaggcaatggtgtcaagctacgaaaagatctgcgaggacgcttgggccaagtccaagaccatcaagaccataaagtattcctcttggatcgactctccctggccaggattcttcgagggtcgcgatcgcctgaaactgtgccccactggcatcagcacggacaccctgaagacgattggcaacatgttctcgactcctccgccgccggagcacaagttcgagacacacaagggcatccttcgcatactggcccagcgcacgcagatggtgcaggacaaagtggctgactggtcgctgggcgaggccttcgccttcggctcgctccttaaggagggcatccacgttcgactatccggccaagatgtggagcgcggcaccttttcgcaccggcaccacgtcctgcaccaccagtcggaggacaaggtggtgtacaactcactggaccacctctatcccgaccaggcgccctactccgtctccaacagctccctgtcggagtgtgcggtccttggcttcgagcacggctactccatggccagtcccaatgctctggtcatgtgggaaggccagtttggggacttctgcaacacggcgcagtgcatcatcgacacgttcatagccagcggcgaaaccaagtgggtgcgccagtccggagtcgtcatgttgctgccacacagcatggagggcatgggcccggagcactcttccggccgcattgagcgcttcctgcagatgagcgacgacgatccggacgtctatccggatacctgcgacgctgactttgtggctcgccagctaatgaatgtcaactggattgtgacgaatctctccacgcccgcaaatctgttccactgcctgcgccgccaggtgaagatgggcttccggaagccgctgattaacttctcgcccaagtcactgctccgccatccgctggcgcgaagtcccttcaaggacttcaacgagtgcagttgcttccagcgcatcattcccgacaaaggacccgccggcaagcagcccgactgcgtccagaagctggtcttctgctcgggaaaggtctactacgatctcgtcaaggagcgcgacgatcacgagcaggtggagacggtggccctggtgagggtggaacagctctgtcccttcccctacgacctgatcagccagcagctggagctgtatcccaaggcggagctgctgtgggcccaggaggagcacaagaacatgggcgcctggtcttacgtgcagccgcgtttcgacacggcgctcctcaagaacgaaaacgaatcatcggtgtcaatcggtgttggtggcgcctcctccgcggacgccttccccacgggcatcgctcgccagccgagattccgaggtggcaagatggcggcgggctgcgtcatggtgatggcgattagcgatggtgatacccgagccaaaagcatgccaaccgcacaggttttagttaggatacccagtgtttggcgagcacgaagggtactaggcactaatcagtgtcactag

SEQ ID NO: 147 - protein, 1075 aa, DROSOPHILA
MNQCRLRSLARIRRSLTLGLRGTDQHVLARQALRTIQTTSQRRGVHDLDSFANGCSAAYIEGLYNKWKRNPSSVDESWNELFSSNDWSSPKRSPLQVSHSRKYRRPPVERIAVKARSGERTASGGASAAPAAPPSDWKNIDDHHVIQAIIRAYQSRGHLAADLDPLGIVGPKKRTSVDGTQRHAAREVLRQHFSYIFNDLNTVFKLPSSTMIGGDQEFLSLKEILDRLERIYCGHIGVEYMQITSLTKTNWLRDRFEKPGGLDLTKEEKKLILERLTRSTGFENFLAKKFSSEKRFGLEGCDIMIPAIKEVVDRATDHGVESILIGMAHRGRLNVLANICRKPISDILSQFHGLQATDSGSGDVKYHLGVFQERLNRQTNRMVRITVVANPSHLEHVNPVLLGKARAEMFQRGDTCGSTVMPIIIHGDASFSGQGVVYESMHLSDLPNYTTYGTIHIVSNNQVGFTTDPRFSRSSRYCTDVAKVVNAPILHVNADDPEACIQCARIAIDYRTRFKKDVVIDIVGYRRNGHNEADEPMFTQPLMYQRIKKLKPCLQLYADKLIKEGVVTDSEFKAMVSSYEKICEDAWAKSKTIKTIKYSSWIDSPWPGFFEGRDRLKLCPTGISTDTLKTIGNMFSTPPPPEHKFETHKGILRILAQRTQMVQDKVADWSLGEAFAFGSLLKEGIHVRLSGQDVERGTFSHRHHVLHHQSEDKVVYNSLDHLYPDQAPYSVSNSSLSECAVLGFEHGYSMASPNALVMWEGQFGDFCNTAQCIIDTFIASGETKWVRQSGVVMLLPHSMEGMGPEHSSGRIERFLQMSDDDPDVYPDTCDADFVARQLMNVNWIVTNLSTPANLFHCLRRQVKMGFRKPLINFSPKSLLRHPLARSPFKDFNECSCFQRIIPDKGPAGKQPDCVQKLVFCSGKVYYDLVKERDDHEQVETVALVRVEQLCPFPYDLISQQLELYPKAELLWAQEEHKNMGAWSYVQPRFDTALLKNENESSVSIGVGGASSADAFPTGIARQPRFRGGKMAAGCVMVMAISDGDTRAKSMPTAQVLVRIPSVWRARRVLGTNQCH

SEQ ID NO: 148 - DNA, 8620 bp, DROSOPHILA
ggttttgtattgtttggccaagacatcgcgttccagtgtcactccgacggtgcgctattttccttttgacatttgaacgcatccatagcgctttcgaaatagaaaagtagaatatccgtcgcctcgtaaaacgggttttaaaactacctaaccacatacatacatatgtacgacaacagaagtgccggtacacacggacacggacaagcattcatatcgtacctgagcagcgggttgaaagttcagcggctattgaacgctcgatattgtaattgctggctccctcgccctctttcacttcttctacacaggaaaaaattggggaatcgctttggctgtttaatttgtatgggggttgcaaaaactttcatctagagtctaattgaatcggtctatggatgtccacagaaaatgggattgttttctatgtgtacggatttaagatgaacttgaagcgggaggcagcagcatggctcttttgttttctttagttgttttcagagttcatacgttcgttttgtattttcgtatattgcagtggcgaaatgaaaagtaacttgccaaacccgcaacaaacacagatacgtgcactcacacagaggcaagtacacacattcattgagctaaaagtttatctgaaaggaacagtcgtgttcagcaatttagggccaatagcaaattggaagaaagatatcttgtgattctgggaggctagtattatctttttacgaccttgattccttctcagccacggctgtcaaatcgcaaccccaaatccggacaaagactaaccagcaaaaggttgacctgaaattccaactaacccaaattccaaaaaaaaaccaaatcgcattgtttctgcctttccttttgcgggttatctgtacttttggcgttcattttaaacgtggtagcagcaaaaaatttgcaaattttatggaaaaagaaacacgaaaatcatgcaaaaaacggcgatcaggagaagaggttcttatgaataatgacagccagcgtcaagtttggcctgctgaaagggtcattggctggacgattctgcgtctttgaaattacgttgaaagtgtttagctaacgactttatttggatagaacgcagaacaaaatccaccgaattgtgcccccattagtacccttcttaaatatttaatattccgctgatttatttgcagaaactttacgccaaggccatttacgataattatgcggacacgtcggacgagctgcccttcaagaagggtgatattctcacagtccttgagcaggacacggagggcttccagggttggtggctctgctctctgcgcaaccgacaggtgagttgggtcctatgatttcatgatttgttattagtttgggtctacacgagcccaggtaatggtactgcatgcaaaatagtcgctaatagaacaattatgaaccattcgatcctaagtcattacccagtctatcaaacgttttcggatatacaagactttgttttgatttgaaaacaaagttgtggaaaattttaaattttctgcacgtcgatcgacggcaatttttaattaacaactgaattggcgccacttaaaaaatctcgtttgtgtaggggccggccggcgatggtgtcaaaacatatatcaaagtggaaattagaagtgctgggtgagatatggaaacatgaacgcgatagcggtacgttatacatatgtcgggcaattgtcgctaattaaaaagtagccgagccttttaatggaaacaattaacccaaaaacggtcaattgagtgccgacaagagcaacaacgtgtggcataaatattaacagcaacataaataactgtgtcaaaaagcgaaatcaactttcggcacacacttttagctaaaacagatgttgacaagattttctgttgacttcgagttttaaggagaatcgcacgaatttctgtcaaaacttgcattgagatggtgaattgggcgagtataaaaaatgagccgtccaattaaaagcacgcacgacattctttttacaacattttttttttaacatattgtgtccatttatttgtatacgcagaaataaataattcatacgtcgtcggttgataaaaaaacaatcaaaatcaattggcatcatacaaaagcgtattaatgttttgttatgagaaaactaaaaaatggggttgctatcttgtggttataggaaacttttagtttaatattttaatttgctttccctacttaatgtcgatttatattcaacaaaacatattctcattgctctatatatatttcagggtctttgcccgggcaaccggttgcgcgtcttgaactcgtacgactcgggatgcttctctccttcgccggccagttctccagttccgtccctggcggccagcacggccacgctggatagctccatctgctcggcggagatatacgagaacggttccgtcatcagtgcggtatcgtcctcaaactcaaattcgggaggggctagtagtggactcggatcggagtcggtgtctcgtgtctcgaggagatcgtggcacgcctcgccgacaaaggtatgtttctcgtcctcataccgaatgactcgtccatttaccgctccgttagactttttgatggaaagcaggcagtcgagaggaaatgcatcttaattgatttcgtttccttgcaaattttacgtcctcttgcttaattatgatatttgtcaggaaagtaaaagaaagtaatttctcagctcctgcggctccatctgcatctccacgagtgcgatgccctgctttttccacgacaactgcgtgtcgtaattgtgcaataaataagagttgcgagagccgatccttggctcacggggataacctcgtccgcaggggtctgcagctgtccaactggtttcctctttgcactcgactcgaaatttgacaatttgtcagctggacatgcgttttatttgcatttctttcactttgattccatttgattagcaaattgaaggaaacaaacaatttagcatagaagaagcacgactacagacttgaggtgttcggtgttgtccattaaaatctcagtacaggaagtgattatctgttaaatgggcataataaactaattggccgatgtgaccaatagcatccaaagagctccacgacccttggaaacctcaaaagacgcccacatccatgggagataatactcttggagaaactttcgctttctcagcatactcgctgaatgatcgactcgcaggcaaatcaaataaaatgaaattcaaattacagtcataaaccttttctcgtattatcggcagctatcaatcttaactggaggcaagtaaaaccataaattcaaaatcggtctgaaggagagccagcgattcgaacgccccactgtacattgcgccggtagatttgctggcggatgcatagatttggagaaaccttttgcccataaaagttttgcactaaatacccaaagccccctattgttcgatttgtgttcaattttatcgagttcaaaaaatctcatcacgcgagtctgtcacttgaaggcgtcgagagttatgtggaggatagctgcaaacatgcacttgaccgataatgcggtcgattgtagaggcagacattcctagttggagtgatgtaccgttgacgtgtttcagagggtttgacaagactttaggaataagcaaacatcgataaaggtgaatttgtaaagtgtgaattacgcaaacaaaactttatcgacattcctcgagtaaatcgagaacggaaatttctcgcgcggagcgttgcacaatcgttgggcagtgttggtcagattcttcaaccgcggacatcccacatactcgtagttacacttcatggctggcatggaaactcgcttgaaccgttagatggcggccgtcgtcagactgtgtgacaatttcgagttccttgagcccacataccgccagctctgccgctccaaagctccatcgctccgtctatcccctaaaattttatccatctctatcacgcaccgagcataaagccaaacgaagccgaatcaggttgccaaatgcactggtacgggcaatggccaatgaagatttatggtcagatccaaaacaagcacaaaagagactttacctttgagcaaaacatgtcattttgttttactgcccaaaaatggttaaaaatgcagtcaaagcgacagcaaaaaaatttttttttcaaattctgtggagatttgtgcgtgaccaaagtcggggaaactcgaagactaccgattgcttcgattggcaaaccggattgattgcaaaagcggaaaaataacctccaccggttagcttccaaacaaggtcgattctcacctgagacggacggtgtagttttcccttgcttatcccttcggaaaaaataacccgctgtctaattgtcattcggtgaagaaattctttgtttcgttctatacgtgacaaaatgatacgatttggattgaaccgcgacgggagcaggaaaaatgggatgatcagccgagaactcaaaatatactaagggaacattgaaatgcaaggaataagcgtggagatgataatctcgagctcgctactgtattcaggtttggaatttaaacaacaacataaaacatgacactttttacactcccagtatctggaattacgcatagcacgcgaattattcgaactgcaggccatcaaagttgaacgaaagacgaaaagaagaccgcctagcggccggactttaatgcgatgtctgtgtcggacagcccaacccaaacggctacccaaatgcgctagttatattgaaaactctgatgcttgccgtgccaaagttgtttatttggcacaacaatcacataggcacaacagagaggaaaaggcactcaaacggcaggggaaaagattcccaaaacgtgggtcatataaacccaatacttagctcctgctgagccacgttcgctttcagtttttgaggtaggcctacttataggtggtctagttgtctttctaaattctgctagacgactagcttggtctcagctgcccggaccgttacccgctgattacatagtggtatcctttcggatccttatcctggactgtagctgcagctctttgaatttatttcggtatgtaacaggacattttgttggactattggttcaaccgaatcgaatcacgttaaggacgtaggactttggggtaaggtcctgtctcatcaaagttatgaaaattaataaagcaaaataaaagttgtatgcggaattgctttatgttactttgtttttaatcttggacatttcggacttaccgtccattgccttgacactgaacagcttgaagtgttcctgtatatcctaaacggccattgcgcatgcccgaaaaaatttccctgccattttcccgactttcacattcctactcagtcatctttggtccgcaatcgcagtcaaattttcgtctttcggcgacaaggttttccaattgggaattttcaattgtgcagaccatttttgataatagtacatttaagcaagatgtgaaagcaaaagagacggaggaagggcccaaaatagtgagtgccacacccgattgtattctacgactgcctctgtattttttttaaattgccacatgcatagtagaggaaaatcaataaaccacttagctgcaggcagtgtgttgtgtgtgtacttacagtctgttaactgaattaaaccacgtaaagggagtaaaaccaaattatactaatgctcttcatttgcaggtaatcacaccacagcgacacggtgatgtatacatctacaattactcgccaggatcagcgactggatctggagcaagagccgcgcccagcacgccgcagcagcagatctatagcaaccaaagcatctaccagaactttgcaatgatgtccagtcctcgccaaaacgcaagtggcagcgagtttgagacctatgacatacccaagccggccacgcccgttccgctgaactacgacagtcccagaagcggtcttccgaaggcttctaactctacaacgacctccagctccagcctaggcacccggtttgagacactcaagagcgtggccgcatccattgcggaggagtcttacgatgtgccacgacccctgatcttaggcagcaaccagctccagcagcaaatgtcacagatgacgccaagcagttccgcctcctcactgctgaccagcgacagcctctccctgagcttttccagctcgaaccgttcatcgctggccaacatgccggattacgacatccctcgacgaaatccgcttcctgtgcgccgtcaacaaagtgggctgacctacgactttccgctgcctccgttgcaggagcaggttccgcgggtgctgtgcacaccctctaccgtcaccactaccaaagaactgcctctagagctctcctccgcactagaaacactcgcaaagctgcaactgcagactactgcggccattaatcgattgctaagtttcgtagtacccaattggcgcacccgcgctcaactcgagccggccatcatggatctgaagctggccgccctgcgtctgcgcacaacactccacgacctggcagagttcggggagggagccctgggaaacgccacgcgttcggaggaccgaaacctggccctcaagctgcggcccttggtgcgggctttgcgagatgccaacaagctgattcacgactcttccgaatccctcgatgcccagggagcctggtctatagatcagctggccagaagcgacgagaagcacggctgccgacccccggacgcactggaccaactgatggtttgtgcccagacgctcactgaggacgtgcgctcaaccaccagtttcatacagggcaacgcctcgctactttttaagcggcagctgacggtgggtcacaacggaggatcaggaacgggagtgttagagggcagtcggggcagcgctgaatggttggaggactacgactatgtggcctttgagtccaaggatgcagctgccaggaaaaacgaggcgctacgtgaggctattcccgccgacctgaaaacgcagttcgatacggttatccggactgctgagagttcagccatgggcgctgggtctggatcaattccaaccacgcccacggcacgcacgacacctactacgccctgcaagtcgccagagatgaccgacaaagacaagaagctggtgcgctactatgcccaacagatctctactcatatgggaaacttgatgcaggccattgattccttcctggagacagtagaaaagaaccagccgcccaagttcttcattgcatacggaaagtttgtggtcgtgagcgcccacaacttggtgaccataggcgacaacgtttaccgaaatatttcgaaggaggcactgcgggagaaaatcctgcgctgcaccaacgccctctccgatgccctaaaaacgtgcgtcttgaagtcaaagaaggcggcagcccacttccccagcggtagtgcagtccaggaaatggtcgattcggtggtccacatcaacaacctagcccgggacctcaagtcggtcatgctgcaggcagttcatctgtcaacggcggcaggagtgggtgcatgaatggatttcagacaaccagtattagttgagaggcgtgtagccaggtcttccagcattgtccgcggtttggtagatgtagcacatgcattgcatgtgtatctgacatcgacatatcctggcatcagcaaccgagcgccaattgccgcttatattttgcattgtgatattttgagcaaaacatctgaaaatgcacagcaccacagccacaatcgcccgatcgccatcccggccagaactcaggttcgggcaagcataagttacgatattgtacataggacgatgtaaattagcgtattcccaaacccctgtcatgtccgctagcaatattgtattagtgaagcatttcaacatagttttgtatacttatatactctatactctagagcataaacttagccgtaccaccacataaacatctgcctaagttaagcacgcattattatacttgcatagtcagaatctgaaagatttacccccaacattttgaataacgcgccttggcgctactacagtcagcgatatacaagcatatatatataaattgtaaacaaccaagaaattagtatgtaatatgaacaataaactaaagacttcgaataaaataacaataaaccttaaaatattgaaatctgaacgcatcaatttggttacattttatatacatacctgacttttttcttgagactactgatccaacagaaagatctttaacttaaaagcatttcttacaaggtaatttcagcgccgacttttataaaaaagccatcgatggcttagtatgtatcgatagtaatcgatagctctttttgctcttttctttaaacaattgacattcccaatttttccttgagctaaaaacttaataatcgacagtttcagttcaaaatgtacggatttaaagtaattcctaatttgtgacgtttttatttaaaaaattgtaatagaaaaatcagtattgaatgaaatttcagttattcaaatgaagccctattgccttatt

SEQ ID NO: 149 - DNA, 2340 bp, DROSOPHILA
atgacagccagcgtcaagtttggcctgctgaaagggtcattggctggacgattctgcgtctttgaaattacgttgaaaaaactttacgccaaggccatttacgataattatgcggacacgtcggacgagctgcccttcaagaagggtgatattctcacagtccttgagcaggacacggagggcttccagggttggtggctctgctctctgcgcaaccgacagggtctttgcccgggcaaccggttgcgcgtcttgaactcgtacgactcgggatgcttctctccttcgccggccagttctccagttccgtccctggcggccagcacggccacgctggatagctccatctgctcggcggagatatacgagaacggttccgtcatcagtgcggtatcgtcctcaaactcaaattcgggaggggctagtagtggactcggatcggagtcggtgtctcgtgtctcgaggagatcgtggcacgcctcgccgacaaaggtaatcacaccacagcgacacggtgatgtatacatctacaattactcgccaggatcagcgactggatctggagcaagagccgcgcccagcacgccgcagcagcagatctatagcaaccaaagcatctaccagaactttgcaatgatgtccagtcctcgccaaaacgcaagtggcagcgagtttgagacctatgacatacccaagccggccacgcccgttccgctgaactacgacagtcccagaagcggtcttccgaaggcttctaactctacaacgacctccagctccagcctaggcacccggtttgagacactcaagagcgtggccgcatccattgcggaggagtcttacgatgtgccacgacccctgatcttaggcagcaaccagctccagcagcaaatgtcacagatgacgccaagcagttccgcctcctcactgctgaccagcgacagcctctccctgagcttttccagctcgaaccgttcatcgctggccaacatgccggattacgacatccctcgacgaaatccgcttcctgtgcgccgtcaacaaagtgggctgacctacgactttccgctgcctccgttgcaggagcaggttccgcgggtgctgtgcacaccctctaccgtcaccactaccaaagaactgcctctagagctctcctccgcactagaaacactcgcaaagctgcaactgcagactactgcggccattaatcgattgctaagtttcgtagtacccaattggcgcacccgcgctcaactcgagccggccatcatggatctgaagctggccgccctgcgtctgcgcacaacactccacgacctggcagagttcggggagggagccctgggaaacgccacgcgttcggaggaccgaaacctggccctcaagctgcggcccttggtgcgggctttgcgagatgccaacaagctgattcacgactcttccgaatccctcgatgcccagggagcctggtctatagatcagctggccagaagcgacgagaagcacggctgccgacccccggacgcactggaccaactgatggtttgtgcccagacgctcactgaggacgtgcgctcaaccaccagtttcatacagggcaacgcctcgctactttttaagcggcagctgacggtgggtcacaacggaggatcaggaacgggagtgttagagggcagtcggggcagcgctgaatggttggaggactacgactatgtggcctttgagtccaaggatgcagctgccaggaaaaacgaggcgctacgtgaggctattcccgccgacctgaaaacgcagttcgatacggttatccggactgctgagagttcagccatgggcgctgggtctggatcaattccaaccacgcccacggcacgcacgacacctactacgccctgcaagtcgccagagatgaccgacaaagacaagaagctggtgcgctactatgcccaacagatctctactcatatgggaaacttgatgcaggccattgattccttcctggagacagtagaaaagaaccagccgcccaagttcttcattgcatacggaaagtttgtggtcgtgagcgcccacaacttggtgaccataggcgacaacgtttaccgaaatatttcgaaggaggcactgcgggagaaaatcctgcgctgcaccaacgccctctccgatgccctaaaaacgtgcgtcttgaagtcaaagaaggcggcagcccacttccccagcggtagtgcagtccaggaaatggtcgattcggtggtccacatcaacaacctagcccgggacctcaagtcggtcatgctgcaggcagttcatctgtcaacggcggcaggagtgggtgcatga

SEQ ID NO: 150 - protein, 779 aa, DROSOPHILA
MTASVKFGLLKGSLAGRFCVFEITLKKLYAKAIYDNYADTSDELPFKKGDILTVLEQDTEGFQGWWLCSLRNRQGLCPGNRLRVLNSYDSGCFSPSPASSPVPSLAASTATLDSSICSAEIYENGSVISAVSSSNSNSGGASSGLGSESVSRVSRRSWHASPTKVITPQRHGDVYIYNYSPGSATGSGARAAPSTPQQQIYSNQSIYQNFAMMSSPRQNASGSEFETYDIPKPATPVPLNYDSPRSGLPKASNSTTTSSSSLGTRFETLKSVAASIAEESYDVPRPLILGSNQLQQQMSQMTPSSSASSLLTSDSLSLSFSSSNRSSLANMPDYDIPRRNPLPVRRQQSGLTYDFPLPPLQEQVPRVLCTPSTVTTTKELPLELSSALETLAKLQLQTTAAINRLLSFVVPNWRTRAQLEPAIMDLKLAALRLRTTLHDLAEFGEGALGNATRSEDRNLALKLRPLVRALRDANKLIHDSSESLDAQGAWSIDQLARSDEKHGCRPPDALDQLMVCAQTLTEDVRSTTSFIQGNASLLFKRQLTVGHNGGSGTGVLEGSRGSAEWLEDYDYVAFESKDAAARKNEALREAIPADLKTQFDTVIRTAESSAMGAGSGSIPTTPTARTTPTTPCKSPEMTDKDKKLVRYYAQQISTHMGNLMQAIDSFLETVEKNQPPKFFIAYGKFVVVSAHNLVTIGDNVYRNISKEALREKILRCTNALSDALKTCVLKSKKAAAHFPSGSAVQEMVDSVVHINNLARDLKSVMLQAVHLSTAAGVGA

SEQ ID NO: 151 - DNA, 3697 bp, DROSOPHILA
cattatcaagcgaatatgctgcacggcggctcattgacctcccagtcgctgacagcagccggtgggttggtaaagcccgcagcggcgtctaaagaatctggattgtcccttaaggataccagcatgagttcgatgggccgtctgtcgccacttcagcagaacgttcagccagccgatcacctcttcgcctctccaatctttaactacaccgcgtttgatgccgtctcgctcttggaggagcctgtgcccgatgcgaacacagacgtactcatgctgggctccgagtttcaaggaggcctgaccaatatcaactacgacttcgacttgtcggatcaaagtggggaaaacagcactgcggacgagtcaaagctgaatctcgacgaattcgaccccttggcgcagaagggcctagttgccaagccaccgccgcctctgccggagaccagtctgctggatagcacaacggatagccttatagatagcgaagtgcccggcacagctgtcctgcttccatcccctctgaagcccgaggtgtccaactaccggggcttctcaaacttcgatattcccagcatctcgtgcaacacgggagactttagttctctgggacaggacggcgcggatgctcccaaataaacgtttgttcactgggtcactgaatcctgcagctgtgtgaatgtaaataagtttaagtgaaatattgtagttagcccaacgcttcaattcaaatttctgcacatatttatttgtaccatatttaactagctttacagaaaggacgtttaataaatgcaatctaacacatacacaagttgtattgttttttacaataaacggttaactaagtttaatttctttcccaggggtaattgcatgattttcaaaagtcccgccaactgggcatcacttatccaataatctggcagcactagaaaagtaacaagagagattgttgttttcgaaatatctcaatcacacacgatttattctcagtttgcctgccgaaccgaacggacgtgagcgctcacgagaaatggctagaacccgaattcagatgctgctacttgttgttgcgctgacggcggtgataagtggagcaagtgcctccagcataccggaagagctgccccacaatccgctcgagcacgaccccctgcaccccaggcacttcgacgggggcgagcacaatgcccagtttgaccacgaagccttcttgggcccggacgagtccaagaagttcgacagcctgacacccgaggagagcaggcggagattgggcgtcattgtggaccgaatcgacgagaacaaggacgggtcagtcacattggcggagctaaagaactggatcgcctacacccagaggcgctacatcgaagaagacgtgggtcgcgtgtggaagcagcacaatccggacaacaatgagaccataagctgggattcctacatgcagactgtctacggcttcatggatgatctgagccccgacgagaaggaacaggaggaaaatggtatgtagcccaaatcgtcattgtaagcagaggcatcaatttgatagggaaatcactgttttgatgggcgggaaacatcacattaatctaatcaaattgtatttgttttttcgaacaggagtcagctacaagagcctgctgaaacgcgatcggtaccgctggtcggtggccgaccaggacttggatgacaatctcaccaaggatgagtttaccgccttcctgcaccccgaggaccatcccagcatgaagggtgtggttctgcgcgagaccattaccgatctggacaaggaccacgatggcaagatctcggtggacgagtacattggcgacatgtaccgatcgacgggcgcggaagacgaggagcccgagtgggtggctaacgaaagggaggcgttctccacacatcgcgacctggacaaagatggttatttgaacgaggaggaagtgaagcagtggattgcgccccatgacttcgatcattcggaggcggaggccaagcacctgctgttcgaggccgatgcggaccacgatgataagttgacaaaggaggaaatactagacaagtacgacgttttcgtcggctcccaggccaccgatttcggcgaggccttggcccgccacgatgagttctagagtgtctagatacccagaatccctgagattaagattgatcctatgaatctcccacttcgcatgccaaataacttgtaatcttgtctagcccttaagaccttaagaaagtgcattataaaccgactcgaatgatgggccttccttttgtatgtggcaccacgaccaattgatttgaggtgatttgtttaattgaaaggcgtccacgtcagctcttggagcatcaatggccacgtcactggaacgaaaccccatccgcacacacatgcggtcacttgaccccctcccccttgccccgagccacagatacgccgcctttgcctgtgtaacatatgtataaacataaatgattttcgctgtagcccgatttatttccagctgcgagaacattccaaagagagtgtgagtgcaccggaaaaaacaataggaatcttgaatgcctacgattgccacttatctggacttgatactacattttacatctaactattattaacaagatcattttagagtttagttgcaacatgttcaataaaatgcttttattctatttacttctatatatttatattttattttcatgctaaccataaatacttctttctcggtgtagaaccagaagtgaggagctccgggaatcggttattttgtttcaagctgatttagattattttcggttctcgactttcgccgagataagcaaaataattcgttcttcggcgttgataagtctgtctccgttgtgggtacagtgagcactcgagcgagggccaatgtcggccattgacgaatggagtttgataaacaatcaagaatatttgaatgcgtgagctatgtaagtaagtatatgtgctggtgctgcgaagatcttggagaagaaaagagcactcagatatcttttcgatgagtgattcgacttagctaaaactagttttacgctctttcccactcatagttccctaatatgcgcagatcgttttctagtattcactacatatgatatgtcagaagaatataagaaacatatcacaataaataaaccaaaactccttttattatgctttattgatttccattgaaatagacacatttatataattatcttggcttcgttcatgttttttgtttttcttttgtttcttgaatatctgtcgtttaaaatacaaagtattcaaagttgctcagtttgatgcctttaattcagtacatagtatacgaaggacttttcatcttatacatacatgtatatatattgatagttcctggatctagcaaaagtttaaaaagttgttactcgcccgcgccgtcgcttcgatatccaacaacatctaaatacaagtatgtaataatgtaagtgtaattgcaatggaacgtttactttactgactcaatatcctgatcccttccgcaggaccttcgatcaacatctatgcgacatctatgctttatgctcattatgcggctattctcgtacttgtctcacattttttttaggtttttcgtttgtttttttttttttgttttgttttgtttttggttttacctcagttttacaacat

SEQ ID NO: 152 - DNA, 1579 bp, DROSOPHILA
gccgaaccgaacggacgtgagcgctcacgagaaatggctagaacccgaattcagatgctgctacttgttgttgcgctgacggcggtgataagtggagcaagtgcctccagcataccggaagagctgccccacaatccgctcgagcacgaccccctgcaccccaggcacttcgacgggggcgagcacaatgcccagtttgaccacgaagccttcttgggcccggacgagtccaagaagttcgacagcctgacacccgaggagagcaggcggagattgggcgtcattgtggaccgaatcgacgagaacaaggacgggtcagtcacattggcggagctaaagaactggatcgcctacacccagaggcgctacatcgaagaagacgtgggtcgcgtgtggaagcagcacaatccggacaacaatgagaccataagctgggattcctacatgcagactgtctacggcttcatggatgatctgagccccgacgagaaggaacaggaggaaaatggagtcagctacaagagcctgctgaaacgcgatcggtaccgctggtcggtggccgaccaggacttggatgacaatctcaccaaggatgagtttaccgccttcctgcaccccgaggaccatcccagcatgaagggtgtggttctgcgcgagaccattaccgatctggacaaggaccacgatggcaagatctcggtggacgagtacattggcgacatgtaccgatcgacgggcgcggaagacgaggagcccgagtgggtggctaacgaaagggaggcgttctccacacatcgcgacctggacaaagatggttatttgaacgaggaggaagtgaagcagtggattgcgccccatgacttcgatcattcggaggcggaggccaagcacctgctgttcgaggccgatgcggaccacgatgataagttgacaaaggaggaaatactagacaagtacgacgttttcgtcggctcccaggccaccgatttcggcgaggccttggcccgccacgatgagttctagagtgtctagatacccagaatccctgagattaagattgatcctatgaatctcccacttcgcatgccaaataacttgtaatcttgtctagcccttaagaccttaagaaagtgcattataaaccgactcgaatgatgggccttccttttgtatgtggcaccacgaccaattgatttgaggtgatttgtttaattgaaaggcgtccacgtcagctcttggagcatcaatggccacgtcactggaacgaaaccccatccgcacacacatgcggtcacttgaccccctcccccttgccccgagccacagatacgccgcctttgcctgtgtaacatatgtataaacataaatgattttcgctgtagcccgatttatttccagctgcgagaacattccaaagagagtgtgagtgcaccggaaaaaacaataggaatcttgaatgcctacgattgccacttatctggacttgatactacattttacatctaactattattaacaagatcattttagagtttagttgcaacatgttcaataaaatgcttttattctatttacttct

SEQ ID NO: 153 - protein, 192 aa, DROSOPHILA
MQTVYGFMDDLSPDEKEQEENGVSYKSLLKRDRYRWSVADQDLDDNLTKDEFTAFLHPEDHPSMKGVVLRETITDLDKDHDGKISVDEYIGDMYRSTGAEDEEPEWVANEREAFSTHRDLDKDGYLNEEEVKQWIAPHDFDHSEAEAKHLLFEADADHDDKLTKEEILDKYDVFVGSQATDFGEALARHDEF

SEQ ID NO: 154 - DNA, 4288 bp, DROSOPHILA
atattttatatatacaaagtttgtaaaagagttagaagacgaagattcatttcaacaaaatcagatagcgaaaaactccatctggcttatttaatcggtagtgtagctgaaatagcctcaattaattatgaattttcaaaaggctattacacgaatataaaatttcttgaagctgcggcataactttgaatttgatcaaataaacttaaaccgaatgctcaaagctgcataaaatgtcaactaaacttcttttgataggtagcacaccaatgcactttttgcctcgatttacgtgttatttggtcataattgctatccattccacttagtgcaattcggatgttatatgtgttcttgtggttttgaaattcgaagaactttttccgagtttgttggattggtcaaagtttccgtgatactgattccgattgtatctcgaggcagaactgagaaatgcaagatctaattttctttgaaattcaacagccttgtaaataaatagctttaaatattttccacaaataaatatcgtattttaagaattcaaatttaaaaatagatttctttctttcaaaattctcatttggaaaggtttgagaaaagcagtcgcataaaaaacagctttttcagttgtactatggcaaatggtactatgggcagtcgcgataataataataaatgagtaaatgagtctattgaaaattttaattaaattaataagctagaaaaaacgctgtctaaaaaacagtacacttgtatcatgaaaataatgcatgtatgtggtacgcgactgtgactgttaacatatctagctgttaagaatatagctttttgtgttgatcgctgagaatgctctcttttctgttattgccgaagtcagctgataataataacaacaacgcttcaactttctcagaaaagctaccaaagcaaactgtaaatcagctgtctcgaaattctttgttttcattttattttttgcgcgataaaagggctttaaatgtttttccactacaagataaaaagttacgagtgcgcaccgagcatttagtagacgaacatggagaggtgaggtcgcagtagcagtgaatatttcgcagtgatccaagtctttttgtatcctccagcttgcaggtgaacacgaccagcggaccggtgctcggaaaacaatgtacaggtgtctacggcgatgagtacgtcagcttcgagcggattccgtacgcgcagccgccggtggggcacctccggttcatggcccccctgcccgtggagccctggagccagcccttggattgcaccaagcccggccagaagccactccaattcaaccactactccaaacagctggagggcgtcgaggattgcctgtatctgaatgtctacgccaaggaggtatcactgtgggatcgtttagtatagtttccttggtggtaaaggtgatttttgtcgggtgtcattagggattacgtagtcgggttaatgtagtccaaaagcaatagtgggtttttccagcccatgaaatttaattcatttatctagcttcacttttatttgataagacgataaacaaaagctgagtcacttcagtgcgttggacggcgattgaggtcgtatatcagttttcaagcaaaggccagctgtggaatgtactttttcaaactaaaagtttatgtataggaaatacaggaaattgatgaatttaatgactatgataaagaaagattttaatacgagagcagactgatacatacatatacccaatccatcgttaatgaaccatttataccttcgttacagctggactcaccaaggccactaccgctgattgtgttcttttttggcggtggtttcgaaaagggcgaccccaccaaggagctgcatagtcctgactacttcatgatgcgcgatgtggtcgtagtcacagtttcctatcgcgtgggtccccttggattcctaagcctgaacgatcctgccgtgggagtgcccggaaatgctggtctgaaggatcagctgctggcaatggaatggatcaaggaaaacgcagaacgatttaatggcgatcccaagaacgtgaccgcttttggcgaaagcgccggagccgcatcagtccactacttgatgctgaatcccaaggctgagggtctgttccacaaggccatactgcaatcgggcaatgtactctgctcctgggccctctgtaccatcaagaatctaccgcatcggttagctgtcaacctgggaatggaaagtgccgagcacgtgaccgacgccatggtcttggacttcctgcaaaaattgccgggagagaaactggttcgaccatatctacttagcgcagaggagcacctggacgattgcgtctttcagtttggacctatggtggagccatataaaacggagcactgcgcgctgcccaatcatccgcaggaactgctggacaaggcctggggaaataggattccggtactgatgagcggcacttccttcgagggcttgctgatgtacgcccgcgtccaaatggctccgtacttgctgaccagcctgaaaaaagaacccgagcacatgctgccactggatgtgaagcgtaatctgccccaggctctagctcgacatctgggccagcgactccaggagacccactttggcggtaatgatccttctgccatgtcgccagagtccttaaaagcgtactgtgaggtgggatagttcagatctttactgctttcaatttgatagatttcttaacaacttctttcagtacgccagctataaagtgttttggcatcccattcttaaaacgctgagatcccgtgtaaagagctccagtgcttccacatacctctatcgattcgattttgactctcccacgttcaatcaccagcgtttgaagtactgcggtgacaagttgcggggcgtagcccacgtcgatgatcactcctacctgtggtacggcgacttctcctggaagctggacaagcacacgcccgagttcctcaccatcgagaggatgattgacatgttgacaagcttcgcgaggacatcgaatcctaattgcaagctcatccaggatcagcttccgcgagccaaagaatggaagccactcaacagcaaatccgctttggagtgcctcaacatctcggagaacattaagatgatggagctgccggagctgcagaagcttagggtctgggaaagtgtctgccaatcaacgggctagtcaagggtattaagtctcctaacaatattggtagctgaaatcaaacaagtgattaaacattttacaaatctacagtgtttctgcaataatttttttagttggaactatacttctttattaagtactaatgaattatttactcaattcacacataaaggcaaaaaatatttttaggggtcggtaaatcggcatagtatgttttttaggcataaaggaacatacaatttatgcataaaggctcttacactttttttactttcccaaaaccctatctacatccgaatttcgtatgtaaaccattcaagatagtctactttataattcattttctgtccccatgtttatgtgcggcaaatttaccattgtttgagatacgagagcgatccgagtatttttaggttgataagctccggctatcgatagaggtcttcattgcttaataataagcgaaggcagttaaagctagagactggctgtgttcggagatgtcggacgactagtgagtgcattaataaaaatccagccccaattcgttacctattgttttgtttttttagcaacgaagatgcccccgtggtgcagacaacacatggaaaagtgaggggaatcctgcttaagtccctatatgacgaacagttttacgcttttgatggcatcccctatgcggttcctccgctgggaaccctgcgcttcaaggagccccatgaccttaaaccatggcacgggattcgcgattgctccaagccgctcagcaagtgcctgcaagtgagcacattaaccaaggaggtggaaggctccgaggattgcctttacctgaacatatcagtaaaaactgtaagtcttctaaattagaaaacttaattccgaacagcaatcacgatggatttcttttagctaaacggtgatcccatgcctgtgatggtctacatccatggaggcgcttttaagggcggagattcttcgagacgcgcctggggtcccgactattttatgaaggaaaacgttgtgtacataagcattggtcatcgactgggacccttaggtgcgctttcaaaaagctaaaacaattgg

SEQ ID NO: 155 - DNA, 1727 bp, DROSOPHILA
atgtttttccactacaagataaaaagttacgacttgcaggtgaacacgaccagcggaccggtgctcggaaaacaatgtacaggtgtctacggcgatgagtacgtcagcttcgagcggattccgtacgcgcagccgccggtggggcacctccggttcatggcccccctgcccgtggagccctggagccagcccttggattgcaccaagcccggccagaagccactccaattcaaccactactccaaacagctggagggcgtcgaggattgcctgtatctgaatgtctacgccaaggagctggactcaccaaggccactaccgctgattgtgttcttttttggcggtggtttcgaaaagggcgaccccaccaaggagctgcatagtcctgactacttcatgatgcgcgatgtggtcgtagtcacagtttcctatcgcgtgggtccccttggattcctaagcctgaacgatcctgccgtgggagtgcccggaaatgctggtctgaaggatcagctgctggcaatggaatggatcaaggaaaacgcagaacgatttaatggcgatcccaagaacgtgaccgcttttggcgaaagcgccggagccgcatcagtccactacttgatgctgaatcccaaggctgagggtctgttccacaaggccatactgcaatcgggcaatgtactctgctcctgggccctctgtaccatcaagaatctaccgcatcggttagctgtcaacctgggaatggaaagtgccgagcacgtgaccgacgccatggtcttggacttcctgcaaaaattgccgggagagaaactggttcgaccatatctacttagcgcagaggagcacctggacgattgcgtctttcagtttggacctatggtggagccatataaaacggagcactgcgcgctgcccaatcatccgcaggaactgctggacaaggcctggggaaataggattccggtactgatgagcggcacttccttcgagggcttgctgatgtacgcccgcgtccaaatggctccgtacttgctgaccagcctgaaaaaagaacccgagcacatgctgccactggatgtgaagcgtaatctgccccaggctctagctcgacatctgggccagcgactccaggagacccactttggcggtaatgatccttctgccatgtcgccagagtccttaaaagcgtactgtgagtacgccagctataaagtgttttggcatcccattcttaaaacgctgagatcccgtgtaaagagctccagtgcttccacatacctctatcgattcgattttgactctcccacgttcaatcaccagcgtttgaagtactgcggtgacaagttgcggggcgtagcccacgtcgatgatcactcctacctgtggtacggcgacttctcctggaagctggacaagcacacgcccgagttcctcaccatcgagaggatgattgacatgttgacaagcttcgcgaggacatcgaatcctaattgcaagctcatccaggatcagcttccgcgagccaaagaatggaagccactcaacagcaaatccgctttggagtgcctcaacatctcggagaacattaagatgatggagctgccggagctgcagaagcttagggtctgggaaagtgtctgccaatcaacgggctagtcaagggtattaagtctcctaacaatattggtagctgaaatcaaacaagtgattaaacattttacaaatct

SEQ ID NO: 156 - protein, 551 aa, DROSOPHILA
MFFHYKIKSYDLQVNTTSGPVLGKQCTGVYGDEYVSFERIPYAQPPVGHLRFMAPLPVEPWSQPLDCTKPGQKPLQFNHYSKQLEGVEDCLYLNVYAKELDSPRPLPLIVFFFGGGFEKGDPTKELHSPDYFMMRDVVVVTVSYRVGPLGFLSLNDPAVGVPGNAGLKDQLLAMEWIKENAERFNGDPKNVTAFGESAGAASVHYLMLNPKAEGLFHKAILQSGNVLCSWALCTIKNLPHRLAVNLGMESAEHVTDAMVLDFLQKLPGEKLVRPYLLSAEEHLDDCVFQFGPMVEPYKTEHCALPNHPQELLDKAWGNRIPVLMSGTSFEGLLMYARVQMAPYLLTSLKKEPEHMLPLDVKRNLPQALARHLGQRLQETHFGGNDPSAMSPESLKAYCEYASYKVFWHPILKTLRSRVKSSSASTYLYRFDFDSPTFNHQRLKYCGDKLRGVAHVDDHSYLWYGDFSWKLDKHTPEFLTIERMIDMLTSFARTSNPNCKLIQDQLPRAKEWKPLNSKSALECLNISENIKMMELPELQKLRVWESVCQSTG

SEQ ID NO: 157 - DNA, 3806 bp, DROSOPHILA
atagttcagatctttactgctttcaatttgatagatttcttaacaacttctttcagtacgccagctataaagtgttttggcatcccattcttaaaacgctgagatcccgtgtaaagagctccagtgcttccacatacctctatcgattcgattttgactctcccacgttcaatcaccagcgtttgaagtactgcggtgacaagttgcggggcgtagcccacgtcgatgatcactcctacctgtggtacggcgacttctcctggaagctggacaagcacacgcccgagttcctcaccatcgagaggatgattgacatgttgacaagcttcgcgaggacatcgaatcctaattgcaagctcatccaggatcagcttccgcgagccaaagaatggaagccactcaacagcaaatccgctttggagtgcctcaacatctcggagaacattaagatgatggagctgccggagctgcagaagcttagggtctgggaaagtgtctgccaatcaacgggctagtcaagggtattaagtctcctaacaatattggtagctgaaatcaaacaagtgattaaacattttacaaatctacagtgtttctgcaataatttttttagttggaactatacttctttattaagtactaatgaattatttactcaattcacacataaaggcaaaaaatatttttaggggtcggtaaatcggcatagtatgttttttaggcataaaggaacatacaatttatgcataaaggctcttacactttttttactttcccaaaaccctatctacatccgaatttcgtatgtaaaccattcaagatagtctactttataattcattttctgtccccatgtttatgtgcggcaaatttaccattgtttgagatacgagagcgatccgagtatttttaggttgataagctccggctatcgatagaggtcttcattgcttaataataagcgaaggcagttaaagctagagactggctgtgttcggagatgtcggacgactagtgagtgcattaataaaaatccagccccaattcgttacctattgttttgtttttttagcaacgaagatgcccccgtggtgcagacaacacatggaaaagtgaggggaatcctgcttaagtccctatatgacgaacagttttacgcttttgatggcatcccctatgcggttcctccgctgggaaccctgcgcttcaaggagccccatgaccttaaaccatggcacgggattcgcgattgctccaagccgctcagcaagtgcctgcaagtgagcacattaaccaaggaggtggaaggctccgaggattgcctttacctgaacatatcagtaaaaactgtaagtcttctaaattagaaaacttaattccgaacagcaatcacgatggatttcttttagctaaacggtgatcccatgcctgtgatggtctacatccatggaggcgcttttaagggcggagattcttcgagacgcgcctggggtcccgactattttatgaaggaaaacgttgtgtacataagcattggtcatcgactgggacccttaggtgcgctttcaaaaagctaaaacaattggtgttcgataacattttataccgggctctttcaggtttcctcagtctcaatgatcccgatcttgaagttcctggcaatgctggattgaaagacgttatcttggccctccgttggatcagggcaaacgcggccaacttcaatggtgaccccgagagaataaccatctttggtcacagctctggcagcatgaccgttcaactgttgctggcaagtccacaatcagaaggactcttccatagggccatactattggcaggattctcaatggagctgaatcgcctgccccaaatggagtaccgtctggccaagcatttgggctacgagggagataatgtcgatagccaggtcttggagttcctcttgaaggcagatccggctctaatcgtctctgcggactttttcactccactggagaagagacagggtcacaatatgcccttcaagcccagcattgaaagctactccacgcccaatgcagtgctccttgccgagcctattgacctccagcgaaccacgtggagcaatcgtattcccatcatcttaggcgccaacagtggcgaggggatgtcgatttttagcttcgtaaaaatgaacccctcgtggctaaaggaatttcaatgcaacccggagcgggtgctgccttggaccctgagaaatcgctgtgatcctggacagcggcgccaactgggtcaagcattgatccatcacttctgcgaggcgcacggccatgagttgactgtagatcacacaaacggattggtggagctcttcactcacggctttgtgcacgctatggaccgactaatccaatccagactgacttacggccaggcgcccacttacctttatcgatttgacttcgactcgccggattttaatttctaccgaattcgctttatgggcaaggaacagcggggagttggacacgtggatgaactgggatacattttcaagctgccagctaccttcaaattggacaagtctcgaccagagttcacagccattcgccgattggtggccatgtttgtccaattcgccgccacctcggacccaaatgctccactcactaaatctctggtggattggaagcccgtaactcgattcggaaaacggatggtcctaaatataagcgaggaattgaagtttattccgcagccagaaatgccgaagttgaagtttttcgatcgcctatacgaaatggctggagtacccttattctaaaaaaaaaaaaccctaccttttcgtctttattgaagtcgaaataaataaatattacttctgatttcacttgctcgacaaagaatgctttcaactagttatctatacccattattaaaggctgaaaggtgattaggtgcattttcaaatcaattttggacgattaaagcttatcgaaatataaaacttaaactttgcttttgtgaaaaaacaaaaaccaaatacataccaagcctttaacaattcacatgattagcagataaggttctccacaaattttaccacatatgtactacatacataggtgtgaaagctcgatcagcagacattttttttcagcccccagtgtgtgggggcttgaactttttgtgttgctccggcttcggatttgcaaactcattagtatgaattcattagagtgtcggcacccatcgcgaacggacaacgacgcttaatgatgtcaaaggaaaggtgagtttttaaacgccggtagacccgagaattttcattcattcatcgtgcttggttacagcagcctggaaacttgcgaacttactctgcccgtgggccaaattaagggcgtcaaacgccttagtctttacgacgatccctacttcagcttcgagaagatcccctttgcgaagcccccgttgggagaactgagatttagggcccccgtgccagcagatccgtggagcggcgttctggactgcacccactatgcagagaagccaacccagaggggcttactgacccgtgaaatcgaaggcggcgaggattgtctgtatctgaacgtctattccaagcaggtaatttaggccaaagactaccttttctttaatcactgatagctgctgacttactttcgaagctgaaaagtgagaagccattgccggtgatggtgtacatttatggcggggccttcaccgtaggagaggccacccgcgaattgtacggcccggactattttatgaccaaagatgttgttcttgtgacgcttaac

SEQ ID NO: 158 - DNA, 1626 bp, DROSOPHILA
atgtcggacgactacaacgaagatgcccccgtggtgcagacaacacatggaaaagtgaggggaatcctgcttaagtccctatatgacgaacagttttacgcttttgatggcatcccctatgcggttcctccgctgggaaccctgcgcttcaaggagccccatgaccttaaaccatggcacgggattcgcgattgctccaagccgctcagcaagtgcctgcaagtgagcacattaaccaaggaggtggaaggctccgaggattgcctttacctgaacatatcagtaaaaactctaaacggtgatcccatgcctgtgatggtctacatccatggaggcgcttttaagggcggagattcttcgagacgcgcctggggtcccgactattttatgaaggaaaacgttgtgtacataagcattggtcatcgactgggacccttaggtttcctcagtctcaatgatcccgatcttgaagttcctggcaatgctggattgaaagacgttatcttggccctccgttggatcagggcaaacgcggccaacttcaatggtgaccccgagagaataaccatctttggtcacagctctggcagcatgaccgttcaactgttgctggcaagtccacaatcagaaggactcttccatagggccatactattggcaggattctcaatggagctgaatcgcctgccccaaatggagtaccgtctggccaagcatttgggctacgagggagataatgtcgatagccaggtcttggagttcctcttgaaggcagatccggctctaatcgtctctgcggactttttcactccactggagaagagacagggtcacaatatgcccttcaagcccagcattgaaagctactccacgcccaatgcagtgctccttgccgagcctattgacctccagcgaaccacgtggagcaatcgtattcccatcatcttaggcgccaacagtggcgaggggatgtcgatttttagcttcgtaaaaatgaacccctcgtggctaaaggaatttcaatgcaacccggagcgggtgctgccttggaccctgagaaatcgctgtgatcctggacagcggcgccaactgggtcaagcattgatccatcacttctgcgaggcgcacggccatgagttgactgtagatcacacaaacggattggtggagctcttcactcacggctttgtgcacgctatggaccgactaatccaatccagactgacttacggccaggcgcccacttacctttatcgatttgacttcgactcgccggattttaatttctaccgaattcgctttatgggcaaggaacagcggggagttggacacgtggatgaactgggatacattttcaagctgccagctaccttcaaattggacaagtctcgaccagagttcacagccattcgccgattggtggccatgtttgtccaattcgccgccacctcggacccaaatgctccactcactaaatctctggtggattggaagcccgtaactcgattcggaaaacggatggtcctaaatataagcgaggaattgaagtttattccgcagccagaaatgccgaagttgaagtttttcgatcgcctatacgaaatggctggagtacccttattctaa

SEQ ID NO: 159 - protein, 541 aa, DROSOPHILA
MSDDYNEDAPVVQTTHGKVRGILLKSLYDEQFYAFDGIPYAVPPLGTLRFKEPHDLKPWHGIRDCSKPLSKCLQVSTLTKEVEGSEDCLYLNISVKTLNGDPMPVMVYIHGGAFKGGDSSRRAWGPDYFMKENVVYISIGHRLGPLGFLSLNDPDLEVPGNAGLKDVILALRWIRANAANFNGDPERITIFGHSSGSMTVQLLLASPQSEGLFHRAILLAGFSMELNRLPQMEYRLAKHLGYEGDNVDSQVLEFLLKADPALIVSADFFTPLEKRQGHNMPFKPSIESYSTPNAVLLAEPIDLQRTTWSNRIPIILGANSGEGMSIFSFVKMNPSWLKEFQCNPERVLPWTLRNRCDPGQRRQLGQALIHHFCEAHGHELTVDHTNGLVELFTHGFVHAMDRLIQSRLTYGQAPTYLYRFDFDSPDFNFYRIRFMGKEQRGVGHVDELGYIFKLPATFKLDKSRPEFTAIRRLVAMFVQFAATSDPNAPLTKSLVDWKPVTRFGKRMVLNISEELKFIPQPEMPKLKFFDRLYEMAGVPLF

SEQ ID NO: 160 - DNA, 4283 bp, DROSOPHILA
agcattgaaagctactccacgcccaatgcagtgctccttgccgagcctattgacctccagcgaaccacgtggagcaatcgtattcccatcatcttaggcgccaacagtggcgaggggatgtcgatttttagcttcgtaaaaatgaacccctcgtggctaaaggaatttcaatgcaacccggagcgggtgctgccttggaccctgagaaatcgctgtgatcctggacagcggcgccaactgggtcaagcattgatccatcacttctgcgaggcgcacggccatgagttgactgtagatcacacaaacggattggtggagctcttcactcacggctttgtgcacgctatggaccgactaatccaatccagactgacttacggccaggcgcccacttacctttatcgatttgacttcgactcgccggattttaatttctaccgaattcgctttatgggcaaggaacagcggggagttggacacgtggatgaactgggatacattttcaagctgccagctaccttcaaattggacaagtctcgaccagagttcacagccattcgccgattggtggccatgtttgtccaattcgccgccacctcggacccaaatgctccactcactaaatctctggtggattggaagcccgtaactcgattcggaaaacggatggtcctaaatataagcgaggaattgaagtttattccgcagccagaaatgccgaagttgaagtttttcgatcgcctatacgaaatggctggagtacccttattctaaaaaaaaaaaaccctaccttttcgtctttattgaagtcgaaataaataaatattacttctgatttcacttgctcgacaaagaatgctttcaactagttatctatacccattattaaaggctgaaaggtgattaggtgcattttcaaatcaattttggacgattaaagcttatcgaaatataaaacttaaactttgcttttgtgaaaaaacaaaaaccaaatacataccaagcctttaacaattcacatgattagcagataaggttctccacaaattttaccacatatgtactacatacataggtgtgaaagctcgatcagcagacattttttttcagcccccagtgtgtgggggcttgaactttttgtgttgctccggcttcggatttgcaaactcattagtatgaattcattagagtgtcggcacccatcgcgaacggacaacgacgcttaatgatgtcaaaggaaaggtgagtttttaaacgccggtagacccgagaattttcattcattcatcgtgcttggttacagcagcctggaaacttgcgaacttactctgcccgtgggccaaattaagggcgtcaaacgccttagtctttacgacgatccctacttcagcttcgagaagatcccctttgcgaagcccccgttgggagaactgagatttagggcccccgtgccagcagatccgtggagcggcgttctggactgcacccactatgcagagaagccaacccagaggggcttactgacccgtgaaatcgaaggcggcgaggattgtctgtatctgaacgtctattccaagcaggtaatttaggccaaagactaccttttctttaatcactgatagctgctgacttactttcgaagctgaaaagtgagaagccattgccggtgatggtgtacatttatggcggggccttcaccgtaggagaggccacccgcgaattgtacggcccggactattttatgaccaaagatgttgttcttgtgacgcttaactatcgcgtggattgtttgggtgagtaagctgaaattgatagcaattatcttatcaatcataaccgttggttgttatgcctgtgctttgtaatctttgtgcttaaaatgaccatctacttttactgaaaatataattatttcataattttatattcatattctttccattgattgaaagtcaattaggtattaagcaaattcatttatatcttaaaggattcctatcgctcaaggacccgagtctgaaagttcccggaaacgcaggactcaaggaccaagtgctagctctcaagtgggtcaagcagtacatctccaacttcaatggcgatgatagtaatattacggtattcggagagagcgccggaggttgctccacccacttcatgatgtgtacggaacagaccaggggactgtttcacaaggccattcccatgtcaggaacagtgcacaactactgggccaataatccggccgaagactttgcctttcgcctggctcagcagaatggtttcactggcgaaaatgacgacgccaaggtactggaatatctccaaggagttccggctagagatttggtgaaccataatttgctaacacccgagcaccggaggaacggtctgctcttcgcctttggacccactgtggaggcatatgtgggtgaggattgcgtggtgcccaaaccgccagtagagatggcccgagatgcgtggtccaacaattttccagtcatgttgggtggaacctccttcgagggtcttttcatgtatccagccgtgtcggccaatctcaaggcattggatagcctaagccaggatcccaccaggctggtgccggttgatgtgcgtacggtcagtagcgagaaagagaatctggagtacagccagcgtctgatgaaggcctacttcggatattcgccacccagctcagagctacttttgaatatgctcgatgtaagtaaaaattgtaaccaatttggttttgtttgcttttttcgagtttattgcgaaactatatattatatattttctctcttagttttattcctacaaaatattttggcacggctttaatcgcacctttaacgccagacttacctatgcaaaagcacccacatattactatcgcttcgactttgattcgccgaacttcaacttctaccgggctaaattctgtggagataaaattaagactggtgtggcccacgccgatgacctgagctatttgttccggaacgcgggctcttggaaactggataagacatctgcggaatatcgaactatcgaaagaatgattggcatttggacggcattcgctgcgacctccaatcccaattgcccagagattggccacttggagtggaaaccatctaccaagaatgatcccaagcgtgttattaacatcagcagcgatgttacaataatagatttgcccgagtatgaaaaactacaaatttgggacaacttgtataagccaaatcaattgatctaagcatgcaaataaatttccatgcattaatgttcactaaagtactgctttgcataacttgctaattttcaattttaaattatttaccatttaagatttctatgatcattttcaaagtacaagtataagtttggttgttttttggttgaactatatatatacatatatttgtgatcagaattcctagccaaatcgatcttgtcgatgtcctcttcctttaaacatcgggatatagggaactaaaagagctcaatcaattaaaaaaggcattccgcccacaattttaataaatatttcaattttcatattatttataatggtataattatggtaagactttatacaatgtatgcaaaagtaatttcgagtatcaggtagaaggatactttttggccctataatgtatgtattttcctgcccgggattacaaggccgagtcgattacccatgtttggctgtctggccatgtgaaggattaggacttaccagctattacctctatgatattgggaatgggtatattaaataccatctcggaacccaacgctcagacaacgtttttatccagcaggtagcaaggtcccaagagttttatgttttactttaattgacatttaattgacagacgacacgcactgccgtcagaacactgctaacgatacatgattgtaacctggcccacaggattttattaagtgcctggaaatttgcgaactaatgccaacggatttaaataaacgttttcacgcatatgtttctaaataaattgttttgtatacctaggtgaatcgatcttaccttggtaagatttcctttatcatttttaacaggaaatatgaaattgcatgtctttaggaattcggaattttaaattttgcttttatatccttatacctcttaaagaagaaataattattctcgctacacgtcgaaaaatctaaatcaaactctattgaggatataaatttgtcttcattaggatcactagcgagatctcaagaattattaaggctggaaatttatt

SEQ ID NO: 161 - DNA, 1878 bp, DROSOPHILA
caagcctttaacaattcacatgattagcagataaggttctccacaaattttaccacatatgtactacatacataggtgtgaaagctcgatcagcagacattttttttcagcccccagtgtgtgggggcttgaactttttgtgttgctccggcttcggatttgcaaactcattagtatgaattcattagagtgtcggcacccatcgcgaacggacaacgacgcttaatgatgtcaaaggaaagcagcctggaaacttgcgaacttactctgcccgtgggccaaattaagggcgtcaaacgccttagtctttacgacgatccctacttcagcttcgagaagatcccctttgcgaagcccccgttgggagaactgagatttagggcccccgtgccagcagatccgtggagcggcgttctggactgcacccactatgcagagaagccaacccagaggggcttactgacccgtgaaatcgaaggcggcgaggattgtctgtatctgaacgtctattccaagcagctgaaaagtgagaagccattgccggtgatggtgtacatttatggcggggccttcaccgtaggagaggccacccgcgaattgtacggcccggactattttatgaccaaagatgttgttcttgtgacgcttaactatcgcgtggattgtttgggattcctatcgctcaaggacccgagtctgaaagttcccggaaacgcaggactcaaggaccaagtgctagctctcaagtgggtcaagcagtacatctccaacttcaatggcgatgatagtaatattacggtattcggagagagcgccggaggttgctccacccacttcatgatgtgtacggaacagaccaggggactgtttcacaaggccattcccatgtcaggaacagtgcacaactactgggccaataatccggccgaagactttgcctttcgcctggctcagcagaatggtttcactggcgaaaatgacgacgccaaggtactggaatatctccaaggagttccggctagagatttggtgaaccataatttgctaacacccgagcaccggaggaacggtctgctcttcgcctttggacccactgtggaggcatatgtgggtgaggattgcgtggtgcccaaaccgccagtagagatggcccgagatgcgtggtccaacaattttccagtcatgttgggtggaacctccttcgagggtcttttcatgtatccagccgtgtcggccaatctcaaggcattggatagcctaagccaggatcccaccaggctggtgccggttgatgtgcgtacggtcagtagcgagaaagagaatctggagtacagccagcgtctgatgaaggcctacttcggatattcgccacccagctcagagctacttttgaatatgctcgatttttattcctacaaaatattttggcacggctttaatcgcacctttaacgccagacttacctatgcaaaagcacccacatattactatcgcttcgactttgattcgccgaacttcaacttctaccgggctaaattctgtggagataaaattaagactggtgtggcccacgccgatgacctgagctatttgttccggaacgcgggctcttggaaactggataagacatctgcggaatatcgaactatcgaaagaatgattggcatttggacggcattcgctgcgacctccaatcccaattgcccagagattggccacttggagtggaaaccatctaccaagaatgatcccaagcgtgttattaacatcagcagcgatgttacaataatagatttgcccgagtatgaaaaactacaaatttgggacaacttgtataagccaaatcaattgatctaagcatgcaaataaatttccatg

SEQ ID NO: 162 - protein, 542 aa, DROSOPHILA
MSKESSLETCELTLPVGQIKGVKRLSLYDDPYFSFEKIPFAKPPLGELRFRAPVPADPWSGVLDCTHYAEKPTQRGLLTREIEGGEDCLYLNVYSKQLKSEKPLPVMVYIYGGAFTVGEATRELYGPDYFMTKDVVLVTLNYRVDCLGFLSLKDPSLKVPGNAGLKDQVLALKWVKQYISNFNGDDSNITVFGESAGGCSTHFMMCTEQTRGLFHKAIPMSGTVHNYWANNPAEDFAFRLAQQNGFTGENDDAKVLEYLQGVPARDLVNHNLLTPEHRRNGLLFAFGPTVEAYVGEDCVVPKPPVEMARDAWSNNFPVMLGGTSFEGLFMYPAVSANLKALDSLSQDPTRLVPVDVRTVSSEKENLEYSQRLMKAYFGYSPPSSELLLNMLDFYSYKIFWHGFNRTFNARLTYAKAPTYYYRFDFDSPNFNFYRAKFCGDKIKTGVAHADDLSYLFRNAGSWKLDKTSAEYRTIERMIGIWTAFAATSNPNCPEIGHLEWKPSTKNDPKRVINISSDVTIIDLPEYEKLQIWDNLYKPNQLI

SEQ ID NO: 163 - DNA, 24562 bp, DROSOPHILA
gctgcggttggatgggaaagcgtgattatcgcattcggattagtggagcatccagttagtcaatgggcttgcctttattgtggtgctaaagtgctcctcgctgtcggaattgctcagtacgccgccaatgttgtacgtcgagggattatccgaggcagtgtgcctctgggcggcatcaattggcgccaccaggagaacaatggcgagcccaaacaatggccggcaaaaaacaaactcagccatagccatgatgcggaagtctatagtttctgggggaggataaacgaggtgttttgtgcaacgatttcaatggtttctcgagcaaacatccagcattttctgcaagtcgaaaaggggagatgccgcatattaatggcattttccatttcccattgcagcaatgagaatggtcaaagacaagatttcttaaagtttattttgctcatttttgaaaaagcagaactttgaattcgcggtgttttcttacatatgtggtaatgccagatcgcgaaaaaatgaataccaacgcaagatcgttagagtgaccatttcattgtgttaataggcattagaagcaaaatctaagtatgtgagtcgatgagtggaaagattttaatcctcggccaatctatcaacattgatctggaattttcaagcacagatgactaaaaaactatgaatatttgaataagattcaaatctctaccctgtgctgccatgctaactagtatttagagtatgttagtattttatccatgcgctcccatctaatttatcatatggttggttctgcggttttcaaacacttgcttatgtcattccttgtcaatagtaaatgcaattaacgtgttactgtcaataattctatatatgtgtgcataaaacagttaagatgtcaattacaccatttattaacggctaactagtatttttcgcgcggtcacactaatcgatcatatggttcgacggtttttaaacacttgttgctcgaccgcgctttcagtcggacgtgttttcgctggggttttccgcgtcggtccgccttatctgcgctgcgctggcacttcgttggagtgagggagacggaggagctgagcggtacggtacacgaagtcgcgcatgacgcggcgctctggaaaattgcattttcatacgccttgagcgcgtaatttatgcccgaaatgctggccaatttcaatttgttggcctaaacgcgacgtgcgtgtgtgggtgtgtgtgcgtgattgggaaaagtgcgtagaaatcgacaatcgttttgtttgcccgcgctgctgctgcgctgcgactgcgctgcttgtgggtggtcaacgggatcgtggggtcgggagagccgattgttgacgttgtatcgcatgctgcctctctttcccgcagccggaattgtttgtcgcgtgttttaacggttatttcttattgacaaaacctcctctgccgacgtcgctgccccggcattgttattgttattgtgtgtggtttctgggccttcttcttcctcctcaccgtattcccacttattgttattctctcttttccgcggctaagtgcggcccactcaaggtgaaaatatattaagttctttcgagtgcccgcgagtgtttgcatttgaataaaataaatataaagtcaaattcgatttacgatcgtcgtctatcgacggatgattcaataccaatcacaatacagtagcacatctctacaagggatattttacattacatacattctacggtgagtatcccacgacaacgacaacgacaacctgttgccaatcgagcccagttactggtttttctggtttcccgaagggcttgccaccaatttaagtaggtcataaggcaataagcctatcacgaccgaaccgataggctaattaccgcgatagctattatctagcagtcacgccctcgccttttgatcccacttgattttgatttcgttcttgcctcttgctttcgctcaataattgacaataagccaaagcgaaagggccagaaatgcgctgagattcaattacgttgcagtggccactatttgttgcttacacgaatagaaaagctaaggaaaaaacatataaatcccactgattgaagacatttgcttatcgggggtatggttctatgccagctactcaaacaaaatataaataaatccttagggaatcaactccgaagtcaagtgttgatttcaactcaagccactatgtatatgaacgtgatgctttccaaaattgttttgtggtgagagggattgtttgttgttatacaaaaattcttcaaatgggagtgtttaagaattataatgacgaagtaacatagtcataattaaaactcgtatttactcgtagagtgaaagggtataccggatacatatattattgatcagatcgagatttcgggatctataaaatctagatgtgcaagtttaattcacaacgtccgcgcccactctaacgcccacaaaccgttcaaaacagtcacgcccacagtttcgagaaaagtttggatttttttaatcctaatatttctttgtcagttcctaaagttatgcaaatcacttttggaaatttctcacttgacgtcctctgaactgaatgcatctgcgttcgagaaaatcaacttagcgccgatattttctctcagtgcacacatcttgattgcagacagcggaaaagagagagagagcgaaagggagagagagaaagagagatgctgactgggcgacgcgtgcttaattaagcgccacattgttgttggtgttgactgggcaggtggcgagctatagagtaagaggcaagatgagggataccaaaaaagatgggggagggggatgaaaagtggacgtgttgagcctgctgcacgcgatgatttccattacctggggtaaaaaaatggcttttcatcgccaaattcctctctggccaagtttttttgttgcgattgaaagagcgcacttcactacttcttgatttgcatgtaatcatgattgggttaatgggcctatgatcacacaattacgatcaattatattcacattataatgtcgaacaaattactaaattatacaatcaatgggaccaatagatagtatgtgcagtgagtttcatttattgaagataaccagtcaattgagatgtcatttgcgggtactttgatcaaccggctagaaaatgtacatatatattctaatttttaaacgctagttcggtatagtattaaaatttttttgattattatgtttttgtgcaattatatatgtatatttaaaaaaaaaagttggaacttgacaactattttctctttaaccacgattcagatgtcatcaattttaatataaagagttaaaaaattcacaatttgtttttgttattctctcagaatccctcaactgtagttgataattctccaaaagttgtcgtataattgcatttgacatactgataacgtttgtgcatgatttttaatcaataaattttaccaaccagccaaatttgttcagttttgccacttgtcaccatttaaacaaactgaccacaaagatattacattaaataaataaaacacattgaagattctcaggtatgcttatttttttgaccacaatcgtgtgtttgctccaatttatgtgggcttgccatgagcatgtgcataattcgaagctgaattgagcagctggtggggattttgtggaagggggggcggtaaagtggccggggttggcgcctgggagcgccagcaattaacataaacaggcaaattgtgtaagcgacattctggagctgcaaataaaatataagcgcccgccccccgcccatccgatgtgcacagcccacttggctgcaattattaagggtgtgtgtgtgtttgttcggatgcggaggtcgggtgttatcaatgaagcagactggatgagaagcaaagtgttctcatcagcgccagtctggtgtgattgtgtgagtatctgtgtgcttcacgttttttctgctcaggtgggccgaggtctcttggcttttcaattgctttgagccaccagacagggcccagacttttaatgaatggccaaattgttgaaaggcgcgctcagcacatgtgccctgcattactcattactcatgttaaatggttcttaaaggattctcacttcactctcacttcgccgtccgtctgatctcatattctattaatccccataaatatttgatcaacccccacagtttcaaagctcccagcatccagatggacgaacagcgcaccgaatttccccaaggaaagctgttactctcactcactctgttttgttaagggcagcaaaattcccaaatgaaacgtatcgaacaaacattcaatatatactatcaactatactatgtacatataaaaaacgtggtatatatgtcatcagacatgggttatactttcgacaagttttcttatgaatttcacacttcgatttgctcgccattcgaattttcgcatgtccattaatacgccagttaatgaactttgagttgaggggttagggtattcgcgatttgacgtctctatgggaaagcagtataaattctacataaatagtataatgcaagattacttctataaatcaacgaataaaattgggagtaacaagccacttgaaatcgtgccgaactaatgtaaatagaaaatatttagcataatataagcacgcaagatatttcaattctttcaattgaaagggcattccaacgtcggcagagcccttggagaatttccctcgtgagtttttgttcaactatttaacatagcgaacgtgccggccatggcattttattcaattttcgtgttagtgcagcgtatgcggggattgcagattgcgggctccattgaatgtggcgctggtgcatggagctgatgatagaggagcgaaggagggctatggagcagtgggtggaaccgcgggcggtggcttcgccggcttcagcgtaattcgaactgacaggctgacaacaatgagagcatcatgctcaacggcggctcgcatttgatgatgcctcgctgaaatatttgcagtggttttcgaatctgggatccagccgcacaggcacacaggtagcgattccaagcagcaatagttgccaatgaacaaccaatgcaaccgcaagaggggttcagattgtttgactccgccgtaaagcggttagagctcaattggggcaatatcaggtcgccgggcggatgtccggtaatttctcccgctggccaattcaagataatttaatatggcctccgtagacgggaattgttttatgtgcgatccggaaagcaggctagcaggcaggcagaggactctccaaggactcgaccgcagacaaaagctttgacaaaaggacccgaaactttgaaccaaactctgtcgcccttcaaccgactcgttccctcgcactcacgccctgttgctgtgacctttatcccttttgctcctgcccatgccaatcccgtcctgccactttccccattcactgttcattgttgtccagccgtgtgtgtgcggctcagccgggaaagcattctaagccaataaccaagtcgacgatgtccctcctccgcctgactcgcagctccgacattcgtggtgctttgtgggcgattcccattttccattttatattttgtgtacattgccgcatctctccgtaggcaattttcgggggcatttttcacacacgaattgcgaaacagatgtacgtattccgccttgctccactggatcccaatccgtcggctagatgacagtccggacatgaggcgaggtgggagcatggcgggtttgggccattctgtgcatgatttcaagcattgcacattgatgtggctcactgccccgaagtttcccattcggtttattgttgcttaagtgcctaatgcccaaaaattcgatgggcttgaaaaactatttagatttaggtaggtcaaacaaaggaaaggattcgagaattatttttgtttgctcaacggaatattcgtatcctctgaggattagatgtatatcctgtatatccattgtactgattatatatgtacctgtgtttagcatacatatgtatatcgtatgtcttatactagataatcctatggtaaccaattaccatattaaatattaattaggagacacttgcacacgtgtatttataactcatccactaattgacctacacggaaaatagtatatttaaaatgagtacaaagtcaatccttaggcagaatatcttgagaaatcttcaataaaaaactgaacaagtccagggaaagtgttgcctccggctcagccatagtcgtaatcgagaatgggatccctctccgtggtggtcacattgatgtcctctataaggcggagctgcatcttatccacgaggggtgcaaaggcaaacacactgaggatgaaaatgaggaagcccgcgatgatgagcaggacgcaaacgacgacggaacacactatacactgggctgtctggacggaatccatgacaaaatggattggcgcgaccacgcctcaattgacgaacgccacactgaaaactatttggggtcacttgcggactcgggcatgccctgaaactcattgctttacttcaccaccgtggatgtcctttccgcatatccatttcttcagtccttgccttcgtcgagatttcggggcatttaatcaagttattggtgggtggttatcgcgagttaagttatgcaaacactttgtgtgccactccttcgggatgctttgctttctctattctttttgcgcgcacatacactctcacagacccactcgcacacacacacacagagagggaacttttatcacacgcacacggtacgaacttttatccctttgtttccctgttttcactgacaatttttggttgttttaaactgtgtcgaactagcggtatttccgtaatatctgttaattttgattcactgacaattttcgctcagaatgagctttccgtatcggatttcactggcatcacatctcgcatacgcaccgtggcaccaggcagcaggcagctagagctgtattgcctacttttcgacgcccgctcaacgcgacgcctggcttttccgcttttccttccttgcttttccggggctgtgaaggacaacgtggcgctttgcgcgttgctcgtctactaaaaaaatcgtctgggctcctccgaaaattccttaacttttgtgctttaagctccccgaaggagctttccaagctggaccaaagctgagccacgcctgcgctgtgacatgtaaacaacttctgcccggagagcggccctctctctttgcctctcagctgtttggcgtcgcccgcgatttcggtcagctgactgccgccgcacgcagcgcggccgctgcgctgctgccgcgatgccagcgccgacattgacgtctgcgtctgtttgcatgccaaccacttgtggctgtctgccgcgttgttttcgcatttcccacgcatgtgactgagcccaaagcttttcctatggcttgaccgccgaacgctggtttacgcaccggttagtccgataactgatggctttcagagccgtttgcaatcgtctgactaacttaaatcgcccaaattgacaggccgatatcgagcgatccgcgtaagaccataaatgtgactacgaaagtgagctaggtcagtccatgctatatgctgacaatgaaattataatggtaaattggaaaaaagaaacctgtgtgtgtttacatataaagtgatgcaagtggagcattcttacaaatgcaagacatttataatgcgatgatatacataattacttaagacgcatattcatgtttttcattcttcaaaaaacattttattttttacacaaacttccaagagcaagtgtaaacatttaattaaattttacattgcctttttaaacaggaaatatgacatttcgaaattcagagaaaaatttgaaaacaaaacataaacacatacatacacaaaacttagatagatagacatcattaataggcttacaactaaacatttaaaagctaggaaaatgttggttataaatactgctgcatgaactatctgagaaaatattaatcacaaacccatcaataaagactgtgattgatatcttaagggacgttttctcaatgtaactatgaattatattatctgttagtaagggctaacatgaactaatgaaatcgctcctaaatatagataacttaatgttaaacaagagctgtgtggctatggtatttttaaacagatttaatcgctttattgtatcttaaatgggacaagatatgtgttttttaatctgaagacaacataatctgtgctcatatgcaacgcattattttcggcagagcgcattcctttactgccaggccaaactaatctaggtaaaactgattttatgaaatgctcgcatagctagtagctttgctacccaaacaaaggctggtcgaggggtccacattcgctggagctgcaggcgaaagtcgcactgacgaccttgacccggtgggcgaaatcgcattaagccaacgactcgggaagggggcaaaaaagtgaaatcaaatctacccatgcccgggccaaagaggcaaaacccatggaaggcagatgcactcaagtggaggcacaaaggtgggtttatcgaatgtgccactactaacccagctaattcgcagcgctgatgcgtaaagcatgtcgaatggatgcaaaaagggttggcccaaggagaagccatagccatgaatgaaatgaaaagttgagcgaaagtgcttcgttttccactcgaaatgcaaacggaaaagaggaaaagcggaaaagtggaaaagcttctgcaagctcagggttagctttttggtccaattgcggcgaacttgggccaacattttcgctccagcgctcggtgtacgcagaccgttttcgttgctcgggctgctgcaaatggaaatcgaagagctgcccacagattccgcacaattaatcatcccagcttgctatttgttaaagttccgcggttccttgtgtttacacaacgcccgaacattaaaaagagagtgtaagtgcttgtgggccacttggccccttggccgtttggctacttgctcgcgatgaaaatgtgcacctggaaaaacagatcccactgaaacctggctgtgccagcttccgcaaactgtgaaacgaaaacgtaaaataggcaaaatatctcgcagatactgagggccccgtgtgtgtatccacattttaagtgcgattttgtttaaggtaactgccggattattattattccagcgcctaatttgattgaagcgcccgttggccaaatttatattcgaataaattcgatttaattgctgagcagcggtgggtcgatggacacagccacggattaggcaaaagttaattgtgatacaagtttaattgcttttttggcaaacagatttaggcgtcatccgcagaatgtgaaaattctcggcgccccaagaatcaatttattggaatggctgagttggtggcaccgccacctccctttcatccgaattccatggtccttgtcgctgaaggttgaggtggaggtagaggtcctcgtttcctgccttcactcagctgcttccttccatcactgctaacgagatgatcacatttgagcagatggctttgcgttgccatgttgaagttatgaatttctcacttccccgggagaagtagtggtgttttaccctgaattctcggggctaaaacccctgtcttaactgaagtttgagttcggaatttcggtaattgttatgtcaatcaatctgattaactgggaccacacagcaatcaattgggttctgctcattagtatgcacatgaagtaaatcccataagccaatctaatcaccagaaacaaatatattggaaaaataaaaaacgaggaatagtgagtatgtttggagcgctaaaaataaaccaacaaataaataaataaatagatacatctgaaataagtgaaataaataaaataaacagatcaagaatttatgttaaacacaaataaagttaatgtacaatcaatggaataatgctttttaaaaataaccaatcagaaaaaaatgccttctatgaatatatcaagaacttcataaaatgaggaattccaaagtgaagatttatgtttttattccttgggcaacgaattaaatatgtgaaattcgaatattattcttaattgcacatatgtatgctgccccaagttttattaaaatcaagaaagtgggaaatcaaagcctgacattgacgtagaactttgaacaactttcaggaatccttcaaacaaaaatcttagcacaaacttgtatgccttgcttccatggaacttgccaaacaatgaaagcatttgcctcattctattgtgacttaatatgccagagtaatggaaagggaaagggaaagggaaaggtgggaataataaaaagcatagaaaaatcgtgaaaagtgacaactttagttggttcgctctcagaatgcggacatcaaggagaaatgtttattggaaatattaggcagtcgacttgatatctcgtacaggggtagaaatattacccatacgccagggtgtcccacgatagtaatgtggggtgattgaccgacttttcataaatattttataaccatctaaggctgaaagcctttggcgacatttttgtatcttagcgtgcagcaagggaatcgattaatacattttgaaataaatatttcaggcgccttaacggaaaatgttttgtgtgaaacaaaataggttttgagaaatgttgcttgttaaataacctaaatataacctaatataactcaaaaatggattatattaaaaaaaaataagtttccctaaaaagactatacttactatgaactatgaactcggttaatattgaaaatataaagatatataaagataaagatactacagacgtgcaattttgttacagtttttatatttaaattttccggttactgcttttatttaaaactccaaggaatccaaaattaagcacattacataaatgggctaagaaaaggtccaactaattcactaatggaattggattatttttgaaaccattaagcgcttaggtccatcattctaactctacgtggtttatttttctatccaacagtaacggtgcgtgtcgtcgctaagtgaactgacgagctttgttttcccaattcatatatttattattcgaaaatggcttaatgggctaatatattttttaaaaatataaccatttttacagtacacatatatggctaaaacatgcatttatcgcacactttcatgtacgataatcatactgagagcgttctttgtttttcccctagatgtaagcgaactcacgttgctttatcctttgccaatccccgcaggacataacgaggtcgacaaaccagtgcaattaactcgcgtagccgactgcgcctccaaacaatagctcccagctccggaacagctacggccagagagcacagcaacaggcgctggcacgtggggagcatcgggtggaggcccattgttgcgccacctggcggcagccactgtacacattcggcactctcgacttggataccattcccatcgcaagccccaacccacagtgggcttcagacatgggcgacaatataattggctcggcaagcttcctgcacttgggggacattgtgtccctctatgcggagggcagcgtttgcggtttcttgagcacactcgggtaagtaccattgtccatgctgaacgaggacgcaacaagtgtgccgcccggaggtgatggatctcctggggccacctattgttgaatactgcactaaacatctggtttctttcgccagcctggtcgatgatcgcacagtggtgtgtcccgaggccggagatctcagctgtccgcctaagaagttcaggggtaagatgggatatcttatagttgattttcactatgtttatgataaaaattttcagactgcctcatcaaaatatgccccatgaaccgctattctgcgcagaagcaattttggaaagcagctaagcaatcggccagctccaatacggatcccaatctcctcaagcgtttgcatgtaagttcaagaatagttataatatttaatcgtttaaaaatgtatattgtgtttcacagcatgcggcggagatcgagaagaaacaaaacgagacggagaacaagaagctgctgggcacctcaatccaatatggacgagctgtggtgcagctactgcatttgaagtccaacaaatatttaacagttaacaagcgactgccgtcgctgctggagaagaatgccatgcgcgtttatctggatgccaacgggaacgaggggtcgtggttctacatcaagcccttctacaagcttcgctccatcggcgactacgtggttgttggtgacaaggttattttgagtccggtgaatgcggatcaacagaatctccatgtggcagccaactacgaactgcccgacaatcccggctgcaaggaggtcaacgttctgaactcgtcgacctcctggaagatctcgctgttcatggaacacaaggagaaccaggagcacattctcaagggcggagacgtggtgcgtctattccatgccgagcaggaaaagtttctcaccatggacgagtacaagaagcagtaccacgtctttctgcgcaccaccggacgcaccagtgctacggcggccaccagcagtaaagctctctgggagatcgaggtggtccagcacgactcttgccgaggcggcgctggcgattggaactctctctaccgctttaagcacctggctacgggacactacctggcggccgaggcggaaatcgatgtgtcggctggcgcgatgtctgccacttctgcatcaggacacgatctgcatttgggggattgtagcaaggactctggcctcagctgctcgaccatgaactccaccataaatggtatgtggtattgaactcaaagaacatgtaacaactattcctaatttttataccttttagacaaacccaagggaaaacagtaccgcctcgtgtccgttccgtattctgcggacattgcctcggtgttcgttctggacgccactacaatggctcgccccgacagcctagtcccacagtccagctatgtacgcctgcagcacatttgctccaacacctgggtccatgccacatcgatacccatcgatgccgacgacgacaaaccggtgatgtcgatggtctgctgctcacccatcaaggaggacaaggaggccttcgcgctgattcccgtctccccggtggaggttcgcgacctggactttgccaatgacgcgtgcaaagtgctagccacggtcaccagcaagctggacaacggcagcatctccatcaacgagcggcgggcactgatctcgctgctgcaggatatagtgtacttcatagccggaatggaaaacgagcagaacaagacaaaggctctggaattcaccatcaagaacccaatcagagatcggcagaaattgctgcgcgaacagtacatccttaagcagctcttcaagatcttacagggtccttttcagcagcacacagccggagatggtccgttcctgcggttggatgagctcagtgatccgaagaacagtccttacaagaatatctttcgtctgtgctaccgtatcctgaggttgtcgcaacaggattaccggaagaaccaggagtacattgccaagcactttggcctgatgcagaagcagatcggatacgatattctggcagaggacaccatcacggccctgctgcacaacaaccgaaagctgctggagaagcacataacagccgcagaaatagaaaccttcgtcggtctggtgcggaagaacatgcacaattgggactcgcggtttctcgactacctctcagacttgtgcgtgtccaatcgcaaggcaatcgctgtcacccaggagttgatttgcaagagcgtgctgagcgacaagaacaaggacatactgatcgagacgcaagtaaaggcactgcgtaccggatccggcccagtgcgctgctacaagggcaactccgaggacgtgtgcctagccacgctcgccgaggacgccggcgacgatgaggatcggtctgatgtgcagtccacgtccaccacaaccacctgggacagtgccagcctgaacgaggacgatggtaccccatctacgggggataagtacgaaatccacctaaagtggacaggacaaccggtgggtacttttacatctctcatttcagtaatttgtaagatgaaaaccgaagattatatcctaatatattgcgtataggaattaccaagcagttagttattacccatattttatcgttgacgcagacatcccggtccatggctgatttggccagttgcgatggcggcgagctggaggcggctattctgaactactatcggcaccagttgaatctgttctccaacatgtgcctcaaccgccagtatttggctctaaatgagctttcccctcgcctggatattgacttaatcctgaagtaagtctggaaacaaatggagcaactggaattgtaaaccttatgtattttgcagatgcatgtcggatgaaaccatgccctacgagctgagggcttcgttctgccgattgatgttgcacctccacgtggatcgcgatccccaggaaccagtgacacctgtgaagtatgcccgcctttggagcgagataccctcaaagatgtccatacaggagtaagtacgaatcgaagtacccacgattagaggtgctatctatctctcctcatgcagctacgatggcaagaaccagcagccagatcaaaacaagcaagcctgccgcgccaagttcaatacaaccatcgcctttgtggagaactatctgtgcaatgtagccaccaaagtgtggctcttcacggatcaagaacaaaacaaactcaccttcgaggtaagtctgagcccaggtgtgagatatcaattagaattgatcattgaactgtcgttccaggtggttaaactcgcaagggacctgatttatttcggattctacagctttagcgatcttctaagacttacgaagacgcttctgtccatcctggactgcgtgtccgatacttcatcaggtgaatttgccagcacggatattgattgtaagtactgtatattcttaaaaatgtgacacctttcgagtcgtaagctccaatgttttctcttaacaagctgtcgaagaggagactaacgcagagggtaagaaactccctaaaaattgccctaaatataatagatatgttataaaatgtttttacaatgtacatgggaaatattcaagccagcttttgaagtgtcaatcatctgtaataatgagttgctttttatgaagattaaccatattcgtatatgatgtggataaaacatactacttcaacttcgattacttaaactcttattaaaccccattacttgcagccgaaggtggagttctacgctcgattggggacataaatacagtaatgacatctttggccctgggatcagtgggccaggctatagctgcgcccacgatctccctgcagcagcggaagtccgtctcccaactaatgaaggagtatcccttggtgatggacacgaaactgaaaataatcgagatactgcagttcattttggacgttcgtctggactataggatcagctgtctgctctccatattcaagcgggagttcgacgagtccgaggtggccgcttcggccgctagcaatgaggcaagtcagcagcagtcgcaacaacaggaaccgcagacgcctggcagctccaatgagactgatcccctcgacagtgccgagtctgtggccgccggcgctgccgcagccgccgctaccactgcgcggcagaagaacatcgacctggagtccatcggcgtgcaggcggagggaatcttcgactgcgagcggagcgacgcagctaacctggacctggatggccagggcggacgtacttttctgcgtgtcctacttcacctgattatgcacgactacgcgcccctggtctcgggtgccctgcaccttctgttccgacacttcagtcagcgccaggaggtccttcaggcctttcgacaggtgcgttactatttgttattttgctgtcacgccatctttaaaatatttgtggttctttgtgagataatatctaaagctataataatcaatcggtagttctagatatttattcataactcacatctatcatcgatgctcgctccatttaattactaagctagttataccctttagtagtaggcatcacagagtaaagattaatcatgtttagaaagaataaaaatactaaatatgtagattaaattgcaactaactaaccaattgatctaatgctcatttctctcttgtgtttgcatgcgctaactctctatctattttttaaatcgagattcgaccttactaatccgataccattatactaatataatcgtatattcacgcaatcgaacttatgatctagtttaaaaaaacacaactaataaagtggacttacaacgcataccgtaccgaccgatcttttgattttgtatgtacccatgattttaaagaactctcgcttaaccaggcatttcaagactaaccaggctatggcctccgtctccgctttcaggtgcaacttctggtgtcggacagtgacgtggagtcctataagcaaatcaagtccgatctggacatccttcgccagagcgtggaaaagtcagagctgtgggtgtacaaggcaaaggccaccgatgaactgggggccaccgacgccggcggagatgctgttagcctggagtataatgccgccctgtctcaggagcagcgaaacgagtaccgcaaggtcaaggagattctgatccgcatgaacaaattttgcgtaactgcatccggtccgggttcggtggtcaagccacgcaagcatgagcaacgactgctccgcaatgttggcgtccacactgtcgtcctcgatctcctccagaatccgtacgacgagaaggacgacgagctgatgaaggagctcatgtgcctggcccacgagttcctgcagaacttctgcctgggcaatcaacagaaccaggtcctgctgcacaaccatctcgatctgttcctgaatccgggcgtaagtttcttttttgcttttcccagttaaatgtatagaactcgtccaaattcctaagaaagaaccttgggggatcaattacttggcgcagttaagggaacaccgctaccggtttcaaaatatatatgcattttgtatagttttagtttactaatctatattcgatctgtgtatttcttacgtacttttctttaaaagaagaaactagttatgtcttgttactttttcgatttcatacatatagatttgaaattattctaaaaagttcttttaattcactttagactggaaacagatctacatcaaaaacaaaaaaagtgcactggagaaaggttaatctttatattaatatttaaataacatatatgcctctgcttataaatttcatatctgttatatatccatttcacattgaatcttttacacttaataggatgcccttattaattgaaaaaaagaattgccagtgccttaaattctcggtttttctcatattgttgtccacgaaatgggatttttacatttacttgcctttcagattctggaggcgaagactgtgtgcgccatcttcaaggacaacttggccctgtgcaacgaggtgacggacaaggtggtgcagcacttcgtgcactgcatcgagattcatggtcgtcacgtagcctacctgcagttcctgcagaccgtagtgcgggcggagaaccagttcatccgccgctgccaggacatggtgatgcaggagctcatcaactccggcgaggatgtgctggtcttctacaacgacaagggttcttttaaccacttcgttcagatgatgcagcagcagatgctgcgcatggaaaagctcagcgacgacagccccttgaagtatcacgtcgagcttgtgaagctcctggcttgttgcaccatgggcaagaacgtctacacggagattaagtgcaacaaccttctctctctggacgacatagtgaccatcatctgccacccgctgtgcatgccggaggttaaggaagcctacgtggactttctcaaccactgctacatcgatacggaggtcgagatgaaggagatctacgcctccgggcacatgtggagcctgttcgagaagagtttcttggtggacattaaccagctcatcacgaaccccgccgccgcaagcaacaagacgctccaggcgtacgtcctgaatggggtaaccaatcttttgggcagcttctttgccagtccgttttcggatcagagtgccatcgtgcagtcccgccagttgatcttcgtgcagctgctacaggctgcgcacagaatcacccagtgccgctggctgtcgttgggtgatcgtttcaacgtggaaaactgcatccgcacgctcacggagtcggccaaaatgcgtagcatcgctctgccccccgagctggagcagcaggtggccacaatgtccagcaaaacggctatgctgacccgacaaaccactaaatggctgctggcctccaagcagcccaagtatgaggctcagcaggcggccagtctgatgcgctgggaccgctcaatcatcgagggcttgcaggacatagtgtctctcttggaggatcaactaaagccggtggtggaggcggaactatcgctgctagtggatatactgtaccgctcagagctgctctttcccgccggaacagaggctcggaagcgctgcgaaagcggtggattcatccgaaagctaatcaagcacaccgaaaagctgctggaggagaaggaggagcgcatgtgtgtaaaggttcttcgcacgctgcgtgaaatgatggccattgatgtgaactacggcgagaagggcgatgcactgcgacagacacttttgctacgctacttccagaccaaaagcacgcccaggttgccggaggatgaggtacctctgctcgccgctcctttgatggatcctgctaagcaaaaccacctagtgacccacggaccaggggccaagtacttgcagcgagcgggtaaaacgcttcacgagatgcagaaccacttggacagagaaggcgcctcagatcttgtggttgagctggttataaagtccgtacattcgcccaatatttttgtcgaagctgtggaattgggcattgcacttctggaaggcggcaaccctattattcagaagggtatgttccagaagttccttagtgacgacctcaaccaggccttctttaaagtcttttttgagaagatgaaggatgcacagcaagagatcaagtcaaccgtcactgtgaacaccaccgacattgcggctaaagctcacgagcacaaacaggacaccaatctggagctagacaagatcgctcgcaagcatggcctcaagagcaacggagtggtgattactgaggaactaaagcgggaactgcacaatgccggactggcaacggcccgtgcctatgggaatgcccgaaacatccactccggcgaggaaagctccgccatcagtgtgaacagtccgctggaggatatactggccgagaagctggaaaagcacaaggacagtcgggatcagcgcaaccaattgtcaaacaaggtgctggtcatgcaacctatcttgcggttccttcagctactttgcgaaaaccacaacccggacatgcagaacctgctgaggaaccaaaacaacaagacgaacaacaacctggtatcggagacgcttatgttcctggactgcatttgtggctcgacgaccggcggcttgggattactaggcctgtacataaacgagcataatgtggccctgatcaaccagacgttggaggccctcacggaatactgccaaggaccgtgccacgagaaccagaactgcatagccactcacgaatcaaatgggctggacataatcacggctcttattctgaacaatatcaatccgctgggcgagaaccgcatggatctggtcttggagctgaagaacaatgcctccaagctgctcttggccattatggagagtcggggggatagcgaaaacgcggaacgcattctgtacaacatgaaccccaagcaactcgtagaggtggcctgcaaggcataccaccaggaggagctgatcgacgagcaggacgatggggatgagccggacgccgggtcggatgatgatgacgccactgtgagtccgcgggaggtgggtcacaacatatacattctgtgccaccagctggcgcagcacaacaaggagttggccggcctgctcaaagcctccgaggatccacagtcagccagcttcgacgccaagacaagtcaggccttgatgtactatgccacgcacactgcccaaatagaggtgagatctaacatggtattatccctatatccaacgtataaatccaatatattttttgtagattgttcgaaacgatcgcactctagagcagatagtctttcccattcccgagatctgtgaatacctgaccacggacaccaaaatcaaaatcctcaacaccgcagaacgggacgaccaaggatccaaagtggcggacttctttgacaaggcagaggaaatgtttaacgaaatgaaatggcaaaagaagttaagaagtatgcatactttggattgaatcagagctactaagttaaatgactgatctttgtaaatgcataggtcaacccttactattttggataagcagttacatgtctctttggagcaacatcctctttaactgtgttgtcgttatcaatatgattgtggccttcttctatccctttgataatactgtgccaggtgagacaattggaaagatatcaaagccatttaaatccaacttttatcatatgttacagagctcagttcccatatctccttgctgttctggatcataacaatattctcacttgttattgtgttagcgctacctcgggagtctggaattagaaccttcataggctccgtcatccttcgattcatctttttactagggccggagtctactctctgcttactgggagtcgtcacggtatgtaaaaggtactggatatgccaacatatctttctaacatggattcttccaaaacaggtgaccctcaaaagcgttcacatagtgagcatcatgggcaacaagggcactctggagaagcagctaattaaaattataactgactttcagttactttaccactgcatttatatagcgttttgcttctgcggtctcatatttcatcccttcttctactcattgctggtaagatggatcaattctatacaaaaggaaatgtctattacctatgcctttgcagctttttgatgtggtctatcgggaggagaccctggtcaatgttattcgatccgtgacccgcaatggtcgctctatcgtgttgacagctgtcctggctctgattctggtctatctcttctcgatcattggctacatgttctttaaggatgactttctggtcagcgtggactttgaggagcaagacaatgcgccgcctccgtctgtccctttgactctatctgtaccggtatcgggagattcctgttctgctcccgatgatctgggcaactgccaggcagccaaggaagtagcaccaccgagtgctggtggaggtgaagtgaaggagcgttcctgcgactcgctggttatgtgcatagtaaccacactcaaccagggtttgcgaaatggcggcggtattggtgacatactcagggcgccttcaagcaaggtagaattcattcgtagatctcaaaaggactctactaatttgaatattttcaggagggcttgtttgtggcacgtgtaatttacgacctgctattcttcttcattgtcattatcattgtccttaaccttatatttggtgtcatcatcgacaccttcgccgatctgagatcggaaaagcagcaaaaggaggccattctgaagacgacctgtttcatctgctcactcaatcgatcggccttcgacaacaagaccgtgagcttcgaggagcacatcaagagcgagcacaacatgtggcactatctgtacttcatcgtccttgtaaaagtgaaagaccccactgaattcactggccccgaaagctatgtatatgcgatggtcaaggctggaatcctggagtggttcccgcgcctgcgtgccatgtcgctagcggctgtggacgccgatggggagcaaatcgagctgcgcagcatgcaggcacagcttttggacacccagctgctcattaagaacctgtccacccaactacacgaactaaaggatcacatgacagagcagcggaagcagaagcagcgattgggattgctcaacacaacggccaacagcctcctgccgtttcagtgagtctgtaagaaatagaatagaatactaattttggcacataattttggtgaacattccatgtgaacccaaaggtattggcccccttagccacatttatcctattcaaaaaccattctcaatatattcaatgcgggatgaacaatttaatctccaagaatcgttcaatacccctagtaataaccaaaaatcattttgtattagattcgaattccaaaacccatacatacattttctcaaatatcctgctcgatagaattctacaaacttaacaaatggagtacattattatgtagtaaactcactcagagaacttagggctgttaaagtgttaattagtgggcgtgttaggcatttttacaaccttaatagtctttaccttaactctcctcgaggactttgtaatacctgaagctagaacctagatctatgtaattaaattaaaaaggttcgcagagcgaccccaaaacaattttcaagaatgttttatcttgtattaaattaaatatattatttaattgttaatactgtatgaatgaattttcataagcagaaatacttgaaaaatcttaatattgtgattacctttttatattttttccctttttaatttctgaatgatttacttagtactcgaagcgagttgtgttggttaaattcgttctaagctaacagttagagtatacatcctaagcgaaactacactattgttaagagaatctttatatctttacgtgcaaagtggagaatatatctttgaaataaatactatcaaattaacgctttgggcttactcttttttagattctttgggttccgtatatgaacaatcatccaaataaacgaaagcagtatttggataatttttagccaacatttttattattacatattaaactactattgtgcttgcaactctataagtcgttagaaactcttttttattttcgaaattcctgcgtctaaacattgcttataaagttgcgagctcacatacattcataatttattgatacattttttctttaatattaataaacattttacataaaattgttgaatgcattttcatgagatttaccgtttgcggggtttccatcgtttaatttgtataactacatagttatgtaaatgtttgtatatttgtatgtaaagattcattccattgctggtgtttgcatttcgacatttaaataataaaaagtttacaaaatcagttgaacggcttaaacataacactggaagcggccgaagggatataatatgttgaattgatcgtgagcagtgcgtggagtggattgaaggaaaagtaatactttgatttgtggcagtttaacatatttgttttcataattctctccgtatgggaaatacttggagggcttgttgctctggggatggagtcaaattggaatttagcatgtaagcccggttggaaaatgttcgatacaaaggcatcaacagttgtgttttacgattatgtgatctaaatatgcatatataaatgtaaaaatgttttattcttggcctattatatgtttttataagttctttacgctgacattttttaatgttgttatctatgctttcgatgcaatactattgcattgttctactcacttttattaatattttgagattcgtatttcggaagaagtcgagaaaacattattagcctgacagtttgcgtgtatatgaataaattagttattaatcaacaatatttgtttaactgctcatggtacacttcgtggaatttttataatataaagtttatccttaaatgtgttaaacttaaatgtttgttgttggttaggtacaaagaaaaatctcatggcttatgttgtatacctaatcaataattatgtttctttattggcttttagaacggatatcgcaataaactaaactcggatgtaaaactgtcatgaagctttgattagaatatgcctatagattgcatacgaaaacgaattagattgctgcataaaatttgcttgcgactagattgaagtttttacttttcgatttttcgcctatgcggtgtagatta

SEQ ID NO: 164 - DNA, 10553 bp, DROSOPHILA
cagtcggacgtgttttcgctggggttttccgcgtcggtccgccttatctgcgctgcgctggcacttcgttggagtgagggagacggaggagctgagcggtacggtacacgaagtcgcgcatgacgcggcgctctggaaaattgcattttcatacgccttgagcgcgtaatttatgcccgaaatgctggccaatttcaatttgttggcctaaacgcgacgtgcgtgtgtgggtgtgtgtgcgtgattgggaaaagtgcgtagaaatcgacaatcgttttgtttgcccgcgctgctgctgcgctgcgactgcgctgcttgtgggtggtcaacgggatcgtggggtcgggagagccgattgttgacgttgtatcgcatgctgcctctctttcccgcagccggaattgtttgtcgcgtgttttaacggttatttcttattgacaaaacctcctctgccgacgtcgctgccccggcattgttattgttattgtgtgtggtttctgggccttcttcttcctcctcaccgtattcccacttattgttattctctcttttccgcggctaagtgcggcccactcaaggtgaaaatatattaagttctttcgagtgcccgcgagtgtttgcatttgaataaaataaatataaagtcaaattcgatttacgatcgtcgtctatcgacggatgattcaataccaatcacaatacagtagcacatctctacaagggatattttacattacatacattctacggacataacgaggtcgacaaaccagtgcaattaactcgcgtagccgactgcgcctccaaacaatagctcccagctccggaacagctacggccagagagcacagcaacaggcgctggcacgtggggagcatcgggtggaggcccattgttgcgccacctggcggcagccactgtacacattcggcactctcgacttggataccattcccatcgcaagccccaacccacagtgggcttcagacatgggcgacaatataattggctcggcaagcttcctgcacttgggggacattgtgtccctctatgcggagggcagcgtttgcggtttcttgagcacactcggcctggtcgatgatcgcacagtggtgtgtcccgaggccggagatctcagctgtccgcctaagaagttcagggactgcctcatcaaaatatgccccatgaaccgctattctgcgcagaagcaattttggaaagcagctaagcaatcggccagctccaatacggatcccaatctcctcaagcgtttgcatcatgcggcggagatcgagaagaaacaaaacgagacggagaacaagaagctgctgggcacctcaatccaatatggacgagctgtggtgcagctactgcatttgaagtccaacaaatatttaacagttaacaagcgactgccgtcgctgctggagaagaatgccatgcgcgtttatctggatgccaacgggaacgaggggtcgtggttctacatcaagcccttctacaagcttcgctccatcggcgactacgtggttgttggtgacaaggttattttgagtccggtgaatgcggatcaacagaatctccatgtggcagccaactacgaactgcccgacaatcccggctgcaaggaggtcaacgttctgaactcgtcgacctcctggaagatctcgctgttcatggaacacaaggagaaccaggagcacattctcaagggcggagacgtggtgcgtctattccatgccgagcaggaaaagtttctcaccatggacgagtacaagaagcagtaccacgtctttctgcgcaccaccggacgcaccagtgctacggcggccaccagcagtaaagctctctgggagatcgaggtggtccagcacgactcttgccgaggcggcgctggcgattggaactctctctaccgctttaagcacctggctacgggacactacctggcggccgaggcggaaatcgatgtgtcggctggcgcgatgtctgccacttctgcatcaggacacgatctgcatttgggggattgtagcaaggactctggcctcagctgctcgaccatgaactccaccataaatgacaaacccaagggaaaacagtaccgcctcgtgtccgttccgtattctgcggacattgcctcggtgttcgttctggacgccactacaatggctcgccccgacagcctagtcccacagtccagctatgtacgcctgcagcacatttgctccaacacctgggtccatgccacatcgatacccatcgatgccgacgacgacaaaccggtgatgtcgatggtctgctgctcacccatcaaggaggacaaggaggccttcgcgctgattcccgtctccccggtggaggttcgcgacctggactttgccaatgacgcgtgcaaagtgctagccacggtcaccagcaagctggacaacggcagcatctccatcaacgagcggcgggcactgatctcgctgctgcaggatatagtgtacttcatagccggaatggaaaacgagcagaacaagacaaaggctctggaattcaccatcaagaacccaatcagagatcggcagaaattgctgcgcgaacagtacatccttaagcagctcttcaagatcttacagggtccttttcagcagcacacagccggagatggtccgttcctgcggttggatgagctcagtgatccgaagaacagtccttacaagaatatctttcgtctgtgctaccgtatcctgaggttgtcgcaacaggattaccggaagaaccaggagtacattgccaagcactttggcctgatgcagaagcagatcggatacgatattctggcagaggacaccatcacggccctgctgcacaacaaccgaaagctgctggagaagcacataacagccgcagaaatagaaaccttcgtcggtctggtgcggaagaacatgcacaattgggactcgcggtttctcgactacctctcagacttgtgcgtgtccaatcgcaaggcaatcgctgtcacccaggagttgatttgcaagagcgtgctgagcgacaagaacaaggacatactgatcgagacgcaagtaaaggcactgcgtaccggatccggcccagtgcgctgctacaagggcaactccgaggacgtgtgcctagccacgctcgccgaggacgccggcgacgatgaggatcggtctgatgtgcagtccacgtccaccacaaccacctgggacagtgccagcctgaacgaggacgatggtaccccatctacgggggataagtacgaaatccacctaaagtggacaggacaaccgacatcccggtccatggctgatttggccagttgcgatggcggcgagctggaggcggctattctgaactactatcggcaccagttgaatctgttctccaacatgtgcctcaaccgccagtatttggctctaaatgagctttcccctcgcctggatattgacttaatcctgaaatgcatgtcggatgaaaccatgccctacgagctgagggcttcgttctgccgattgatgttgcacctccacgtggatcgcgatccccaggaaccagtgacacctgtgaagtatgcccgcctttggagcgagataccctcaaagatgtccatacaggactacgatggcaagaaccagcagccagatcaaaacaagcaagcctgccgcgccaagttcaatacaaccatcgcctttgtggagaactatctgtgcaatgtagccaccaaagtgtggctcttcacggatcaagaacaaaacaaactcaccttcgaggtggttaaactcgcaagggacctgatttatttcggattctacagctttagcgatcttctaagacttacgaagacgcttctgtccatcctggactgcgtgtccgatacttcatcaggtgaatttgccagcacggatattgattctgtcgaagaggagactaacgcagaggccgaaggtggagttctacgctcgattggggacataaatacagtaatgacatctttggccctgggatcagtgggccaggctatagctgcgcccacgatctccctgcagcagcggaagtccgtctcccaactaatgaaggagtatcccttggtgatggacacgaaactgaaaataatcgagatactgcagttcattttggacgttcgtctggactataggatcagctgtctgctctccatattcaagcgggagttcgacgagtccgaggtggccgcttcggccgctagcaatgaggcaagtcagcagcagtcgcaacaacaggaaccgcagacgcctggcagctccaatgagactgatcccctcgacagtgccgagtctgtggccgccggcgctgccgcagccgccgctaccactgcgcggcagaagaacatcgacctggagtccatcggcgtgcaggcggagggaatcttcgactgcgagcggagcgacgcagctaacctggacctggatggccagggcggacgtacttttctgcgtgtcctacttcacctgattatgcacgactacgcgcccctggtctcgggtgccctgcaccttctgttccgacacttcagtcagcgccaggaggtccttcaggcctttcgacaggtgcaacttctggtgtcggacagtgacgtggagtcctataagcaaatcaagtccgatctggacatccttcgccagagcgtggaaaagtcagagctgtgggtgtacaaggcaaaggccaccgatgaactgggggccaccgacgccggcggagatgctgttagcctggagtataatgccgccctgtctcaggagcagcgaaacgagtaccgcaaggtcaaggagattctgatccgcatgaacaaattttgcgtaactgcatccggtccgggttcggtggtcaagccacgcaagcatgagcaacgactgctccgcaatgttggcgtccacactgtcgtcctcgatctcctccagaatccgtacgacgagaaggacgacgagctgatgaaggagctcatgtgcctggcccacgagttcctgcagaacttctgcctgggcaatcaacagaaccaggtcctgctgcacaaccatctcgatctgttcctgaatccgggcattctggaggcgaagactgtgtgcgccatcttcaaggacaacttggccctgtgcaacgaggtgacggacaaggtggtgcagcacttcgtgcactgcatcgagattcatggtcgtcacgtagcctacctgcagttcctgcagaccgtagtgcgggcggagaaccagttcatccgccgctgccaggacatggtgatgcaggagctcatcaactccggcgaggatgtgctggtcttctacaacgacaagggttcttttaaccacttcgttcagatgatgcagcagcagatgctgcgcatggaaaagctcagcgacgacagccccttgaagtatcacgtcgagcttgtgaagctcctggcttgttgcaccatgggcaagaacgtctacacggagattaagtgcaacaaccttctctctctggacgacatagtgaccatcatctgccacccgctgtgcatgccggaggttaaggaagcctacgtggactttctcaaccactgctacatcgatacggaggtcgagatgaaggagatctacgcctccgggcacatgtggagcctgttcgagaagagtttcttggtggacattaaccagctcatcacgaaccccgccgccgcaagcaacaagacgctccaggcgtacgtcctgaatggggtaaccaatcttttgggcagcttctttgccagtccgttttcggatcagagtgccatcgtgcagtcccgccagttgatcttcgtgcagctgctacaggctgcgcacagaatcacccagtgccgctggctgtcgttgggtgatcgtttcaacgtggaaaactgcatccgcacgctcacggagtcggccaaaatgcgtagcatcgctctgccccccgagctggagcagcaggtggccacaatgtccagcaaaacggctatgctgacccgacaaaccactaaatggctgctggcctccaagcagcccaagtatgaggctcagcaggcggccagtctgatgcgctgggaccgctcaatcatcgagggcttgcaggacatagtgtctctcttggaggatcaactaaagccggtggtggaggcggaactatcgctgctagtggatatactgtaccgctcagagctgctctttcccgccggaacagaggctcggaagcgctgcgaaagcggtggattcatccgaaagctaatcaagcacaccgaaaagctgctggaggagaaggaggagcgcatgtgtgtaaaggttcttcgcacgctgcgtgaaatgatggccattgatgtgaactacggcgagaagggcgatgcactgcgacagacacttttgctacgctacttccagaccaaaagcacgcccaggttgccggaggatgaggtacctctgctcgccgctcctttgatggatcctgctaagcaaaaccacctagtgacccacggaccaggggccaagtacttgcagcgagcgggtaaaacgcttcacgagatgcagaaccacttggacagagaaggcgcctcagatcttgtggttgagctggttataaagtccgtacattcgcccaatatttttgtcgaagctgtggaattgggcattgcacttctggaaggcggcaaccctattattcagaagggtatgttccagaagttccttagtgacgacctcaaccaggccttctttaaagtcttttttgagaagatgaaggatgcacagcaagagatcaagtcaaccgtcactgtgaacaccaccgacattgcggctaaagctcacgagcacaaacaggacaccaatctggagctagacaagatcgctcgcaagcatggcctcaagagcaacggagtggtgattactgaggaactaaagcgggaactgcacaatgccggactggcaacggcccgtgcctatgggaatgcccgaaacatccactccggcgaggaaagctccgccatcagtgtgaacagtccgctggaggatatactggccgagaagctggaaaagcacaaggacagtcgggatcagcgcaaccaattgtcaaacaaggtgctggtcatgcaacctatcttgcggttccttcagctactttgcgaaaaccacaacccggacatgcagaacctgctgaggaaccaaaacaacaagacgaacaacaacctggtatcggagacgcttatgttcctggactgcatttgtggctcgacgaccggcggcttgggattactaggcctgtacataaacgagcataatgtggccctgatcaaccagacgttggaggccctcacggaatactgccaaggaccgtgccacgagaaccagaactgcatagccactcacgaatcaaatgggctggacataatcacggctcttattctgaacaatatcaatccgctgggcgagaaccgcatggatctggtcttggagctgaagaacaatgcctccaagctgctcttggccattatggagagtcggggggatagcgaaaacgcggaacgcattctgtacaacatgaaccccaagcaactcgtagaggtggcctgcaaggcataccaccaggaggagctgatcgacgagcaggacgatggggatgagccggacgccgggtcggatgatgatgacgccactgtgagtccgcgggaggtgggtcacaacatatacattctgtgccaccagctggcgcagcacaacaaggagttggccggcctgctcaaagcctccgaggatccacagtcagccagcttcgacgccaagacaagtcaggccttgatgtactatgccacgcacactgcccaaatagagattgttcgaaacgatcgcactctagagcagatagtctttcccattcccgagatctgtgaatacctgaccacggacaccaaaatcaaaatcctcaacaccgcagaacgggacgaccaaggatccaaagtggcggacttctttgacaaggcagaggaaatgtttaacgaaatgaaatggcaaaagaagttaagaagtcaacccttactattttggataagcagttacatgtctctttggagcaacatcctctttaactgtgttgtcgttatcaatatgattgtggccttcttctatccctttgataatactgtgccagagctcagttcccatatctccttgctgttctggatcataacaatattctcacttgttattgtgttagcgctacctcgggagtctggaattagaaccttcataggctccgtcatccttcgattcatctttttactagggccggagtctactctctgcttactgggagtcgtcacggtgaccctcaaaagcgttcacatagtgagcatcatgggcaacaagggcactctggagaagcagctaattaaaattataactgactttcagttactttaccactgcatttatatagcgttttgcttctgcggtctcatatttcatcccttcttctactcattgctgctttttgatgtggtctatcgggaggagaccctggtcaatgttattcgatccgtgacccgcaatggtcgctctatcgtgttgacagctgtcctggctctgattctggtctatctcttctcgatcattggctacatgttctttaaggatgactttctggtcagcgtggactttgaggagcaagacaatgcgccgcctccgtctgtccctttgactctatctgtaccggtatcgggagattcctgttctgctcccgatgatctgggcaactgccaggcagccaaggaagtagcaccaccgagtgctggtggaggtgaagtgaaggagcgttcctgcgactcgctggttatgtgcatagtaaccacactcaaccagggtttgcgaaatggcggcggtattggtgacatactcagggcgccttcaagcaaggagggcttgtttgtggcacgtgtaatttacgacctgctattcttcttcattgtcattatcattgtccttaaccttatatttggtgtcatcatcgacaccttcgccgatctgagatcggaaaagcagcaaaaggaggccattctgaagacgacctgtttcatctgctcactcaatcgatcggccttcgacaacaagaccgtgagcttcgaggagcacatcaagagcgagcacaacatgtggcactatctgtacttcatcgtccttgtaaaagtgaaagaccccactgaattcactggccccgaaagctatgtatatgcgatggtcaaggctggaatcctggagtggttcccgcgcctgcgtgccatgtcgctagcggctgtggacgccgatggggagcaaatcgagctgcgcagcatgcaggcacagcttttggacacccagctgctcattaagaacctgtccacccaactacacgaactaaaggatcacatgacagagcagcggaagcagaagcagcgattgggattgctcaacacaacggccaacagcctcctgccgtttcagtgagtctgtaagaaatagaatagaatactaattttggcacataattttggtgaacattccatgtgaacccaaaggtattggcccccttagccacatttatcctattcaaaaaccattctcaatatattcaatgcgggatgaacaatttaatctccaagaatcgttcaatacccctagtaataaccaaaaatcattttgtattagattcgaattccaaaacccatacatacattttctcaaatatcctgctcgatagaattctacaaacttaacaaatggagtacattattatgtagtaaactcactcagagaacttagggctgttaaagtgttaattagtgggcgtgttaggcatttttacaaccttaatagtctttaccttaactctcctcgaggactttgtaatacctgaagctagaacctagatctatgtaattaaattaaaaaggttcgcagagcgaccccaaaacaattttcaagaatgttttatcttgtattaaattaaatatattatttaattgttaatactgtatgaatgaattttcataagcagaaatacttgaaaaatcttaatattgtgattacctttttatattttttccctttttaatttctgaatgatttacttagtactcgaagcgagttgtgttggttaaattcgttctaagctaacagttagagtatacatcctaagcgaaactacactattgttaagagaatctttatatctttacgtgcaaagtggagaatatatctttgaaataaatactatcaaattaacgctttgggcttactcttttttagattctttgggttccgtatatgaacaatcatccaaataaacgaaagcagtatttggataatttttagccaacatttttattattacatattaaactactattgtgcttgcaactctataagtcgttagaaactcttttttattttcgaaattcctgcgtctaaacattgcttataaagttgcgagctcacatacattcataatttattgatacattttttctttaatattaataaacattttacataaaa

SEQ ID NO: 165 - protein, 2837 aa, DROSOPHILA
MGDNIIGSASFLHLGDIVSLYAEGSVCGFLSTLGLVDDRTVVCPEAGDLSCPPKKFRDCLIKICPMNRYSAQKQFWKAAKQSASSNTDPNLLKRLHHAAEIEKKQNETENKKLLGTSIQYGRAVVQLLHLKSNKYLTVNKRLPSLLEKNAMRVYLDANGNEGSWFYIKPFYKLRSIGDYVVVGDKVILSPVNADQQNLHVAANYELPDNPGCKEVNVLNSSTSWKISLFMEHKENQEHILKGGDVVRLFHAEQEKFLTMDEYKKQYHVFLRTTGRTSATAATSSKALWEIEVVQHDSCRGGAGDWNSLYRFKHLATGHYLAAEAEIDVSAGAMSATSASGHDLHLGDCSKDSGLSCSTMNSTINDKPKGKQYRLVSVPYSADIASVFVLDATTMARPDSLVPQSSYVRLQHICSNTWVHATSIPIDADDDKPVMSMVCCSPIKEDKEAFALIPVSPVEVRDLDFANDACKVLATVTSKLDNGSISINERRALISLLQDIVYFIAGMENEQNKTKALEFTIKNPIRDRQKLLREQYILKQLFKILQGPFQQHTAGDGPFLRLDELSDPKNSPYKNIFRLCYRILRLSQQDYRKNQEYIAKHFGLMQKQIGYDILAEDTITALLHNNRKLLEKHITAAEIETFVGLVRKNMHNWDSRFLDYLSDLCVSNRKAIAVTQELICKSVLSDKNKDILIETQVKALRTGSGPVRCYKGNSEDVCLATLAEDAGDDEDRSDVQSTSTTTTWDSASLNEDDGTPSTGDKYEIHLKWTGQPTSRSMADLASCDGGELEAAILNYYRHQLNLFSNMCLNRQYLALNELSPRLDIDLILKCMSDETMPYELRASFCRLMLHLHVDRDPQEPVTPVKYARLWSEIPSKMSIQDYDGKNQQPDQNKQACRAKFNTTIAFVENYLCNVATKVWLFTDQEQNKLTFEVVKLARDLIYFGFYSFSDLLRLTKTLLSILDCVSDTSSGEFASTDIDSVEEETNAEAEGGVLRSIGDINTVMTSLALGSVGQAIAAPTISLQQRKSVSQLMKEYPLVMDTKLKIIEILQFILDVRLDYRISCLLSIFKREFDESEVAASAASNEASQQQSQQQEPQTPGSSNETDPLDSAESVAAGAAAAAATTARQKNIDLESIGVQAEGIFDCERSDAANLDLDGQGGRTFLRVLLHLIMHDYAPLVSGALHLLFRHFSQRQEVLQAFRQVQLLVSDSDVESYKQIKSDLDILRQSVEKSELWVYKAKATDELGATDAGGDAVSLEYNAALSQEQRNEYRKVKEILIRMNKFCVTASGPGSVVKPRKHEQRLLRNVGVHTVVLDLLQNPYDEKDDELMKELMCLAHEFLQNFCLGNQQNQVLLHNHLDLFLNPGILEAKTVCAIFKDNLALCNEVTDKVVQHFVHCIEIHGRHVAYLQFLQTVVRAENQFIRRCQDMVMQELINSGEDVLVFYNDKGSFNHFVQMMQQQMLRMEKLSDDSPLKYHVELVKLLACCTMGKNVYTEIKCNNLLSLDDIVTIICHPLCMPEVKEAYVDFLNHCYIDTEVEMKEIYASGHMWSLFEKSFLVDINQLITNPAAASNKTLQAYVLNGVTNLLGSFFASPFSDQSAIVQSRQLIFVQLLQAAHRITQCRWLSLGDRFNVENCIRTLTESAKMRSIALPPELEQQVATMSSKTAMLTRQTTKWLLASKQPKYEAQQAASLMRWDRSIIEGLQDIVSLLEDQLKPVVEAELSLLVDILYRSELLFPAGTEARKRCESGGFIRKLIKHTEKLLEEKEERMCVKVLRTLREMMAIDVNYGEKGDALRQTLLLRYFQTKSTPRLPEDEVPLLAAPLMDPAKQNHLVTHGPGAKYLQRAGKTLHEMQNHLDREGASDLVVELVIKSVHSPNIFVEAVELGIALLEGGNPIIQKGMFQKFLSDDLNQAFFKVFFEKMKDAQQEIKSTVTVNTTDIAAKAHEHKQDTNLELDKIARKHGLKSNGVVITEELKRELHNAGLATARAYGNARNIHSGEESSAISVNSPLEDILAEKLEKHKDSRDQRNQLSNKVLVMQPILRFLQLLCENHNPDMQNLLRNQNNKTNNNLVSETLMFLDCICGSTTGGLGLLGLYINEHNVALINQTLEALTEYCQGPCHENQNCIATHESNGLDIITALILNNINPLGENRMDLVLELKNNASKLLLAIMESRGDSENAERILYNMNPKQLVEVACKAYHQEELIDEQDDGDEPDAGSDDDDATVSPREVGHNIYILCHQLAQHNKELAGLLKASEDPQSASFDAKTSQALMYYATHTAQIEIVRNDRTLEQIVFPIPEICEYLTTDTKIKILNTAERDDQGSKVADFFDKAEEMFNEMKWQKKLRSQPLLFWISSYMSLWSNILFNCVVVINMIVAFFYPFDNTVPELSSHISLLFWIITIFSLVIVLALPRESGIRTFIGSVILRFIFLLGPESTLCLLGVVTVTLKSVHIVSIMGNKGTLEKQLIKIITDFQLLYHCIYIAFCFCGLIFHPFFYSLLLFDVVYREETLVNVIRSVTRNGRSIVLTAVLALILVYLFSIIGYMFFKDDFLVSVDFEEQDNAPPPSVPLTLSVPVSGDSCSAPDDLGNCQAAKEVAPPSAGGGEVKERSCDSLVMCIVTTLNQGLRNGGGIGDILRAPSSKEGLFVARVIYDLLFFFIVIIIVLNLIFGVIIDTFADLRSEKQQKEAILKTTCFICSLNRSAFDNKTVSFEEHIKSEHNMWHYLYFIVLVKVKDPTEFTGPESYVYAMVKAGILEWFPRLRAMSLAAVDADGEQIELRSMQAQLLDTQLLIKNLSTQLHELKDHMTEQRKQKQRLGLLNTTANSLLPFQ

SEQ ID NO: 166 - DNA, 3939 bp, DROSOPHILA
caaatcaaaggctgtgatctggaaccaaaattaaggtagacataaacttctttaaaggaattgacaaaaataaaaatgctatagaccaaagttgcattttaaaattctataaggaaaaggtctccaatctgggaaacagggggttcgagataaacttcactgatgactcagtttccgaacatcaatccaacgcagccttcctaacttctagctcaattgtcgaactgctagcgatagacagagctctggactatgttctcaggataggcatttccctagtggccatcttaacagacagcatgaagagcgacattgcaatcctataacctgtaacattaaaaagaagatagttaacaatcccaatgcttgacacacattgaaatccatcacatgcctagtcagtccggtattccagaaaatgatctcgtgtacctggccgccaaaaatgcatcgaagcaaggaattttcaccgaagtaagttggaccattaaagatgtctcggtttaaatcattcaaaaagactgggaaagggaaaacgcagattttgctgcaaacaaacagcgggactactgcacacttttcccagacacattgaaaaaaccgtggttaaaaatcccaaatgtaaacttaaatctacagagatcaaaagaatcaacagacttctcagcgataacggattcgacaattatactttgaataaagtacatgttacaataacataaggggaccaagtaacgttttcgataacgtatcccacatcttaatcagctgttccaagtacaacactttccagccctggaaaaataccaagacatcaaccatctctctaaaaacgtaaacataaacgcttaacaaggcatcatagattttctagaccaaattaaaacaaacctataaatctttccaaccttccttggcactttccacatacacgaccaaataattccacgacatttacggaagttacctaaaacaaaaaaatacacaacctacaatgtgtgcatttacgaatttattggttttgctgttatttgcgaaattacaaggtattacactaattaaaaatttctagacgatatagagaaatccaaagtcaaaattgtactaatcataaatatttgcacaatgcacgcggccagttgcagtgtagctatagtcctaaggtgtacatccccttccacagttaggagcactgaacatcaaacagctcgcaaataccttcgtcgctttttaacgcaaagttgaagtcttcctgcggaggattcagctgcagcagcggcgggttttctgcaacatcggacagcatcaagttaaacagggggtcttttaaattggcaagataagaagacaaacctagattcggatcatcgggataaaatcgccgcagcgaatgaccggacagataattttggaagattatcttggccgtcagctcgttctccaaaagtttcatctcatctttcatcccgggattgcacgagtaaccgtgctcgtcggtgatcacgttccccgcgcatgctggagcgttaccatcctcgctggagtgcgacgacgtcgagggtgagggcgtgtccagacggtgatagtcaaagaacccatccacatcgtgcggatttgtagtactctttccttggttcgtcaccaggcgaatgtcaattgcgctgccattgtccagcgacacggccagctcgtactacaaaaacaatgtttcgtttgaatcccatattatacgataaatttagatatttcttcgttgaaagaaatgggaaacctcgaaagctagtttaaagagctccgactggtaagatacctacatgattacgcttgatatctacttcctcgtcataattaggtattgtgaatacggaatcatctccaaagatgtccagcagatcatcacgtgtcacatatgcatacgacctattcgagggatcctgcataacgtagcgcagattgcgctgtgcatactccagttgcctgtctaggtcatcctccaacattttcaaatgattagtccggctacgtgccaggtcgtagttctcttggtccttggcattgttaaagccccctccgctggaaaatgcacattatcaataatttatcaagaaatatttatgtggaatcatactttgaagatgatcaaagtaaattccacctgtttgtactgtattaagtattaagtgctaaagggcgacttccaccccattttgtttaattttgttgtcactaacatttttagttctaactaaaatgtttcataaaatgtaaggggctcttaccgccagcgcactagggagcagtgtctgcccttatcaattagtccaatgccctctaaaacattggtaatatcgtatattcggcgcttctgtacgtccaagattttggttgcctgcagaggggaaatttggacgatgttaaggtagagtacttaatgcttggccgtgttagtaccgctttcaggtcgatggatccttcgttggccttcacgagatccacaaacttctgtgtgagcaggaccagtgagcccacggagcgctgttgtccaggctgcgattgcgattgtgaattcgacggagacttgattggcgttggaggatccggtgatgtgtccatgctaacgggtgtagactcgtagctctgcgaccggaccgaagtctcagccgaatccaccttcatcatcatagccgaggaggtggtgcccgctgcggagctgtctcttttaacaatactcgcggttttgcgcttgtacatggtccgcaatcgactcgatgactatactcctgtccttgtaactctttgcgtggctgcactcaatatgcagcgatcaagaagccggaattaattgcactttggagcgaaaattaaacgaaaatacgaatgttggcgctaggtttgctttccgccatttatgtcatttttttcattctccctctattcttcgtgcgcactgcgcagtgtggcaaagcgacgctgccacgacgatagtaaatcgattaatcgatgcttgcgcacatttcaacactatattttaaacaggtaaacatttttaatattttgatctttaatttcaattaattttcatttaaattctgtatttagtttagtctgcagtccaacacacagatcatccaatgttttctacttggtcttcaaatgtatcatcacgaataaataataattattttagtactccataatatttagccattcgttaaggtttattgtccgataatattggcgacaacttttaaatgaaattgggtcttttttaggtttcaaattaaaagcattaaccctttgaaggcgcctgtgctagtcttgatcgtttacagagcatgtatagcacagctggaagttttcttaagagtgcccatgaagatggagttgagcttgtttgtcagtagggtgaatttaaaattttaaaaagatcaacttgataacgaaggattgttttaactttcaacagtaatttaaatatttactttaaacatcgcataaacacgagggcgcgccacgttttctagctaggctgaacgatgatttgcagcactggctttccccatttgttgtgctcggtcattctgcttttgaaaaaaattaaatgtgcctgatggtttcgccctagtttttaaactcaaaggacttctactatattagattcaaaaataaataaggaaaatgccatccaaatcaaagccgagactttcgcgtggtgtcctggacatgaagttcatgcagcgcacaaaagttaaagtggaaaaggaggcagacgatgagcagagcagggcactgtactccaacgagatcaaccagaagatgctcaattccacctcgaattttgtggtggagtccagctactcgatatgcgccggcctgatagacggacgcctcagtttccgcggcatgaatccggagctagaacttctcatggagcaggat

SEQ ID NO: 167 - DNA, 1484 bp, DROSOPHILA
aagaatagagggagaatgaaaaaaatgacataaatggcggaaagcaaacctagcgccaacattcgtattttcgtttaattttcgctccaaagtgcaattaattccggcttcttgatcgctgcatattgagtgcagccacgcaaagagttacaaggacaggagtatagtcatcgagtcgattgcggaccatgtacaagcgcaaaaccgcgagtattgttaaaagagacagctccgcagcgggcaccacctcctcggctatgatgatgaaggtggattcggctgagacttcggtccggtcgcagagctacgagtctacacccgttagcatggacacatcaccggatcctccaacgccaatcaagtctccgtcgaattcacaatcgcaatcgcagcctggacaacagcgctccgtgggctcactggtcctgctcacacagaagtttgtggatctcgtgaaggccaacgaaggatccatcgacctgaaagcggcaaccaaaatcttggacgtacagaagcgccgaatatacgatattaccaatgttttagagggcattggactaattgataagggcagacactgctccctagtgcgctggcgcggagggggctttaacaatgccaaggaccaagagaactacgacctggcacgtagccggactaatcatttgaaaatgttggaggatgacctagacaggcaactggagtatgcacagcgcaatctgcgctacgttatgcaggatccctcgaataggtcgtatgcatatgtgacacgtgatgatctgctggacatctttggagatgattccgtattcacaatacctaattatgacgaggaagtagatatcaagcgtaatcattacgagctggccgtgtcgctggacaatggcagcgcaattgacattcgcctggtgacgaaccaaggaaagagtactacaaatccgcacgatgtggatgggttctttgactatcaccgtctggacacgccctcaccctcgacgtcgtcgcactccagcgaggatggtaacgctccagcatgcgcggggaacgtgatcaccgacgagcacggttactcgtgcaatcccgggatgaaagatgagatgaaacttttggagaacgagctgacggccaagataatcttccaaaattatctgtccggtcattcgctgcggcgattttatcccgatgatccgaatctagaaaacccgccgctgctgcagctgaatcctccgcaggaagacttcaactttgcgttaaaaagcgacgaaggtatttgcgagctgtttgatgttcagtgctcctaactgtggaaggggatgtacaccttaggactatagctacactgcaactggccgcgtgcattgtgcaaatatttatgattagtacaattttgactttggatttctctatatcgtctagaaatttttaattagtgtaataccttgtaatttcgcaaataacagcaaaaccaataaattcgtaaatgc

SEQ ID NO: 168 - protein, 370 aa, DROSOPHILA
MYKRKTASIVKRDSSAAGTTSSAMMMKVDSAETSVRSQSYESTPVSMDTSPDPPTPIKSPSNSQSQSQPGQQRSVGSLVLLTQKFVDLVKANEGSIDLKAATKILDVQKRRIYDITNVLEGIGLIDKGRHCSLVRWRGGGFNNAKDQENYDLARSRTNHLKMLEDDLDRQLEYAQRNLRYVMQDPSNRSYAYVTRDDLLDIFGDDSVFTIPNYDEEVDIKRNHYELAVSLDNGSAIDIRLVTNQGKSTTNPHDVDGFFDYHRLDTPSPSTSSHSSEDGNAPACAGNVITDEHGYSCNPGMKDEMKLLENELTAKIIFQNYLSGHSLRRFYPDDPNLENPPLLQLNPPQEDFNFALKSDEGICELFDVQCS

SEQ ID NO: 169 - DNA, 5746 bp, DROSOPHILA
atatcactggcaataaatttacaacaaataatttaactttgctaaaaatacctcaatgcattacaaaatgattttcgaattctcaattgcattttggctttaactttaattttattttgccaccttttgattacctagtgacataaattttgaaaaatatatttacggatcatatatcaatttatattttatacacgcagtcggtcgaaatttccatttcattatacacttgttgaatttacccgccttaattaattaataatgcaatgcaatgcagattttgcagccgttaaaatatttgttgaaatcaacactttacgctcagcactaaaaaatcaattaagaaagccacaatctaaatgatacggttaatacggcggattatttttcgcttcggtctcttttttgtactttatgaaacgcaataaaatttgttggaaacactcatttaaatcggcgtaacatgcaggcgatacattgaatattcataagatcgatcttcggatgggtcgataaatttcacattttggggacttcggagtgaagcagttgccgtcgcagccacaataacactgatatcgccaacaacaattagcataacatttttaaatttatggttcaatttttgaataagagcgaatcggagtcgaaaaaatcgaaaacgaaaacaaaacaaatccccgcgcgaacgaaactcgtcttttgtgcggctattgaaatttgttaatatacataagttaaatgctgcagctaagaaataaaacagaagccgccgggacatttgccagatttattgaacgatttcatttgaaggcacaacaaaagaagaaacaaatccgacgggcgctacgatatcagatcagatcgcatatgtagctagacctgatccggttctcaggtctgagtgataataaaaagaatcaccagtattttgcatagaaaacttgtcccacacaccaatgatgaccatgattttcattttatattcccgctctcttccagactgagctgcgttcctgcgcagcgtgcggggaacccatctcggatcggttcttcctggaggtcggcggctgctcctggcacgcccactgcctccgctgctgcatgtgcatgtgccccctggatcgccagcagtcctgcttcatccgggagaggcaggtgtactgcaaggccgactacagcaagtgagtataggacaactttaaaatcaaatatatatattcatataaatctagaacctattctagatgtgctctaataccaagttaaagtctagaaacatttgcccatgatttcaaatagattttccaccgcatggaatttcacttcttttaaaattaactgcccccttgaactttcgaaaagtttcaattgattttccaactcgattgtgtatgtgcacaagtgttttccgaatagtttcccacacatcttctgtccacctggttaattgtaattgtaacaattcgacagcgtttgcgacataatccataaagtcaacagcgacaaagatgcggccaaaacgtaacgaaatggaatgaaaactttacgggtagagaatgcaagttgcaagctaaaaatgtatctggcagatacaaaaaaaactcagggggggaaacgtaggaaaacggtgtcgacgtcgaacgaaatgaaaataaacaaacagacacgccgtgagatgctgtaaaaatatttatttttcaagttaagaattttaagtgtgcattgcccgatggagacatcatccagcttcggcttcaccatcggcatcccatcgcatcggatcgcattggatctgaacccatcccgagaaaacccatcaccaggcacatccgagtcatgctctggccttacattgttgtggctgttgtaaaaataagcttaaaagctaacaataagccaccgaaagttgccgactcatttggaaaaacgtttgccagggcagccacttccgcttggaaagcgctccggcatacaggaaaatactcaaccatatcggattgatagagatgcctccgttttctcccatatctaaatgtgcatttgattcaaattaaacatcatttgcatttgatactactatttactcttacttttgaatgaatattgcagcacggagtgcgtttaatagctcattaatttatttaaatactcacgatgtatttttcaatttgtatcactaataagtaagccccactgattgctatttcctttcgtttaattgcagaaatttcggcgccaagtgctccaagtgctgtcgcggcatctccgcctcggattgggtgcgtcgggcacgggagctggtcttccatctagcctgctttgcctgcgaccagtgtggacgccagttgtccaccggcgagcagttcgccctcatggatgaccgggtgctctgcaaggctcattatctggagacggtcgagggtggcaccacatcgagcgacggttagtattctactagggctttactcactacgagtacgaacaaaactggggggcataaaaacaagttggaaacatgctgcacgcttcaacggcagaacggttaccaattcgggacgcttcactgtgaacggtacagtgaagctgcgccagagctaagcgccagccagtcgccactgacgaaatcgtgtcacactcgtaaaaaacaactcggcagttgatttctttccttctctgagacgacgtgatcggcttgtgaatgtcgtagccgagttccccaacccaaagaccccatctgcagacccctgaaaaaccccatctcctccccggatggggcagaccaccgtgtccggtcaaagtggccacataaagcatggcagcaacaacagcagcagctctataaaccataaacactttttgacgttttcaatttggccgactgtcaaaatgcttttacaccaggcctagagtcactgggaacttttcagttaaaggcctttatggcttacacgcacttgagactgctcagaattcccttcatgacgtgccattctataaatattgcaattaaaataaattttagatttgctatgtaagattttcaagatatgtttccattagatcaaaaaaaaaatcatttactataaattttaaataaacgtttgacaacgaattaaactggcaggatctagtttgtgtacatatgatactctaccttgggcaacttcatgaatactttaggtccagtggtaattgcatttctgatctccctcttatttgatttcgatttttatttttcccattccagagggctgtgatggcgatggttatcacaagagcaagacgaaacgggtgcgcaccaccttcaccgaggagcagttgcaagtgctgcaggccaacttccagattgacagtaatccggatggccaggatctggagcggatcgcctcggtgaccggtctcagcaagcgtgtgacgcaagtatggttccagaactcgcgggcgcgtcagaaaaaacacatacatgctggtaagaataaaagtaagtagtggattagtgccgcatgcatcctcccagtccctgtccaacccgcagatcctcctctagagtatccctagaaaatgtagaacccgaccgtccagtaatgagtagacaacaattcccccaaacatgaaatccttacgagccgccaacacagtacttacaatttcttctgttttcttctactttcaacaaacgatttttgattgcagtacgcgaaccggaaggaagctcatttgcgcgtcatattaacctgcagttaacgtattcatttcagaataacgcacagaacccaatgcatttgaatggctctaaagcgggtctatacccgactcatggtaagaaatcatatactttcggttatatatttaaagatcttcaaatagggattgctgtttatttaagcaactatgcataacaaaaagagtactatctaacaaaaggacattacccttgtcttcttacagaatcctctatggatgaattgtcgcaggactccagtgtacactgtatgcccagcgaggtgtgactggagcaatcctcgccagctcgagcacatcgctagatggctggacacccacaaaacgtcctttcctagtcaaaatttatgtaatgcgtctacacgaaagcagtttcgattcgatccggagaaaaattgaaaaataatgaatccttcaacatcatacaaagcagtcccggtttttaggctttgagcaacccgaacgaaccacccaacgtcaacacagtgaaatctcatcataaaagacacagcaaacaaacaaacaaacaaacattcctgcattgtagtctaagaaactgcagcttagttaatttaatttaaatgaaatttaaatttaatttagtttaatgttcagtaaccgataagtgtttcccacatcattcaactcgaagattgataactgcttgccaaggctcctgtaatatatttatgcgtatgcctaaccaatcattgtcgtatatttaccatgagaaacgttgttattgtttattttcttgttttctaaatgtataaaaattgatttaaatatataaatatatatatataaacttagttctatagtcgtaccctaaatataactcgccaggcaatttgtatatagtaatgatagccgaaattgataagcaacgcagaaaacacagctaaaaactaacatttagttaacaaaaattataaaatacaattaaagatgaaccgaaatcaattaaaaaagaaaagcaaattaaagagaaaacaactttttcaaaaacaaaaacagactggtgttgtaaattaatcggaagtggagagggatctacttaaaaggatcatatgtcaaaggacatatcatttgttcaaacttttactatgccattagtgaatgtattcttgagtgaagtgtgtatgtagctctttgttatttgttttgctattagctaacttctattgattgaaatcttctgctaataccttaatttctatcaatttgatcgtttgctaatgccaaacaatctctttgggcaacactcgaaaacgatttccggtgcagctcgatagctcgatcgttcgatcatcaacctgtgccccaccaaccaccagcgatctttggaagaagcatctgccgcagacagtgtgacgactacttttgagtccgaactgcaagatccgcgttcggatcacatgcacacggtttgtgggcactcgaggtgccagtcatgtggctggattctagtgttgcacttcaggttgcgagctaagtgcatcgagagagaaccgaaggcattaattgaattataagcctagattatgcagaggtttcctgcccaacatccagctgttcggataaagcaatttgtgtggaagatcatcgcgatgatcatgcttattgggatcgagagtggataaggtattggggatttggattcgggttcgggttcgggtatttggaatgggaattgaaatgggcatgactgggcaggctctgggtactgcacttgtttgtaattcctgttgttggtttataattgtgcgatcgcattgcagacgaaaagggctttccatagcacgttacaaaaatatcaacaaatcgtcatcattaataatgatcactccgggctatggttgctactacacagagagcaaaaaatgttccaaatagctattaaagttatggatttacttctaagatagagtatcaattaggacccgaaaggtaaaaatccagtgatatttttaaaacgttcttatgtgagtttcaatactgc

SEQ ID NO: 170 - DNA, 1431 bp, DROSOPHILA
agactgagctgcgttcctgcgcagcgtgcggggaacccatctcggatcggttcttcctggaggtcggcggctgctcctggcacgcccactgcctccgctgctgcatgtgcatgtgccccctggatcgccagcagtcctgcttcatccgggagaggcaggtgtactgcaaggccgactacagcaaaaatttcggcgccaagtgctccaagtgctgtcgcggcatctccgcctcggattgggtgcgtcgggcacgggagctggtcttccatctagcctgctttgcctgcgaccagtgtggacgccagttgtccaccggcgagcagttcgccctcatggatgaccgggtgctctgcaaggctcattatctggagacggtcgagggtggcaccacatcgagcgacgagggctgtgatggcgatggttatcacaagagcaagacgaaacgggtgcgcaccaccttcaccgaggagcagttgcaagtgctgcaggccaacttccagattgacagtaatccggatggccaggatctggagcggatcgcctcggtgaccggtctcagcaagcgtgtgacgcaaaataacgcacagaacccaatgcatttgaatggctctaaagcgggtctatacccgactcatgaatcctctatggatgaattgtcgcaggactccagtgtacactgtatgcccagcgaggtgtgactggagcaatcctcgccagctcgagcacatcgctagatggctggacacccacaaaacgtcctttcctagtcaaaatttatgtaatgcgtctacacgaaagcagtttcgattcgatccggagaaaaattgaaaaataatgaatccttcaacatcatacaaagcagtcccggtttttaggctttgagcaacccgaacgaaccacccaacgtcaacacagtgaaatctcatcataaaagacacagcaaacaaacaaacaaacaaacattcctgcattgtagtctaagaaactgcagcttagttaatttaatttaaatgaaatttaaatttaatttagtttaatgttcagtaaccgataagtgtttcccacatcattcaactcgaagattgataactgcttgccaaggctcctgtaatatatttatgcgtatgcctaaccaatcattgtcgtatatttaccatgagaaacgttgttattgtttattttcttgttttctaaatgtataaaaattgatttaaatatataaatatatatatataaacttagttctatagtcgtaccctaaatataactcgccaggcaatttgtatatagtaatgatagccgaaattgataagcaacgcagaaaacacagctaaaaactaacatttagttaacaaaaattataaaatacaattaaagatgaaccgaaatcaattaaaaaagaaaagcaaattaaagagaaaacaacttttt

SEQ ID NO: 171 - protein, 195 aa, DROSOPHILA
MCPLDRQQSCFIRERQVYCKADYSKNFGAKCSKCCRGISASDWVRRARELVFHLACFACDQCGRQLSTGEQFALMDDRVLCKAHYLETVEGGTTSSDEGCDGDGYHKSKTKRVRTTFTEEQLQVLQANFQIDSNPDGQDLERIASVTGLSKRVTQNNAQNPMHLNGSKAGLYPTHESSMDELSQDSSVHCMPSEV

SEQ ID NO: 172 - DNA, 3859 bp, DROSOPHILA
cgccgtttacgggctagctcactctgacgagctgcgcggcatccggaagcagatctatccccagagactgccaagattctatccctttctcaagccacgaccgctggtcttccgctctaccgaggttgacaaggtgtgtctaccttttcccggctccgaccgctcggtggtaatgaggtcccagcgcttcctctacgaccaggacaagaaacgtccggtccagatgcaggcctacgtgggattttcgtcttggctggtcgccggcggtgtcatcttttttgccaccatcttcggtctgctgtcaaagttcaagctgggacgtacgctgctgctcaattaccccggtctcttctccggcggattggcctctcgttccggcccaagtgaggagtcaatggagcgcacctatttcaagatgacttttaaggccagtggctggcttaagagcgatcgcctggccgagagttcaaaccaatacacggagtccccgaccaagacgctgatggtccgcgtatcgggcatgaatcccggatatggagccacctgcgtggctgtgctctcagcggcactgaccattcttcgtgagtcggacaagatgcccagcacaggcggagtgctgcctccagctgccgccttctctaagaccggactaattagcgagttggagaagcacgaccacggcatcaagtttgagattctggccaacaagtaatgtccagaatcgcacttctccctcccagcggctctcttttaatcaccttacttggctgtttgttactcgcggtttgaactgtaattatataagcacttattaaactaacccccacatccgctgctgttgttgccgatttcaaagtccaggcgaaacgggttagatctaattcagtgaattttgcacctcagaataaattaagatgcgaaaaacagattttcctaccttaaaatgtaaatattatcttggctaacatcgccaggtgcaagtcgctatgaacatgactttctgatttcaagcggtttgattcgtatattcgactaaattttaattaagatttttgtattttacaaagacgtaagaggggattgggtttcagaagtttttaaaaggaaccgtaatcgacttgttgctttcgtttgctctttctaaacggccttatatagccttaaaagtgagaaaccctttggattagttctccaatatattaatacaatacttcttactacttacttccatcaagagaacacagttaactgaagtgctattactttataagcaggttgaatgtctggtttggagcataaatctggagaggattcgcagcgtagacggtcacgggcagattccataccatcgtctccacgggcatttcagacggtgcttttagctcgccggactccggattcggaatgccaaagtcaatcaaagttgtggtcacaaactcgaaatgcaatcgccatcgcacgtcgacgaggtctgtgcggaatgtgggtgttacgtgcagcggaatgggtaccacgacctgggtctgcagcgttgcgtagcacacttggtgggaggtggaaatggtcgaaagtttcccggttggctcaggcgcctccttaacctttgagctagccgatgtggccgacttgtggaggttatctgccaacactccgctagctatgctggccatatcaaaggagttcatcgaggagacatcatcgcccgtcgaggattgcgactgcagctggtgattttgcactggttgcggtcggatggaaagctcctgctgctgcagctttaccgaaaactggacgcagcgcacctggtaagatgcagtaggattttagaaagcgcattatgagtaatgacaaaaaaaatcaccaacctttcgggggttaacgccgggatcaaagtccaggctgcccacaatgtcctcaccgagcttatacgctggcttgaacaaacaaaagcggccaacgaagccgcgtttgttcgagatgcggtagaacttcggcgcccgccgagcggttacgttctgaaagacacagagcagaggacattgacaaggtacagctgcttatgggatctagatttccttgccttaaggtggtgccacgatatctcaagctcgctgatctcgcgcttttccaggaacggattagtgggcgccagctcttcgttggtctctacggttacgggaagttcgtcgggccgcgaaattatgggaattggcaacacccggatgggaacggccagcgtttgcaccttggacttgacccgttgcgtagcaatggtgatcttgtagaagtaccggatgttgtggcctctgtacgtgggtgggccatcgcggggaatgaattcattgaaaaagtctgcaaggcgacttgctcgttagtaaaaccaaaaagctaagaagtagggcaagctcatcactcacacatcttggtctctccaggctggaggcgcaggtcgcagaagaggatcttgggcttggtggccacaatcacctctcccggcgcctgcgtcaccgcatccaaagccgtcctgccgatcatctccgtgagctccgcggctcggtcgcccgcggatgtagagtagctagttttccggtagcagtgcagctgcgccgaggcccaggccaggttctcctggcttctggtcggttttgcatggtgaatcaagggaagaaaaacagttaacaacagctcggctcaccttgcttcgttggcattgtggacagcctgcgacgcggctggctcgtcggagaacaccttgtgggtgaactcgatcaggcactggactctctcgcccgtggcgtagatggccgagtccgcacgcagcagtttcgccttaatttcaatcatttatttacttttttatttggtcgcgactcccgtagagtgaccgtctgcaggaattgttcgataggcccgccgatagcgatagcagccgtgcgcgtacgccaaccactttttaaatgtcccacctctgataagtcgtgttactgaatttaaattttctttttactctagcagaatcccaggtaggccttgggtataagctcgaaacattgtcattgctgtcgcgcacgagaacaaccagtattcagctatattttataaaatccacgcattatgttcaacggcttaccaaccttgatgaaatacccagaccgatcgccttttctgtgcggtcccagcggatttacattcgacaattgtctgcggtgagttggaacacagttacacctaatggccagcaagccatattcaacacccaaccttttacaaaccaaccttattcaacgaatgacaaaggaaaacatttcgtttgttaataattagttggttaatagttctagtggcacaactttgttgaaaaaaattgggtaagcccgctcttttgaaaaatgaatcaattcattgcccattgatacacgagataagcattttggctcccctaagattcaccgaattcccatttggttgaaagagatggcatttaggtttgccaatgtttgaatcgcaatatttaataaagagttgctgacacggggtatcttgtagtgcagccacttcgctgtggcgacttttgcttatgtgttcaattctcgtccgcagcaacaaacaactaaaagagaatggccttgaggagccgaatagctttactactggcaccactgtggtgggcatcgtgttcgacggcggagtaatcataggcgccgagtccagggctaccagcggcggcatagttttctcaaagacgtgccgcaaaattattgagctgcaggccaacattttgtgagcatctagctatctatgagtacgccatagacataatataatggtaccttgaaaccacacagtgccgcgggagctg

SEQ ID NO: 173 - DNA, 1612 bp, DROSOPHILA
taaaaaagtaaataaatgattgaaattaaggcgaaactgctgcgtgcggactcggccatctacgccacgggcgagagagtccagtgcctgatcgagttcacccacaaggtgttctccgacgagccagccgcgtcgcaggctgtccacaatgccaacgaagcaagccaggagaacctggcctgggcctcggcgcagctgcactgctaccggaaaactagctactctacatccgcgggcgaccgagccgcggagctcacggagatgatcggcaggacggctttggatgcggtgacgcaggcgccgggagaggtgattgtggccaccaagcccaagatcctcttctgcgacctgcgcctccagcctggagagaccaagatgtactttttcaatgaattcattccccgcgatggcccacccacgtacagaggccacaacatccggtacttctacaagatcaccattgctacgcaacgggtcaagtccaaggtgcaaacgctggccgttcccatccgggtgttgccaattcccataatttcgcggcccgacgaacttcccgtaaccgtagagaccaacgaagagctggcgcccactaatccgttcctggaaaagcgcgagatcagcgagcttgagatatcgtggcaccaccttaaggcaaggaaatctagatcccataagcagctgtaccttttctaccgcatctcgaacaaacgcggcttcgttggccgcttttgtttgttcaagccagcgtataagctcggtgaggacattgtgggcagcctggactttgatcccggcgttaacccccgaaaggtgcgctgcgtccagttttcggtaaagctgcagcagcaggagctttccatccgaccgcaaccagtgcaaaatcaccagctgcagtcgcaatcctcgacgggcgatgatgtctcctcgatgaactcctttgatatggccagcatagctagcggagtgttggcagataacctccacaagtcggccacatcggctagctcaaaggttaaggaggcgcctgagccaaccgggaaactttcgaccatttccacctcccaccaagtgtgctacgcaacgctgcagacccaggtcgtggtacccattccgctgcacgtaacacccacattccgcacagacctcgtcgacgtgcgatggcgattgcatttcgagtttgtgaccacaactttgattgactttggcattccgaatccggagtccggcgagctaaaagcaccgtctgaaatgcccgtggagacgatggtatggaatctgcccgtgaccgtctacgctgcgaatcctctccagatttatgctccaaaccagacattcaacctgcttataaagtaatagcacttcagttaactgtgttctcttgatggaagtaagtagtaagaagtattgtattaatatattggagaactaatccaaagggtttctcacttttaaggctatataaggccgtttagaaagagcaaacgaaagcaacaagtcgattacggttccttttaaaaacttctgaaacccaatcccctcttacgtctttgtaaaatacaaaaatcttaattaaaatttagtcgaatatacgaatcaaaccgcttgaaatcag

SEQ ID NO: 174 - protein, 445 aa, DROSOPHILA
MIEIKAKLLRADSAIYATGERVQCLIEFTHKVFSDEPAASQAVHNANEASQENLAWASAQLHCYRKTSYSTSAGDRAAELTEMIGRTALDAVTQAPGEVIVATKPKILFCDLRLQPGETKMYFFNEFIPRDGPPTYRGHNIRYFYKITIATQRVKSKVQTLAVPIRVLPIPIISRPDELPVTVETNEELAPTNPFLEKREISELEISWHHLKARKSRSHKQLYLFYRISNKRGFVGRFCLFKPAYKLGEDIVGSLDFDPGVNPRKVRCVQFSVKLQQQELSIRPQPVQNHQLQSQSSTGDDVSSMNSFDMASIASGVLADNLHKSATSASSKVKEAPEPTGKLSTISTSHQVCYATLQTQVVVPIPLHVTPTFRTDLVDVRWRLHFEFVTTTLIDFGIPNPESGELKAPSEMPVETMVWNLPVTVYAANPLQIYAPNQTFNLLIK

SEQ ID NO: 175 - DNA, 4160 bp, DROSOPHILA
cgtgcagccctggttaatatttgttgttttaaacgttgcagtcaaatgatttttaaacaattaaaaaaatgccttttgtccgaccgctggtgaccgtggtgcgggccgggcggcatagctattcagcaggattacagctacagcaacgtcttgcaaggtccaaccagatcctgaatccgccagcggagttccgaaactacctggtgcttcaggagcacgacccggtctacacagtcggactaaggacaaaggactatacggcgcaggatgaagaccgactccgccggctaggagcagacttccatcgcacagatcgcggtggcttgatcacatttcacggccccggccagttggtggcctatcccattctgcacctgggtcagttcgtgccgagcatccgctggtacgtggcgacgttggagcggatggttgtcgaggcctgccaccagatgggcatttccagtgccaaggcgaccaaggacaccggtatctgggtgggtgacaacaagatctgtgccatcggtatccacggctcgcgttacgtcaccacgcatggaatcggcctcaattgctgcacggatctgcagtggtttgagcacattgtgccctgcggaatcgaaggcaagggggtcacctcgctcagcaaagagctggacagacattttcctgtcgaggaggccagtggcgcactcctcaatagtttcgctaaagttttcgaatgccgccttcaggaacacgccaaaaaaccagcaagttctgctgaaatcggataatatggttatttggatacatatgatgtataaaggaccgccaagtttatttcaacatttataatttaaattatgcatcaatacatatttcctggccttctgttatctcaacttttacgaaatggaaatttgtaaactagatttatgtatttcataaaatattaaaataacattataactatatacatatatagactcattgtcaatcgtatttatctatttttttttttgtccaaatctgaatcaaaatcttcgaaatgtatgccatacaagaaaactcagcgacacacagccaacaaaaaatttggcccgaatcgaagttatatcttactataaattacacttcaatggagatcacataaatcgagctttattcaggtcacactttttggagcgcccatccgtaggaatctttccccgtgcattcatctccacacgagcctgttcccgcagctctgccttccgcattcgacgctctttgcgtgactccagagcattattaaagtaccgatccctgaagtcctgcgagggcgttggcacctgttttatgctgcacaataagggttctgttggactatactcgaaacacttttcataggtgagtagccgcctagctgtattcccagtcaattgctgctcagagttagctatcaggctcagatgctgatgctgtggcagcatcttcgggtcgtagtcctcgctgtgaaagggtatccagcagacaagacgtcctcccagttttaggtgcctcgcagagaactcgagaagatccccatagagactctgcaaggaatagtgcgacgttgatgggtaatgcaccatgctgtcacttctagtgttggcctttacgctagcctttttctccaccttttccgtggcctctcttattccatagggagcttaaattaccaaagaatgaacattttaagtttggtataaaaaagaataaacctacgatctgttattatgcagtcgaacgagatgcgggaatgccacaccgggttggagaaatcggccaccaccacatccatgtagcgatcagcgcagccgtactgcttcaagttggcccgaatgctctcgtccttctcccgcactttttgggttatccggctcggccggcagcgggcgtgcaccatcatgtagtctatgtccgctcccaggacatacccgccccacttggcggcgcttaccaaaagcgagcccgttcccacaaacggatcaaataccagatccccattgcgtaccatcgcttggttggccattagcaggctcagctgggcgtccatgctggtgttaccgataaacttacgatgcttcagcgaaagctccttgatcaaatgccgctgaccatgggccatcagccgaccaaacagaatgtcctccggctcaggtggcacagccgttggatccaagccccaaaactcgatgtaccaccactccaccacgggtttctccagattgaccgttccctctattggcaggtaatccatggactcgattttctcaaccttttccctctggctgaagtgcttgttgtaggtctccacaacgatcttaaaactggcatccacccgaaagtattccgcaagcgaatgccagttcgcggtaacatgattccgtagcctctggtgaaactcgggtaatttgttggagtgggcgtagagctcgaacatggcgcgcaacgaaacggacctggatgcatatagcaacgcagtatccgtgtcccgaaattcgaccaaccaaaatggtttctgtaataccgaaattaaaaaatataaatataactatatatgctgatgcttctatactacagaagtatttatatatgtgtcgcaagctctaaaaataatgtaatcaaagtatcctacactaaaaacatctaacaggtacgcggatcgtattcgtaatgtatgtataccaggtatcaggtatcctttcgaaaccttttaggttttgtagttcctgagatctcaacgatcgtatataatttatagctagtaatgctaaatttctacctgttgaaaacacttttgaaaatatagtttactattttcttcctcttacaaatacatataaaatttttttacgttaaaaatattaaacatattaataaaattccaagtttggatataacattaaaccacaggttttaaaagttataggggaggtggaatttgttaatcttgcgttttcaaaattctggtactaaaacactttaccctggtgtgttctgtaagccgccggacctgaagtccaaacattttgaccagcgaatcaaactcctgcacgcgaaagtcgacatgctcctgggcgaaccacaagataaacttcctccagttgaccatgtcgctattttaattaatgaattgtttatttatattctagagcgacttcattactcctcgtgttattgctgtgagctagcggagttgcactgcgattagctgaccatcggcaactatcggcctgaactatcgataacgcagccaggtgtagccctgcgtgccgtcgactcggccattttgcattaatattgcagccacacgtaggcgagccgaagatttatacaattttcagcagccccaggtctcaaaacgctccagacctgctatcaaaatcaacttgaagtgccgccgcaagtaagtaaagcgatcggaaatggcccgctatacgcaacgtccggaaaacgccctaaaaagggctaatggtgagtgctgaaaattttccatgcggtgtctgaagagaaactttcgtcttcgcgaatcgtgtgctctcttaactcgacgccgctctcttcgtcacagagttcattgaagtgggaaagccgcttagggcgctggacacgctgcaggaagttttccggaacaagcgatggaactatgcctactcggagacggtcatcgaaccgctcatgttcaagtacctgtacctctgcgtggaactcaagaagtcgcacatcgccaaggagggactattccagtaccggaacatgttccagctggtgaacgtgaactctctggaaaatgtaatccgcggctacctgaaaatggccgaagagcacacagaggctgcccaagcccagtcctcggcggccgttgctgttctggagctggatgacctggacaacattgccacgccagagagcatcctaatgagcgcagtgtgtggcgaggacgcacaggaccgctccgaccgcactattctgctcccgtgggtcaagttcctgtgggagtcctactgccagtgtctagagctgctgcgcgtaaacacgcattgcgaggcgctgtaccacgatatcgctcgcatggccttccagttctgccttaagtacaaccgcaagagcgagtttcgccgcttgtgcgacaagctgcgcaaacacttggaggacat

SEQ ID NO: 176 - DNA, 1636 bp, DROSOPHILA
tcgctctagaatataaataaacaattcattaattaaaatagcgacatggtcaactggaggaagtttatcttgtggttcgcccaggagcatgtcgactttcgcgtgcaggagtttgattcgctggtcaaaatgtttggacttcaggtccggcggcttacagaacacaccaggaaaccattttggttggtcgaatttcgggacacggatactgcgttgctatatgcatccaggtccgtttcgttgcgcgccatgttcgagctctacgcccactccaacaaattacccgagtttcaccagaggctacggaatcatgttaccgcgaactggcattcgcttgcggaatactttcgggtggatgccagttttaagatcgttgtggagacctacaacaagcacttcagccagagggaaaaggttgagaaaatcgagtccatggattacctgccaatagagggaacggtcaatctggagaaacccgtggtggagtggtggtacatcgagttttggggcttggatccaacggctgtgccacctgagccggaggacattctgtttggtcggctgatggcccatggtcagcggcatttgatcaaggagctttcgctgaagcatcgtaagtttatcggtaacaccagcatggacgcccagctgagcctgctaatggccaaccaagcgatggtacgcaatggggatctggtatttgatccgtttgtgggaacgggctcgcttttggtaagcgccgccaagtggggcgggtatgtcctgggagcggacatagactacatgatggtgcacgcccgctgccggccgagccggataacccaaaaagtgcgggagaaggacgagagcattcgggccaacttgaagcagtacggctgcgctgatcgctacatggatgtggtggtggccgatttctccaacccggtgtggcattcccgcatctcgttcgactgcataataacagatcctccctatggaataagagaggccacggaaaaggtggagaaaaaggctagcgtaaaggccaacactagaagtgacagcatggtgcattacccatcaacgtcgcactattccttgcagagtctctatggggatcttctcgagttctctgcgaggcacctaaaactgggaggacgtcttgtctgctggataccctttcacagcgaggactacgacccgaagatgctgccacagcatcagcatctgagcctgatagctaactctgagcagcaattgactgggaatacagctaggcggctactcacctatgaaaagtgtttcgagtatagtccaacagaacccttattgtgcagcataaaacaggtgccaacgccctcgcaggacttcagggatcggtactttaataatgctctggagtcacgcaaagagcgtcgaatgcggaaggcagagctgcgggaacaggctcgtgtggagatgaatgcacggggaaagattcctacggatgggcgctccaaaaagtgtgacctgaataaagctcgatttatgtgatctccattgaagtgtaatttatagtaagatataacttcgattcgggccaaattttttgttggctgtgtgtcgctgagttttcttgtatggcatacatttcgaagattttgattcagatttggac

SEQ ID NO: 177 - protein, 460 aa, DROSOPHILA
MFGLQVRRLTEHTRKPFWLVEFRDTDTALLYASRSVSLRAMFELYAHSNKLPEFHQRLRNHVTANWHSLAEYFRVDASFKIVVETYNKHFSQREKVEKIESMDYLPIEGTVNLEKPVVEWWYIEFWGLDPTAVPPEPEDILFGRLMAHGQRHLIKELSLKHRKFIGNTSMDAQLSLLMANQAMVRNGDLVFDPFVGTGSLLVSAAKWGGYVLGADIDYMMVHARCRPSRITQKVREKDESIRANLKQYGCADRYMDVVVADFSNPVWHSRISFDCIITDPPYGIREATEKVEKKASVKANTRSDSMVHYPSTSHYSLQSLYGDLLEFSARHLKLGGRLVCWIPFHSEDYDPKMLPQHQHLSLIANSEQQLTGNTARRLLTYEKCFEYSPTEPLLCSIKQVPTPSQDFRDRYFNNALESRKERRMRKAELREQARVEMNARGKIPTDGRSKKCDLNKARFM

SEQ ID NO: 178 - DNA, 3022 bp, DROSOPHILA
gaaaatggacaaaatcaagcgaaaagtgcagagggcggcaaacagagtttgataagcgataaggagcggatcccagaggcagccatacaaataataatattagcaataatagtaatcaatgtgtagtgtaaataataaataacaacggctcggtgggacccagaaacgccaataaattgatgaaagatgatgggtcgtcggccaggacggatggcagttcgctcctcgacgtcggatggcccctgagcgattagccccggcacgcaacagccctgaagagtgcttacaaaggtcaaagggaagctcgagtacaaacacactcggcgagagatagaaaggaagcataaacaacataaatttatttgctgttagcctaatgttatttatacctttcaattacaataacagcgggaccaggatccgggccagtgggtcggtgtgtcgttctgtctctttcagagtaaataataaaccatgacccatcagcaatcagccagaaaagaggacccctccccctgcccctgcccctgcccctgcagcgcactatcaaccataatgcgtgcgcataaataactgggccatcccccgcgaaaggtgtgaatattaagccagtggcagcgccagtgccccaaaaatttacggttgcccgtaaaagttccgctccagtcataactcaaattcatgcctcccaggggaaagggctaggccgcgctgcctgcgcatttgatttggcgcccaacgcggggccaagaaacacccgacaaatgaggcagccaaccgcagcattataattcgccaaatctagggatgcaaagcgacattagcgccgtctcctggcaagattctcatccccgaaacctggtagattaatcattcggaacacccttttgcggcggtcaaagccggctaaacggcttaccctaaactttaaagatgtttcggaattaatcctctaacggcctcatatcagcatgcttctaatcgaccttaacgggctaactcaatttaaagcttcggtaagacagggcaataccagtttcgcaatactagtcatggaaatactagaatggaaaattatttgaaaaaggaacaagatagtttcttaagggtatgggagacatttatggttagattacaggatattggggaagggttgccaccccacacatgttgttcgcaatttcgagccagcttaaagtagccgctttctccccattcggttccataggagttctttattatccagtagtcgccccatttcggatgtgtttcaaagccaactaaaagaacagagtgtttgagatcgtagttggtatttctacacgaaggagtcctcaagatgccaccaaagtattgatcgaattcctcgtgcaggtggtcaatggacacctccacgggtccaattttgtagaccaccttcgccaattccctttcatcgttgctggttagtgtaacgtattcccgcaaggtgcctgtactttttctgcggtcccagcgacactctccattttcgggcttgtagggataggactctttggaggcaatgccataatccctcttgaagttaaaggccacactcacccaaccagcgttgcagccctggtttggatagggaaagcagtccaccaagtgcttgggcgaaaggtcaccaactttccgtacttcttcgccagatgcgcctcaagaacacccgaggtggagaaggcccaggagctcaggcactcggtgccctggttccccactggcgatatatagctggttcaagcccatcctgaatcccgatctgccctgggaatagagtccgttgtgattggcaaccgcctgcactctcttttcgagtattcgccggtggtatcggtcctctaggccgtaacgcttcttgtatctggccttgtaccgcgcccactccacatcgctcaccgaggtcagtccgaactccacgaagagcagattgaaaagtacttgaagtaccagcaaccgaagggagatcatgcccaatgcagacttacaactgattggcagcttgaaaagcacgagatatggagctggacggatggtttttccatcttaactgcttataatttaaatcgatggaatcgactatccgctaccctttacttaactattgcgtgattcttgattagttcatatgagtatatttatattataaagttttttttgatggtctgatacttttaaaataatatattaaacaaattcattttgattacaatgtttgaaaatgtattttatatagataaattttcagtaagtaaacttagcaagcattatagctaatataattatagctattagaagtaacttacaaccagcctataaccagaaaccatataaataaataatataattttatacataagcaaaatattgcattttaatcgtaatcttttccaatttcccaaaaccaataagcagttcacataaataaccccagataatgcattcgcagccgccaggcaaacataaagctcttgatttctagtttttccagctcaaaatcatttacaaatctactttaaacgcgatcagttcgcaatgggcacgcctcgtctgaccgtagtacacggtctaatccttctgctccttgtggagctaggtttgactgcggtcagcgatacggagtgggaccagtacaaggctaagtacaacaagcagtacaggaacagggacaaataccaccgggcgctatacgaacagagggtcctggcggtggaaagccacaaccagctctatttgcagggaaaggttgcattcaagatgggactaaacaagttctccgacacagatcagagaatcctcttcaattatcgctcgtcgatcccagcgccgctggagacgagtaccaatgcacttacggagactgtaaactacaagaggtacgaccagatcaccgaaggaatcgactggcggcagtacggctatatatcgccagtgggagaccagggcaccgagtgcctgagctgctgggccttctccacctcgggtgttcttgaggcacata

SEQ ID NO: 179 - DNA, 855 bp, DROSOPHILA
ctgccaatcagttgtaagtctgcattgggcatgatctcccttcggttgctggtacttcaagtacttttcaatctgctcttcgtggagttcggactgacctcggtgagcgatgtggagtgggcgcggtacaaggccagatacaagaagcgttacggcctagaggaccgataccaccggcgaatactcgaaaagagagtgcaggcggttgccaatcacaacggactctattcccagggcagatcgggattcaggatgggcttgaaccagctatatatcgccagcgcatctggcgaagaagtacggaaagttggtgacctttcgcccaagcacttggtggactgctttccctatccaaaccagggctgcaacgctggttgggtgagtgtggcctttaacttcaagagggattatggcattgcctccaaagagtcctatccctacaagcccgaaaatggagagtgtcgctgggaccgcagaaaaagtacaggcaccttgcgggaatacgttacactaaccagcaacgatgaaagggaattggcgaaggtggtctacaaaattggacccgtggaggtgtccattgaccacctgcacgaggaattcgatcaatactttggtggcatcttgaggactccttcgtgtagaaataccaactacgatctcaaacactctgttcttttagttggctttgaaacacatccgaaatggggcgactactggataataaagaactcctatggaaccgaatggggagaaagcggctactttaagctggctcgaaattgcgaacaacatgttatttccatgactagtattgcgaaactggtattgccctgtcttaccgaagctttaaattga

SEQ ID NO: 180 - protein, 274 aa, DROSOPHILA
MISLRLLVLQVLFNLLFVEFGLTSVSDVEWARYKARYKKRYGLEDRYHRRILEKRVQAVANHNGLYSQGRSGFRMGLNQLYIASASGEEVRKVGDLSPKHLVDCFPYPNQGCNAGWVSVAFNFKRDYGIASKESYPYKPENGECRWDRRKSTGTLREYVTLTSNDERELAKVVYKIGPVEVSIDHLHEEFDQYFGGILRTPSCRNTNYDLKHSVLLVGFETHPKWGDYWIIKNSYGTEWGESGYFKLARNCEQHVISMTSIAKLVLPCLTEALN

SEQ ID NO: 181 - DNA, 4687 bp, DROSOPHILA
tttatccatgagttgttggaacgccattcttgtattttgcttattaagtttaattgccattaaatataactagggatcgtggttggaaaccccgtactttatatgagaaagcagaacgacgtacacgcaattggctacattgacgaacaccacgcgatagagggaattgaggaagcggaagttaagatattgcagacccggccaaaagcagcagtccaacatccatgtgtagaggaacttctcggacagctcgctattgcactccacgaaactctttccgcccagcaagctgctgacgtaaaaaaacaggaatatatagatgggtgacatgattaactgatccacgagtatcttatgcagcacaccccatccactagtgcccggtagaaccccatccaacagcagatagaagccgtgctgaatcggaccaatcaccgagcccgtaatcatcatgcatcctgagcgagagtagtcaaaggctttcttttcaccaaacctctcgtactgctgagcaattgcatcgccgatggcgaggagcagtcccgatccgatggtattcgtcagcaacaggtactttccgaacagcttcgtccagaattttgcattcggagggggggctgtcgagaaatgcgttactaactggcagctcatctttagcggattggccagtcgagtccagctaaacatcataattccatctgatcctattttgttgtcttgtaggtgtgcgatttgattcaaaaacattaattttctatcgatctgacattgcaggaactggtttgtggatcagttttgtgatttattgatggcaacaataggtttatattgaataaaccatgtatcaaaggaatttaattgaaaaacataaaacttgacataaaagctaaaagttctacgctgcatatcctaacaccttacaacactgaccgatatatgtaagccgataactttagctattttccaaagggactccctctggtcacactgccctgttcggttttgctttgcactgctttcgcgttatttttagccgctttttttgccgaaacgatttttttggtggctaaaagccatcgcaatttccaccaaatctgaccggttggtaaaccaccaacgcacgcaactatttaaggttaggaccgacctgaagaaacgcctgaaatcgtgtattaagcgcattttatttccaggtgactcaaaaccatccggttttccgggtggcgacaattttgcgtttttggaccaacgcggcgttattataatgaagctgatctacgtgtttctcctaatcttggccgtgcgcttggcctctgttttcgtggtccaaacatattacgttccggatgaatactggcagagtttagaagtggcccacaaactgacctttgggtaggttcaatttcacggatttcggttcgattcctagacattatctacataaaactatgctcattttgattaaaaactcaaagtacatagttcgcacactcaattttattatgtagtatagtctacgtgaaaattttcactgataaatggcctttagtatcaatatatgcagcaactttttcatataatttaatgaaaatcctactgaatccttaaacaaaatccttatctatatgtttctttgtacctaactcacgttttctgtatttttagctatggctacctgacttgggaatgggttcagggcattcgcagctatgtgtaccccctgctgatcgccggactctataaaatcctggccctcctgcaattggatagtgcccaccttctggttgtgctgccaaggattgtacaggctctgctttcggcctactccgactatcgcttctttgtgtggacgggcaagcgaaagtgggcgctgtttctgatcctggtcccgtggttctggttctacacgggctcgcgcactctggccaacacattggaagcctccctgacaacgattgcgttgagctacttcccctggtatggcgaatccactgcttacctgtggccagctgccatctgctgcttcctgagacctacggctgctgttatttggctcccattatccttgtatcatctgcgcagaagtcgccagaacgtgctggagctgatcctgaagcgatttgtgctcattgggtaagataagaaatctaaaacattgacagttttataataatccaactttaacttgtagtttactcgttgctggtctgggaatagccatcgatacctattggcatggccagttgatagtgactccgtacgagttcctcaagtacaacatatttaacaacatcggcagcttctatggctcacacccttggcactggtacttcagcgtgggcttgcccacagtcctgggcatcaacaccttgcccttcatctttggcgtgatggaaactgtgaagaagtcggagaagtaccctgttagcaagcagcttctgatcaccatcttcctgactctggttgttctgagtgctgtggagcacaaggagtttcgatttgtttccccgctcctgccgctctgcttgtacgttatcacagatgccctatcgcgttggagcatcagagcctcgagcacaatgttgtggaccaccgctttggtcattctcgtgggcaatgttatgcccgcctggtatctgagcacagtgcatcagaagggacccattgaactgatgcccaagttgagagaaatagctcgggaatacagagatgaacgcgaacaccaggcgaatattctcttcctaatgccttgccactccacaccatactataggtaagaagttttggacttcactattcttcaatgttttaattttgctttttgctttcttgttagtcacattcaccagaatgtcaccatgaggtttttgacttgcgaaccgaacctggaaaagaaggagcagtataaggacgaggccgatcgcttctttgaggatcccgtgcactggattaactcgcacattcctatgcatccgctcaccgctttgcccacacatgtggttctgttcgatccgctggccgagaacataagcgtgttcctccgtaactaccggctgctccatcgcatcgagcacgcagaggtaacacggctggagggctcgcaggctctggtggaccagtggtcggaggcactgggtgcccagtcacctaatcttgcttctctcttgcagaatcgccaatcgcgcacaggtcgttccattttggtctaccagcgcttgaagaagggcgaggagaatgcatttaatcgcgggccggattcaggacagcacgagccggatgtccacgatcatccgccgctggaggatctcgtcctggccaacgagaacgagaatctgttcaattagataatagagaaaataagagaacccaccaccgacgccctccgttcaaaagcaagaagcaatgacacatttgagattaactaatagatacaaacctatattttgtatccatttttggccttagcaaaagtttttaaaacgttgtcgcccgaagagaacagaaaacagaaacgtagttgatattcgtaggcgcatgttgtgtactctgtgctagttgctaatgtgtaagccatctgagtatttagacgctagaggcaatgtattttacgtagtcgatacaacacacttgatctgtcctttctttaagatctcgaaataaaggttcagtggagtagataaagatttatttgagatttacatattttgtatatcttattggtggtttaaacattaattttcgacgtttcttatttttttttttttaattatctttttaaaatatttagctaattacattttcatagaacagctgtttgaaatgtaactgttcaactttctaatcgatttgtggaataccccgattgtaacttatcgcagctaaaatatcgatggtgtgtcgtaagcctttgcagtcgctctatcgatactatcgcagtggttaactcagcactattcggccgatttcgcactgcattaattaaacgcgttttaattgagtaaagctgtttttatcgcacaaccaccacacacagataatatggctgcttcaatgagggcgctgctgaaagtgcgaggtgcgtattctccacatcggttgcctaacacgcccgatagcctaacagcataataaattatataacttcaatggatttacggcaccaaaagaacaaatatccaagcaattagggagcacctgtcgttccgacgcatctgctgattagtcggcctccattcggattaataagcggctcaatttgcgaatccgcagatacgtggctttgaaatgattaaagagggggagtgcgggggttgtgttcaaggttcgcttgcatgtgacccagcgtacaaacaaccgttttttttcggcaacaagtacagtggaacaccgctttggtgaccatcactttttaacttttctcgtagtggatatacgtgtatacttttaatttaatagttcaaacaaataattgctgcaagcatttgccttcgtcaaaaagttatttaattctaatttagtttgggatattttttccaagctccgatctatatttatgaatatttgcccttagggcatttggcatgaattacttttttgagttctgaaagcatggataaacttagtatcgttctaaaagtcaaactggtcagacctacctggcaaaccatttactttacgaaagcagact

SEQ ID NO: 182 - DNA, 2088 bp, DROSOPHILA
ttttgctttgcactgctttcgcgttatttttagccgctttttttgccgaaacgatttttttggtggctaaaagccatcgcaatttccaccaaatctgaccggttggtaaaccaccaacgcacgcaactatttaaggtgactcaaaaccatccggttttccgggtggcgacaattttgcgtttttggaccaacgcggcgttattataatgaagctgatctacgtgtttctcctaatcttggccgtgcgcttggcctctgttttcgtggtccaaacatattacgttccggatgaatactggcagagtttagaagtggcccacaaactgacctttggctatggctacctgacttgggaatgggttcagggcattcgcagctatgtgtaccccctgctgatcgccggactctataaaatcctggccctcctgcaattggatagtgcccaccttctggttgtgctgccaaggattcgaaagtgggcgctgtttctgatcctggtcccgtggttctggttctacacgggctcgcgcactctggccaacacattggaagcctccctgacaacgattgcgttgagctacttcccctggtatggcgaatccactgcttacctgtggccagctgccatctgctgcttcctgagacctacggctgctgttatttggctcccattatccttgtatcatctgcgcagaagtcgccagaacgtgctggagctgatcctgaagcgatttgtgctcattggtttactcgttgctggtctgggaatagccatcgatacctattggcatggccagttgatagtgactccgtacgagttcctcaagtacaacatatttaacaacatcggcagcttctatggctcacacccttggcactggtacttcagcgtgggcttgcccacagtcctgggcatcaacaccttgcccttcatctttggcgtgatggaaactgtgaagaagtcggagaagtaccctgttagcaagcagcttctgatcaccatcttcctgactctggttgttctgagtgctgtggagcacaaggagtttcgatttgtttccccgctcctgccgctctgcttgtacgttatcacagatgccctatcgcgttggagcatcagagcctcgagcacaatgttgtggaccaccgctttggtcattctcgtgggcaatgttatgcccgcctggtatctgagcacagtgcatcagaagggacccattgaactgatgcccaagttgagagaaatagctcgggaatacagagatgaacgcgaacaccaggcgaatattctcttcctaatgccttgccactccacaccatactatagtcacattcaccagaatgtcaccatgaggtttttgacttgcgaaccgaacctggaaaagaaggagcagtataaggacgaggccgatcgcttctttgaggatcccgtgcactggattaactcgcacattcctatgcatccgctcaccgctttgcccacacatgtggttctgttcgatccgctggccgagaacataagcgtgttcctccgtaactaccggctgctccatcgcatcgagcacgcagagaatcgccaatcgcgcacaggtcgttccattttggtctaccagcgcttgaagaagggcgaggagaatgcatttaatcgcgggccggattcaggacagcacgagccggatgtccacgatcatccgccgctggaggatctcgtcctggccaacgagaacgagaatctgttcaattagataatagagaaaataagagaacccaccaccgacgccctccgttcaaaagcaagaagcaatgacacatttgagattaactaatagatacaaacctatattttgtatccatttttggccttagcaaaagtttttaaaacgttgtcgcccgaagagaacagaaaacagaaacgtagttgatattcgtaggcgcatgttgtgtactctgtgctagttgctaatgtgtaagccatctgagtatttagacgctagaggcaatgtattttacgtagtcgatacaacacacttgatctgtcctttctttaagatctcgaaataaaggttcagtggagtagataaagattta

SEQ ID NO: 183 - protein, 512 aa, DROSOPHILA
MKLIYVFLLILAVRLASVFVVQTYYVPDEYWQSLEVAHKLTFGYGYLTWEWVQGIRSYVYPLLIAGLYKILALLQLDSAHLLVVLPRIRKWALFLILVPWFWFYTGSRTLANTLEASLTTIALSYFPWYGESTAYLWPAAICCFLRPTAAVIWLPLSLYHLRRSRQNVLELILKRFVLIGLLVAGLGIAIDTYWHGQLIVTPYEFLKYNIFNNIGSFYGSHPWHWYFSVGLPTVLGINTLPFIFGVMETVKKSEKYPVSKQLLITIFLTLVVLSAVEHKEFRFVSPLLPLCLYVITDALSRWSIRASSTMLWTTALVILVGNVMPAWYLSTVHQKGPIELMPKLREIAREYRDEREHQANILFLMPCHSTPYYSHIHQNVTMRFLTCEPNLEKKEQYKDEADRFFEDPVHWINSHIPMHPLTALPTHVVLFDPLAENISVFLRNYRLLHRIEHAENRQSRTGRSILVYQRLKKGEENAFNRGPDSGQHEPDVHDHPPLEDLVLANENENLFN

SEQ ID NO: 184 - DNA, 2614 bp, DROSOPHILA
tttaaagttcacaattgaaattgatacgtggtggcgttgtattaacattaataagtcatattctttatcaacaaaagcattaaatgtgtaatgtcatgctgggccaaacttcatagcagcaattgcttgtgaatgtcttttagccattattaaagcattatatagccaaatttcgggcgggattcgtgtgttggaggtgcggagttttgcctgcttgctgcgcttttatggggccaacagggaggcttacgtcctgctctatctcttgattctgggggctcggttctagcaaacttgtcactggagcagaagtttctgaatgcattctcggcgccaacttcttggtgcgaaaagttggcgcaaaatactttgctcgaatattgttttcgcatgcttttgtttcgctaagcagcccgtaagaagccgctttccccgacattcgctgcaactgggtccagatccagatccatccagacaacgtaaactgtgctgtctttttaagagtttttattttgccaggtttttgttgtccctttttgggttcgccgttttgttatacttggttttattcggttttcttctggcatttttgccatgtattggcatttcagcgcttatttgtatcgttttcgttcactttgttggtactttgctatggcttttctttttcttttgatttgtttttgtgcggttgctgttttcaattttgttgcaagcgcaaggtatttttgttgcttttctctttttagattgttgctggagttttttttttttgggcaatttccttaaaacgcatgagctgaaaagttgccccatgtatgtataagctttattttcccccatcatttctttgtgaatatatctatgtttgtgcgtatatattttcgataactgttccaacgacattgtatcaccagcatttggtatgcatttgaaaactatgcaaaatccttcattaaacttccccacctccccaaaagtgactgccaaaactgagccgctagtagtgcctctcgggcggagtgatgactcgctggagaagaattggtaaggacttggggctaaccctttgacggtgcaggataactcacttgagcccgcttcagaatcgagtccctggaggaatcgtagggatgctgtttcgagggaatctccagcacagtgggaacggccagattgtgagcatcgacagtgggtcgaatcatatcagcgtaaacctggttgatcagaataatgactatatccggtcgcctcaggaactttttgaaacactcttcgatctgcttaggggtggtgtctggtatacaatgaaaaacgataagagaataatgcgataactgaaagtaccaattacaatttttggtctgatatataggaaagcttgatagccctttttgagcttagaaatgaaattacctctttccacgaccatgaagttggtctctcgatcctcgtcgacctctccaatgccacccagcagaaagccgacacacgtgtcctgggtaaattgtgtgtgggtgtggacatattgatttgtaaatattacttttaggctcaaacctcatcgccaatcacggccaaaaggcgtcccagatcctctgtgtgcgacgacatattttcttgactggaaaaaatatcttaaaattgtaactgacaaatggaaacaagcatctaagccaactgattcttaatggtaatctctaaagaataacttacttttcaaaggctttgccataactagattatcgtaccaaataaaaatgtataagtcgcatttgtttctgccattatacgactcattcattagagtggtagagtacatgtgcatctgccgccgatgacaaaacaattgtttcggtgaaacggatgtagaacaggaacggaaaatggggaaaactgcacttgacagccatgccgcatttgatggcaaaacgctggctgcacttcgctgtttgttgtgttgtcgagcgtaaaacaagttttataattgtttaaaatgtttgctttgccgctgtccactgcagtgcaattttataacgaatttctgtcagttgctgctcaaaacttaatcgaaaacattggttggaaagcggcgaactgtgtgtcaaattgccggctcactcccttcagctccgccgtttacgtaatgtcaacagctcctaattggattagataacttcccgaagggctcagccagcgaatgacacgcatagacctacgcccacgaaactgacgcacatatcaccttcgtacccattgtcccctttaaagcaaatcgccttagatctcgacccaaagtcccggccaccaagttggtgttacgtgttcgccaggcggcctaaacccaaatgcctaaatgcggctaattgccgagcacgactttcgacagaccagctgccacttgaacccaacacaacactcgactcccaattacagttagcgtttttcaaatcagctctaattgtttaaagtttacagtccacatatcaatagccatcgttgttgttgccggcgtgtggcataactaattatgattaatgcttcaaagccagcccctgacatttgctattaattgacagctggagcaacagctcaaacacctgcactggaagaa

SEQ ID NO: 185 - DNA, 375 bp, DROSOPHILA
atgtcgtcgcacacagaggatctgggacgccttttggccgtgattggcgatgaggacacgtgtgtcggctttctgctgggtggcattggagaggtcgacgaggatcgagagaccaacttcatggtcgtggaaagagacaccacccctaagcagatcgaagagtgtttcaaaaagttcctgaggcgaccggatatagtcattattctgatcaaccaggtttacgctgatatgattcgacccactgtcgatgctcacaatctggccgttcccactgtgctggagattccctcgaaacagcatccctacgattcctccagggactcgattctgaagcgggctcaacgagtcatcactccgcccgagaggcactactag

SEQ ID NO: 186 - protein, 124 aa, DROSOPHILA
MSSHTEDLGRLLAVIGDEDTCVGFLLGGIGEVDEDRETNFMVVERDTTPKQIEECFKKFLRRPDIVIILINQVYADMIRPTVDAHNLAVPTVLEIPSKQHPYDSSRDSILKRAQRVITPPERHY

SEQ ID NO: 187 - DNA, 3282 bp, DROSOPHILA
caaatcgatgttcctgtcccagtcgctgcggtagcgcacatttgggtactccccaagggtagcgcacagtgtggctatttgctcggcaattcgctcgatgtgcttgctccgaatggaggcaaaggccggcgagtagaggcattggaatgtgtccggcgagtccagcgagaacacctggcattcgtatggcaaaaatgcaatgttgatctccttcagcgtcttgatctttccggccgcgcacgacttgcacagatcgttgaatagctcctcgggacaaacttcggtgaagaagacatgggcatagcgatacatgggccgcgctgggttctcgaagtctcgtatcagaccgcgcactgactcatccgacggcgtaatcagatagatcgcgtccatcgtgggcagcggctcgcgcttcttgttgatgtcctcaaccagggtgatgccctcggcgctgatttcgtgcatcttggtgcaggcggacaccatgcgcatacccagcttgtccaccaccagcacccgccattccatgccgcccgcccccgcagcggacgtaacgccctgctttttgggtggtggaggcttgtacttcaccacctcgttcatcagcttttggcccaccagcactttcaaggccattttcactgcgttttattggtcacgggcgcaaaggcaactcgattatgaacacactgcgtgtaaatatgtctttttagcttattccgttcgctttttcgcgtgggctaacttgacttaaagaattttatctattccttggccaatttttctgtatttttttcgtttgatgacttagccttagtgatgggcgaaagtcgattgctggctagcgatagttgatatcgatattactgtctagcagagacgcgcacccgtctcagtgcgagtgtggatttctcagttaaccgagaacggtcacgctgctgctgtcgaggaaggaaaataaaataattttgctggccaactggtcgatttaaacggggaaatgcagatgcaaacgtacaaactggtggtcgtcggcggcggcggcgtgggcaagtcagcgataacgatacagttcatccaggtaagccgcccagcatcggcccaatccctggtgacgtcgctttccacaggggcgtttgaatgtgggagtggggggcgatggcgcacaggggcggtggcagggggacggcccttgttttggccagagcaacaaacaagcaacaagcgactgtgatgtgcgtctgtgtttggacatgcgtgtgcatagtttcgggccgagatcatcaccaacacaatcatcatcatcatcatcattggcagcatcatcatcgcggtggccacacccccgtgtgtatctccaattggggatcaagtggtcagagcccagaaccagggagttgcgttagacgcagcccccagttttctgggtgtgccgatcgattccccgagagtttgtgccatggtcacgaccacaatgaccgcccgcttccatttatttttagtcatttgcgtcatctgcacatctttcgtgtatatgctgtagcttttccccaagatatatagagcatagtggatagtgaatgataaaagtgacgtgtgtaaacaaatcaaaggcggaatgataaacgcaccccgcccacataaaaaacccagtcttataatgtttatatatgtagttttgtggcctcggcagctggcggtacaataattttaatcctaatcttgcagagctacttcgtcacggactacgatcccaccattgaagactcgtacacgaagcagtgcaacatcgacgatgtgccagccaaattggacagtaagcttcctttctttacccttaccagattcataataacctgatattttacctagttttggacacggctggccaggaggagttcagtgccatgcgggagcagtacatgcgctccggcgagggattcctgctcgtcttcgcgctcaacgatcattccagcttcgatgagatccccaagttccagcgccagatactgcgcgtcaaggatcgcgacgagttccccatgctgatggtgggtaacaagtgcgacctgaagcaccagcagcaggtgtccctggaggaggcgcagaacaccagccgcaacctgatgatcccctacatcgagtgcagtgccaaactgagggtcaacgtcgatcaggccttccacgagctcgtgaggatcgtgcgcaagttccagatcgccgagcgtcccttcatcgagcaggattacaagaagaagggcaagaggaagtgctgcctgatgtagaaggaactaaatggaagagaatctcctgaatgccgcagcggaagcaggagccaacatataatgattataacaccaaattttttgaaaaacacgcgtcgactgagctttgaattccgttgagaagacgataaaccagtaacccgaaaccagtaaccgcacaaaacgtgtcaacgagcccaaacgaagtgcatttcttacctgcccaggtgcatggcgcattcaacgaacgaatcgaataaacttcgccactctcaaatagctacgaagaatcttacaactgacaactaacaatgcaaaatgcaaacagaaacacgaaacataggtagatatatacaacagattcacacgaataacttatatatacatatatatttctacatatatttttgtaatattattttgttgatcaacgacaacaattaaggacgaatgttttcatgattattaccaatcgtggctcgcaggccatttgtttttataatgcaataactaagcccagaacgtttgtttcgattaagccaaaacgtaataatgtgttattgtaatttgtattgttatttactactaatatatacgtatacatatattaactgcttacaaaccgattttgttgtaacaaattgagtgcctcgttctcgcgcgtagaaatctaaaacatcaaactctgtattacacccacggcatttttgtactatacccgcagctgccaggcgcgcacaactcacttaacgatacttttgtacatgtccccagtcggatccggatcctatggtttattgttcgccaaatgtattgcaacagttgctttagccgcaatcttgttttaactcttatacactgcttaatttaacgaacttatttaatggtatataaataaatatataattaaatttaaaattaaacatatgcgcaattctaataaacacatggagaatcacaaacgcttccacatagaagattgtttcaatgacgctctcgactggaattgaaaattccgacc

SEQ ID NO: 188 - DNA, 588 bp, DROSOPHILA
atgcagatgcaaacgtacaaactggtggtcgtcggcggcggcggcgtgggcaagtcagcgataacgatacagttcatccagagctacttcgtcacggactacgatcccaccattgaagactcgtacacgaagcagtgcaacatcgacgatattcataataacctgatattttacctagttttggacacggctggccaggaggagttcagtgccatgcgggagcagtacatgcgctccggcgagggattcctgctcgtcttcgcgctcaacgatcattccagcttcgatgagatccccaagttccagcgccagatactgcgcgtcaaggatcgcgacgagttccccatgctgatggtgggtaacaagtgcgacctgaagcaccagcagcaggtgtccctggaggaggcgcagaacaccagccgcaacctgatgatcccctacatcgagtgcagtgccaaactgagggtcaacgtcgatcaggccttccacgagctcgtgaggatcgtgcgcaagttccagatcgccgagcgtcccttcatcgagcaggattacaagaagaagggcaagaggaagtgctgcctgatgtag

SEQ ID NO: 189 - protein, 195 aa, DROSOPHILA
MQMQTYKLVVVGGGGVGKSAITIQFIQSYFVTDYDPTIEDSYTKQCNIDDIHNNLIFYLVLDTAGQEEFSAMREQYMRSGEGFLLVFALNDHSSFDEIPKFQRQILRVKDRDEFPMLMVGNKCDLKHQQQVSLEEAQNTSRNLMIPYIECSAKLRVNVDQAFHELVRIVRKFQIAERPFIEQDYKKKGKRKCCLM

SEQ ID NO: 190 - DNA, 3281 bp, DROSOPHILA
tgggcggcggagaggaacaggccaaggtggtcatggtgctggccgccaccaactttccttgggacatcgatgaagcgcttcggcgtcgtttggaaaaacgcatttacatcccactgccatcggatgaaggtcgcgaggcgctgctcaagatcaatctccgcgaggtcaaggtggacgatagcgtcgatcttacctacgtagccaacgagctgaagggatattccggagctgacatcacaaacgtgtgcaggtgagttcagaatacactaatttaaaatggcgtagtcagttccaaatcatgtcaatggaataaaatgcgtgctcttctttttccagggaggccagcatgatgtcgatgcggagaaagatcgcaggactgaccccagagcagattcggcagttggctacggaagaggtggatttgcccgtttccaacaaggatttcaacgaggccatgagtcgctgcaacaagagcgtgtcccgggcagacctggacaagtacgagaagtggatgagggagttcggatcgtcatgatggcgctgcagacgcgaatggctagcgattgtaggagtatatttttgaatagccttaaacacgcgcttaagtcattaagcttttaaagtgagaaccgaaccgatccgagccgaacggaagagttgaacatattttatatataacattttgcaaatacgatacaatctatatatttacatatatacattgaaccggaggccgttggaattagaaaagactaaccgctctcaaagaggaaacacaaatggaaaactgaaattgaaattgaattgcaatgaagtcgagagataggcaatacgtttatgtatacatagcgaaaaccacccacacactccatgagcacaaaccttccaacaaatcgttaacccacaatcacactatatgcaataaggaatcgctttaatcgccgcctagccttggcctcatactcccacaatatgcacactccaatccgtatcattttttatcgaaagtttttattttaacaagaaatgtccactgtctaatattaatgttaattttcgcttaatttatactttcacatatacatatatatcatagtttagtgcaggcagagatgtgtgtaccagaaagttccctctgatttgcaattaacccactgtaatcagaagatgaaactgaagcaatatgtacttaaagagaggattctgaaattttaaacaataaagaagtttttaactttacggcattaagagttgtgacttttttgggtgctttctgcaaggataaataaggataaaggtcttgcaaatgatgctgatgatgttatgatttgattattattacaattaaatcactgttacgaaaatgctgtgatccccaaagagaatttatatctagatactaagcggatgttgcatttgtatgacacagcggtaattaatcttttctagaaatcaagagtcagggaaaagcactttattatgaaatccaagaacgtttatctgatgaaagcacccttcgttcaccgcttaccaaatgtacaaacttgcctgctgcagactgatgcgccatggcagttaattcgctgaggaccaaggaccaaggaccaagacctcagtacggtctggatggcggtggcatgggcatcaggggacccatgattgggtaaggggcggagcccccagacgcgggatagaatccgctggagggcacgtttccgtaggctggcagagaagtatttgggcccggaccctggcgctgtttgcgcatcagctcctgcattttttcggccttgaggcgacgcaggtgcatggtcctccggatagggaggaacgcgtccagaaagtcctccacgccgatatcgctgtcgttgaacttcttgaccatctcctcggtctgctcctcgctctcggaggcagctgtctgcagcagggccagcgccgtttcaaggcccactccgcccgacttctccttgagctgtgagagtttctcctggacagaggagcacctggtgcgcccatcctccgagagttctgccagctgcccccgcagctcgatgatctgcggctcccgctcgatattgcgctccgcccgactcctgttgtcctcgaaaacactggtcttttgtgttcggagcacctggagaacttcgtcaaccttctcgtccagcttgtcgtcatcgttcagcagttccttcagctcctcgtggcacatcggggtgatggtggcccgcagttggtataggtattcctggtacatcttcgctgaccctctgcaacttctcaacaatacacctaattctgcgactttattttcattcgattcaatgactattactcggcagtgtggccagatggttaaatgcttctaccaaattatcactaaataatgcaggttgtaccgcaaattcaaaagtggatttaaaattctaaagtttaggcaatacctaaagtgttattttgttattttgctataattattcgaaatttccacacccgtcactcgtggagtgaaggagtacaaaagattcgtcgaaatatatgtttcaggcagaagtaagcgtttccccgaccctatagagtacatattacttgctaaagatccatatgtccgcatgaacgtcgagatctaaaactaactataaaagctagtgggtggcacagaccttgcatctgatgatttaaattatgtttaatattattttttttattttctgaaatatatttgagcaaaaataactataaaaactctttactaatctcattttaacttattttactaattttaattttaatccgttaaatccattgaaaagctacaaatataatttaccaattaggtttacttattgtacttcaaacggttgtccccatttaatcgatttccccaaaagtaatgactaaggcattagtgttttgaatttattacgtaagcgtgtatgtattttaagataataataaataatgtttaaataactagcaatattgcagtattgcaccaccaccaattcgtgaaaatggatgaatgctcgaagttttcctggcattggagagttctttcttatggctcccagtgtgctattgtcctcgggtaagctagataatgctgcagtttaaccatccgcttcgattgtgggctagattgcccaacttcggtggatgggttgtagtttctcgaatcgtgtctttcgttttctccaccaccgagcttggggtgctgtttcgttgtatcccgcttgcaggatcaaacgagatgcaggatcatcgtgtctgatctagcagat

SEQ ID NO: 191 - DNA, 939 bp, DROSOPHILA
agaagttgcagagggtcagcgaagatgtaccaggaatacctataccaactgcgggccaccatcaccccgatgtgccacgaggagctgaaggaactgctgaacgatgacgacaagctggacgagaaggttgacgaagttctccaggtgctccgaacacaaaagaccagtgttttcgaggacaacaggagtcgggcggagcgcaatatcgagcgggagccgcagatcatcgagctgcgggggcagctggcagaactctcggaggatgggcgcaccaggtgctcctctgtccaggagaaactctcacagctcaaggagaagtcgggcggagtgggccttgaaacggcgctggccctgctgcagacagctgcctccgagagcgaggagcagaccgaggagatggtcaagaagttcaacgacagcgatatcggcgtggaggactttctggacgcgttcctccctatccggaggaccatgcacctgcgtcgcctcaaggccgaaaaaatgcaggagctgatgcgcaaacagcgccagggtccgggcccaaatacttctctgccagcctacggaaacgtgccctccagcggattctatcccgcgtctgggggctccgccccttacccaatcatgggtcccctgatgcccatgccaccgccatccagaccgtactgaggtcttggtccttggtccttggtcctcagcgaattaactgccatggcgcatcagtctgcagcagcagaatcctctctttaagtacatattgcttcagtttcatcttctgattacagtgggttaattgcaaatcagagggaactttctggtacacacatctctgcctgcactaaactatgatatatatgtatatgtgaaagtataaattaagcgaaaattaacattaatattagacagtggacatttcttgttaaaataaaaactttcgat

SEQ ID NO: 192 - protein, 214 aa, DROSOPHILA
MYQEYLYQLRATITPMCHEELKELLNDDDKLDEKVDEVLQVLRTQKTSVFEDNRSRAERNIEREPQIIELRGQLAELSEDGRTRCSSVQEKLSQLKEKSGGVGLETALALLQTAASESEEQTEEMVKKFNDSDIGVEDFLDAFLPIRRTMHLRRLKAEKMQELMRKQRQGPGPNTSLPAYGNVPSSGFYPASGGSAPYPIMGPLMPMPPPSRPY

SEQ ID NO: 193 - DNA, 4619 bp, DROSOPHILA
gaaatgtgtagaaaaatgtaatggtagtaaataaaaaattgcagaaggctttaaatgtatatacatctatatatgtagaaaagtccatgaaagtgtaccttttgtcgcagatggtatatactttatatatatatatggtcgaaggaggtctatatatatgcacgtaatttgactcgtgtaataaagtaaaatcaaatcgaattcgactgtatgtgaagcgaattcgattggtaaaaacaaaccaaattcgcctgaatttgaagcgaattcgaatcttttgagtttacattataaactgtacgtaatagcgccgtctaaatgtagagatacataaatccaagaggtgccactggacaagtgtttctatcagcttccgcaagaaggcggcacgcaataatgtagaatgtaataagtcgtccctgtaattcttatgttagtgaggtctgtaaggtgcaagtctcgaataaacggaaaaagctttgaaacttacactgaagcggcaggcttaaagtcaaatttggaaacagaatgtaaaaactaacgatcgttatatttatttaagcaaacatatttttaaaaaccagttcccatcttactttaaacaccatgcacagcgtcttaatgaagatatataaataaaaagataatcagcattaacaccctattagatgtatggactggccgacatctttatgtgcgccatcctatagtctgttggttataacaagataaaaattgcgaaaattattattgataccttccaactgaattcgttcaaaattaataaataaaataaattaataaataaaatcaaattaaatacaaatttagcttacaaaaattggatttcctgattatatgtttgtatgtatgcaagataagcattttccattcgtctgaattgatattctggtagtgataaataaatgaatagttgctattaataaagcatattttcgtttttcctaattattaaccatgtctaaagataaaacgtttgtatatttaagtcttgtatttattggaaacgtgagaaatcaacaacctaaatctatgtttaacagagttactagaactagatgagcacgttttggttacttctggcacgtagcaacctcatgatcaaggagttcttgtcgagcccatagatggaggtctgaccactggactcggaaaatgactcatccaccgcgtagtcggcatttaaagtggtcgtagacagcttgtcggaggccacggtggtggtggactcgctcccggtggtttggctgttcaactcctcggcctctgtggtcgaagattgtggtgcatctgaggtgctggaatcgttgctggtcgttggatcagtcgtttctccgaaatccgtcgtggagtcttcactgaccgtttccgccgagtcagaggcaacgtcaacactggtgggcaattcagtagtagaaggttcggtgatgttgggcggtgtagtggtgctgggcacaggtgtggttgaggtggtgccctctttagtggtcagcatgagcatcgcttcgtgatcagcttcttcgtaagcgctggaagggtttccaaaatccaaatttaatagctccgtggatgccatgctgagaatagctggtagtttagctggtggtgcagctgtggtggtgctgatagtacttgtttgccttggtgggacaatccaataggacagtgggtacttctcaccgtgctccttcttcaaggaagtaggcttattgccaagcaagcccttgacattatcgagagttttctgcaccagccaactgtcatcagaggaccagaaagcatcttcctcagagctcagaaaatttgacccgcttgacgcacccaagcccgaaaatcccgcagcagcgagctcaattttgcgtattttgcgattattggtttccagggaaggcgaagtggccgagaaatttgtcatcgccagctgacgtggcttgtatggtgtggttggagtccttgtggttgtgaacctacgtactggtttcctgaagcgacttcgtggtgtggtggtgctctttccgtataaaacacttggcaccaaagacgttgggcgacttttaccagtggagtaaatgtgccgtgggttgctcactgacttggcgcactcacctttgtgggatagcttccatactggaagaattttgttatctaaaagtggttaagaaatatactgataaaacttactgctttttggatccttgcagcgcactcgctccaaatagcactcgttgacgattgtgtgattgatgccgtttctggtggcacaaataggttgataaaccgtaggacaagtcttatcgcagcggcgacaggctccattgtgagcaatggtccatgctgtggagaatccaacaattataatatggtatgttaagtttaagaagcagtagtacgaataagatgaagttatataagccatttagccatttcataaatgtgactttaaagaattataagtgtgaatttttaacaccgatggcatataaataatccccacttaacacttaccatttccgactttttggctaaactccatgagttcacaaacgttggaaaaggtgcgactctgccctcttaagttcccgcaaacaggctcattgccgaaaacacaagactttgtggggattcgccgcttcgatttaggcgggaccaccacatagggcttcctggcgggcagagagtagctcttctccatggcgcccgattggctgatgaactgcgtgtgaaaggtcgagggagcgtaaatctccacggcgtcctccggtatctggaagtcttccgcctgagtggacagcctcttgcctctgtggctccgcttggtgcgctccgcatccgacttgggcttggccttcggcttctgcttgcgactatgcttcatcttggtgctgtcctcgccacaaaggccctcggaaacgatgcgccagtctgggcaggagaaaatcatgttatattattgtttatcttatcgcaattcgttacagttctcgtataaggcgatataaggcaaatttttgattttcatgcgacttggtaagtgtagtagactagtttaggctttaatataactcacttctctgggacttgatgttttccgcgttcaccaaacactcgttggagaaggttgacttgacaccagcgtacatggcgcaaacaggtcgatagatcctggtgcagggcacgggcacaggcggcttttcactgatctgtggcaccgcgttggcttttggacacactccccatcgatggaccatccactccgaccttgagatgcaagcggttcgcagcatttcgcagcgactcctgaaggtctttcgttcccccgacttcgagctgatgccacaaactggctgatatcttgagctgcactcgaattcgcagctgggaaagcagaatcgaagcgtaacgtcatctgaacagaatataaaataaaaggtcacaaatacaaaaactatttctcgacatgtttgagtactgattaatgaaatcaaaataaatagtagcttatcattgacaaagcttcaaaatatttatttcgttattttgttgtcgttagatagtactcacatagagggccattcatgaggttgccacgctgggccttccgaaggtcacactcgttggcgaacaaaaagtacattccattttcgcggctctgggcacaggctggtgtgtcgtcgtcggaacagagcatgctcatccgatcctgtccagcagtcgctagcagcacttgtaagaatattccaaaacagagaccaatcacccttctcccggccatgttcttgcagttctgagtcagttccgaaactcaatgaaaatcaagatgcgtccgggccttttatatgccaccggagtcacgcggccaaagttgatgcatagtagctcgggttgatggtattatcggacccgaaattctgcagacatcacattgcgcgataaacacgcttggcatcggcattctgcgaaatttgtcacagtcgatagatgtagatgcttcgattgcccggatttgctctattgatagcgccgcccgacgcgtcaattagatgctcacaaagtgcggagtgcagactctgcggctacgtgatatttggccgatttcggaaagccgcaagataagccccagttgccatttgcatagattgcgcggcgacagctttatagttagtatcttttccgctcgtttctccaagccgataacgcgctagttaagtccgtgatcgagggtggagccttttgtgaagatatgatgtgtaaatgtatgaaggtttttaagtttcagcagatagttgtagcgtgaagatttccaataaagaatacgactgactttcttgaagttcaaaatcagtatgaagtttattgtcagagagtggctactcgagtcctccgttttcgtcttatacataagtacataggttcttaattgtaagcataatgaacatgccgactcggcatgtggctggctagctggggacaatgttgcagtgcgacttttgtgtaatgtcagcattcggccggaatgtcagcattcggccggatgcggtgttccagttgccgtcttcccggttgagtgtccgatgatttgtttagaggcgtgggggttt

SEQ ID NO: 194 - DNA, 2268 bp, DROSOPHILA
atggccgggagaagggtgattggtctctgttttggaatattcttacaagtgctgctagcgactgctggacaggatcggatgagcatgctctgttccgacgacgacacaccagcctgtgcccagagccgcgaaaatggaatgtactttttgttcgccaacgagtgtgaccttcggaaggcccagcgtggcaacctcatgaatggccctctatatgacgttacgcttcgattctgctttcccagctgcgaattcgagtgcagctcaagatatcagccagtttgtggcatcagctcgaagtcgggggaacgaaagaccttcaggagtcgctgcgaaatgctgcgaaccgcttgcatctcaaggtcggagtggatggtccatcgatggggagtgtgtccaaaagccaacgcggtgccacagatcagtgaaaagccgcctgtgcccgtgccctgcaccaggatctatcgacctgtttgcgccatgtacgctggtgtcaagtcaaccttctccaacgagtgtttggtgaacgcggaaaacatcaagtcccagagaaactggcgcatcgtttccgagggcctttgtggcgaggacagcaccaagatgaagcatagtcgcaagcagaagccgaaggccaagcccaagtcggatgcggagcgcaccaagcggagccacagaggcaagaggctgtccactcaggcggaagacttccagataccggaggacgccgtggagatttacgctccctcgacctttcacacgcagttcatcagccaatcgggcgccatggagaagagctactctctgcccgccaggaagccctatgtggtggtcccgcctaaatcgaagcggcgaatccccacaaagtcttgtgttttcggcaatgagcctgtttgcgggaacttaagagggcagagtcgcaccttttccaacgtttgtgaactcatggagtttagccaaaaagtcggaaatgcatggaccattgctcacaatggagcctgtcgccgctgcgataagacttgtcctacggtttatcaacctatttgtgccaccagaaacggcatcaatcacacaatcgtcaacgagtgctatttggagcgagtgcgctgcaaggatccaaaaagcatatggaagctatcccacaaaggtgagtgcgccaagtcagtgagcaacccacggcacatttactccactggtaaaagtcgcccaacgtctttggtgccaagtgttttatacggaaagagcaccaccacaccacgaagtcgcttcaggaaaccagtacgtaggttcacaaccacaaggactccaaccacaccatacaagccacgtcagctggcgatgacaaatttctcggccacttcgccttccctggaaaccaataatcgcaaaatacgcaaaattgagctcgctgctgcgggattttcgggcttgggtgcgtcaagcgggtcaaattttctgagctctgaggaagatgctttctggtcctctgatgacagttggctggtgcagaaaactctcgataatgtcaagggcttgcttggcaataagcctacttccttgaagaaggagcacggtgagaagtacccactgtcctattggattgtcccaccaaggcaaacaagtactatcagcaccaccacagctgcaccaccagctaaactaccagctattctcagcatggcatccacggagctattaaatttggattttggaaacccttccagcgcttacgaagaagctgatcacgaagcgatgctcatgctgaccactaaagagggcaccacctcaaccacacctgtgcccagcaccactacaccgcccaacatcaccgaaccttctactactgaattgcccaccagtgttgacgttgcctctgactcggcggaaacggtcagtgaagactccacgacggatttcggagaaacgactgatccaacgaccagcaacgattccagcacctcagatgcaccacaatcttcgaccacagaggccgaggagttgaacagccaaaccaccgggagcgagtccaccaccaccgtggcctccgacaagctgtctacgaccactttaaatgccgactacgcggtggatgagtcattttccgagtccagtggtcagacctccatctatgggctcgacaagaactccttgatcatgaggttgctacgtgccagaagtaaccaaaacgtgctcatctagttctagtaactctgttaaacatagatttaggttgttgatttctcacgtttccaataaatacaagacttaaatata

SEQ ID NO: 195 - protein, 730 aa, DROSOPHILA
MAGRRVIGLCFGIFLQVLLATAGQDRMSMLCSDDDTPACAQSRENGMYFLFANECDLRKAQRGNLMNGPLYDVTLRFCFPSCEFECSSRYQPVCGISSKSGERKTFRSRCEMLRTACISRSEWMVHRWGVCPKANAVPQISEKPPVPVPCTRIYRPVCAMYAGVKSTFSNECLVNAENIKSQRNWRIVSEGLCGEDSTKMKHSRKQKPKAKPKSDAERTKRSHRGKRLSTQAEDFQIPEDAVEIYAPSTFHTQFISQSGAMEKSYSLPARKPYVVVPPKSKRRIPTKSCVFGNEPVCGNLRGQSRTFSNVCELMEFSQKVGNAWTIAHNGACRRCDKTCPTVYQPICATRNGINHTIVNECYLERVRCKDPKSIWKLSHKGECAKSVSNPRHIYSTGKSRPTSLVPSVLYGKSTTTPRSRFRKPVRRFTTTRTPTTPYKPRQLAMTNFSATSPSLETNNRKIRKIELAAAGFSGLGASSGSNFLSSEEDAFWSSDDSWLVQKTLDNVKGLLGNKPTSLKKEHGEKYPLSYWIVPPRQTSTISTTTAAPPAKLPAILSMASTELLNLDFGNPSSAYEEADHEAMLMLTTKEGTTSTTPVPSTTTPPNITEPSTTELPTSVDVASDSAETVSEDSTTDFGETTDPTTSNDSSTSDAPQSSTTEAEELNSQTTGSESTTTVASDKLSTTTLNADYAVDESFSESSGQTSIYGLDKNSLIMRLLRARSNQNVLI

SEQ ID NO: 196 - DNA, 11380 bp, DROSOPHILA
tcttctgtttttttttaccgtctgcacaccggtgagtgcgagtgagtgtgcgtctggcctacgtgcagacatgcactcacactggcgcaacagcaacaacaatacatacagacgtctcaataatcccccacggaaaaccggctgccagccaaaccaacaacaacaatgcagcacgctctctgagagcgcttctactctcccgctcgctcctgtgcagtgtagcttctaagcgctcggatggaaactggccagtttattcgaatttcgaactccgtacggccatgcagcaactatagctccgtagcttactctttggccatgcagctccgccgacgctgcagcctccgtgcatgtgaaccagaaaaacagtggataatttgttgattttcggttaagcgagatatcgagcgtgtgtgtttttgacacctccaattaagtttagttctgtatgtgttttatttgaaaaaaattcatgtggccgctgttggctcttgcatgtttttccaacaagaaaaaacgccaagtttccatttaaaagaaattaagtttcgttgaggaaaaaaagtttaaacgtcgacggtgatgtgtgtgcgcgcgtgagagagaagggaatacgaaacaagaagtgacagagagcaagagccagcccagtcgccgccacataaaaagttattcaccccaacaacaacaagaaaagcaatagcaatagcaacaacaaaaacgggagagagcggcggaggtggttctcacgtatgcgctgtgattttgtgattgtgtttgcgagtgtttgcgtgcgtgagtgtatacaaaatacaggcagcatacaaaataataatattgaaagcgatacaacaacaaaggccgtcccgtcgaagacgaaacgtccaaaacggaagaactggagagcctgtccagttaattacggagcacaaagtagaatcgaacagcaaaggtgagagagagagtgaggagggataggggtcaacctggctctctcgcaaagaagacgggggcgaggagcggccaaaatgatgatgatggacaccatggacacctcgcaatcgcagccgatggacgtggctccggccgtagcagtggcagccacttcgggcgcagctctggtggactttaccgctgccatggtgagcatggcggccaccgccgaggctgagtccgccgagagcaacaacaaccacatcgacatggccgagtacaaggagcaccgcaagaacaaaaaaaagaaacgcgagaagcgggagcgcgagggcaaggagcaccggcatcacaaacaccgtgaccgggagcatcgcgagcatcgacgacatcgcgaccgggatcgggacaaggagcgggatcgggagggacatcaccaccatccaacgcaccaccaccccaacaacagccagcactcgacctccgcctcgtcgtcgccttcgtctgcctctaccacgccctcggcgaccatcgaatacgtgggcggatcggcttccgcctcgccctcttatctgggtggtggagcgacagggacgggtgcagccgtaggagccaccaccacatatccgcacaacttaaaaatacgcttcctgctttccggggtaagaatttgactttgcctcggtccgccccccccccccaccccccgcctgccatcgaaaaacacggcgccaagcatatccgtgcatccaagcatctgtccctgccaatccctcgaatctattttcggagcttcatggaggctgtctggtctgtcaactaggaaatggttgcaaacagaagcagatctaaaagagaaattatttccattttagcgagtcttctcgaaacgatgatcccatatggtgataaatatgtattttgattcgttgctgtggcaggtgctgttaattcaaattatcaatgatccttgaattccaagtaaaaattttattggtgctaggttgtaggaactgatttgttatctcgctgagaatggcaagataggctgcaacatttcggaaatttaacacattcaaaggtcgttttcgagcacaaaaaaatagaatctcttctgtttttcatttcggacaaaagcatgcttttacaatgaacacattttcaggtaaaacattcaagcgaattaattggaaaaaatagtttgacatcagtattctcagttcgctcaatcacttcttgtttttaagtattaaccgcaaaccttgggacataagaatttttccaaatgtgatatttgatctcaaccctttcattttcgcttagaaactgatccgttttttatttgtcccttttctttttctcatactcatatctcccaacgtgagtgatcgccgtttgtttcccatgatgccccgggatactgatccaaccattagggcctcttatttaaattccaaccatcgggaatgcgttatatttatttaatggatcctttattttaaaacaacccccattgcgtcgctgttcgattgccaatgtctttgacactccatcaataatttaaacgaattttcaccgtgcagtgcacaatgtgcaacatgcacctgcaactgtgggactgagccacctgccccgaatgctggaaaacaaaaggagcgatgagagggaagacaccttcaattacgccgggctccgcccctcgcccgcatccactttccctgcgccgtccttccactccaattggccttaaaacgcatatatcagagttgtgacacatggtgctcgattattgattagtgtaagtgccattaagggcggactctactcctgctagtcctcctccttctcctgcttcctgctgccttatccaggactacgtgaccgaccagcagaggggattccgggcagacagctgtttgccttatccttgccgtttccccttcagagggcaaaaacttatcccgaaaacaggccggcttcgctggctgcctgggcatatccctgggatatcgcattgtatcctggccggggtcgtttccttcttctggccttgtacaatacagacagtcagcatggcacatttgcgcctagtttacgacagctgccaagcatcttcctcgctccctcgtggctacatcttgagctcgttcctcggatctacccttacgttttggtgcctgtgtgcttgctgttgtttcctggcggctgattgatcctcgcttcgatcttgttacagctgccgattcttagatcccaggtatgcgggcctgggatctgtattaactcacctttccttactgctgtcatcttgttgtttttcgcttgtcccaacttttgctctaattgttattttaattggtaagcgcgtcatggtttttcgttcagtggtagattaaactgtaaagaaaacatttttataagcactgctttcctgggattccctttaatatttatttattccgagcactttaaaaacattgtcccatccagggatactttaaaatttgcttagcaattctacaaaaccacttgtacgtgtcctatttcttatccaaacatcatacttcgagttttctgtgtgggatttcctttcctatttatatgaagatgcacggattcacttattttataataaaggacttttgtacaacattttagattggttcggggccttttcttggcgtataatactttgaggacttaagcttattatattcctgaggcttctaggcttctaggcaaatacaaatagatggggcttagttaatttaatttatgaaccctctagttcatctgttaagtcctttgcaatcatccagaaggcacttaccgaaatcctatccatatattccctttgatcgcccaattatcccctagataagtagaaagttgtagtttcccctttgctagacattccgtttcccacttaaggccttaattcaataagggatatacataccagacgttttgtttatttgttgaaatctgagcaattttgcttgattttgctttctaccagcaacgactacgtttcattaggcatttacaaaaaaataccgctttattcaatttgaataattctatcgtttatttggcgacttgcttgttgtttacttggatattttcgtcgcttatgcgaattctttccgcaaaggggacaaggacaacccttttatgcgaccattaacccacagcattgtttgccagaaagagacggtaaatcgcgaaggggtaggagtgagaaagcagtcattcgagcgcagacacgctaatataatatttatagttggtgttttgcttccggctgcctgagcttagctgggctccttttattgaattgaatttgtcgcacaatgggaataaaattgaaatgtgtccaggaagcgatttccgaatgcaaagcacgctcaagttgtcgaaaaaaatatgtctgtatagcataggggttgcttcgctatcctgattcagctccgacttcaggccattagctgcagcaacaggataatcacgattgcggcagctggctagcaggagaatcacaaaaaaaagccgagggttagaaaacaattcgaaaagcttgggatgagtacagaacttgaccatgaaaaaggatgaactcgattctcaattacaaaacatttcgcatttaaaactttggcttacagtagaacttaacaaacttttaaactgtattgaaatactgtgtgcccattaaaagtatattatttttaattttatgtttgacaaaatactacacttttcataaacaccttttgattgtaactcgatgtttggccggttcttccttttcttgacctgaatctaatgaggcatgaaggtgtttttgtcggttttggaaatttgaaaccggagtttttgagagcaacaggcatgcgccgccacctcgttgttgagagatcccaattaaacgggatttcctattgggaaaaccacccatcaggtggcaacgccgttcgttcatgggcttttctttattgtctctttttgtctacgtgaccaaacttcattgcatgtggatgtgtgtgtgtgtgtgtgtgtgtgtgtgtgtgtgtgtgtgtgtgtgtgtgtgttatgttgcacccccaaccccgatattaaagagcaacaacaatagagaggaagtctgatgacacaacgaaagcggagggagacggagaagtagctattgggagagagagagagtgagtggagtgtgagagggggtgggcgaaatcaaaatgagcggagttgtagttactctctcggtaggccatgctctttattgttttttttgtacattcggtgcatgtaacatttgttgccccacacaaaccgacgtataaatatacatatagtatataattcagctgcatatggcagcatatgtcgaggcaaaaccacaaaagtaaaaacggtacaacagcaagaacaacgtgaaaaactcgcccagcattgcagcaacatttgttgcagctgcagcctggatgtcttggattcctttcaaaactctgactcacttacttgttccgttcgttttttttttaaatatatatttctcctttttttttgggtgtgcagcaacatcagcgataagagcttgtgagttgcattactgtggcagtctttttatctatatggaacacatatgtatgtaggttgtgaatgcagccttctctttctgtcatccacccgcatgcatcatttgcagcaacaacaatggcttgctgtgattgctggttcagctcaacagttaacagcctgttatgggcctgttaatcaagctgtgctctctggtgctttccagttccagtgtcttctgcgattgttattcttcgatggtgttgtaaacatgtgtttacatggctcaccaccaaccggatgttgctaatgaccgcaaagctaaaaagcaaatcgaccaaggaacgaacaccattatttacaccgatatggattcccctttgggaaacttttgataaagttttgacgaatgatttttgaaacattctgtgagggtatcatttaaatgattgaaatatagatatcggatttttttagtagagaaatattgcaacaagtgaatggacatttctttgagaattagactttaagatcgatttttcctataaacttttcccgtgctcttatccaaatgtctggcagctagatatttggtacaaatcaaatataaatattaaagatgatgaaaaattaaaaatttaattaattaaaaattaaaaagatgttttaaaatatgtgatagcaaataataatgtcgtcgcttaagaggatctataattatatattacatttctcattaacattatcgcaaagcccatgcagggaaataccaactaaaacatttttatttgcgtcataagtacttgtcgtgagcaagctttaaagttttcaaatatttgtaatcagagaacggaagtttctgatgcaaaaccataacaaccctcaactgtttcataaagtccccctttcgtcgtgtattacgaaacacaaatagggctaacaaattcttggttgtcatattcgcagaccttatcgtatagttagtagtatgggtttttatcagttagttttatttgcttctgaatcacaatccacgcattcacatactaatttaccacttcctgtcttcttttcgcctgcagcaacgtaccgaactcagcccgccgacccaccaaacatccgcaaccgccgaagtaaatgcaccgctggccagctcgacgagtgcatccattgcggtaactgcgagtgcgacggcggcatcagcccctccagcaacgggcaccactaccttaggcagcagcattagcggcaatgctggctcaacctccagcggtaacagttccggagtatcggcgactggaggagcacaatccgccgtggggtctggcggctatccaaagacagaatcgagcaagtcgagtggcaccgcaagcgcaggcagtggcagtggcagcagcagcaatacaagtagcaccaagcacggcagcaacatcaaggatattagcagcagtagcaatcagcaggcatcgactgcgagcagcagtagtgcacccagcctttatgtctccgtgccactgtccacggccaacgtacctggaatcaatctgcccaccagcagcactagcagtagtaccaccagcggtaagtttgaaaaaggacacacaagaggagttaccccgtaatgtgtatatataagtaatagtttacaattttaatgcttgtgttaacatttatgtttgcagaatcccattcggcatcgtcgcgcagcagtggtgcacaatctcagcatcagcagcagctaagcaatgctttggttggtccgcccatgggaggatccgctggggcttttcatggcggaacaaccagcgctgggtcctcgtcggtcatccagcagcagagcggcaagtcatcgccggctctgggcacgctagtcagtggcaacagtggtggtagcataatctccgccagtggctttccactaccgagtggtaatctcactgccacgaccactgagagcggcaacttgaagatcagctatgagaaacagacgacacgagtgcaacaattgcaggagcaggaggcgccaccggccagacgcagcaggtatgtgtgctcgactataagtcagccacattagtggccttatcgattggaatttgttgctagtgcttttgctagtacttgatagttcttttagtttatataagatatagtagtagatatatcttttcacaaccttactttatgattttgttgttgtgttgctgtgagtttcctcattttcactctgtgatattttgttacgttctgttcctatgaaatcgaaaagaatagatttttaggaatacttgaatttcgagccagattcgagttcgtatcttttttaataacatgaatgaaagtaatagaatcttccaaacttcttatttgtttcccaaaagattcagaactgacttggataataccttattgttttctctcagttgcatctcattatctgaagcattacttttcatttcaattcaatatttcgttcacttgtgcttatgtccacgcaaagttgaagaacgtaaatccagaatgcgcgatctataaaaatcactttgtctctctctctctctctctctcgtttgcttaatgtcttcctacacaaaacacgatttaatcacccaaccaacccaccatcacacgtagatcgcgctccggtgagagtggcagtagtcaccaccatgcccatgcccatcaccaccaccatcaccccacccatcacaatagccatcaccaacaaaatccacagcagcagcaacagttacaccaacagcagcagcaaaacgcgtcatcgcatatgcacgcctgcaccaactcatcctcatccacctccacttccaccacctcttcctcgttgtccggcggaactgccccagccacgtcgtcctccaattccaagggtccctcgagatcgggcaaaaagcgtggcgctgcaatgaataagagcgagagtacgtcggtggcaacaacggcaacaccagcaactgttgctgccacaccagccgagaaacagagtcgccacagttcgcctcactacagtgcaacgccaaccccgccaccaacatctacgctaccaccagttgtatcctcgccggtggtgatgctgcaatctctgtcctcgtcctcaatagattccccgccagcgacagcagcggctggggcgacttcaaatagccgcaacacgcgcaataacagtagcaatggcaatcacaatggcgagcagacatcctcgtccagctcgtcctcttcgtcctcgtcttcgggtgggggcggcaccagtggtgcggctaatgtggttaatctgctagactctccggttaatatgtcagcttcaggaaactatcgcagcagcagcaactccaccggaaatgccttgccggcggcgagcagcaacgccagtcaagccaagcctctgaataagaaaatgttgcgtgcgcagcagacgcagctgtatcagcaacaacagcagcagcagcaatatgcaccccccgctagatccatttcccctacaaatcttagctcagcctcagcttccaactcagctagccttacgcacttgcaacaacagcaacagtcacatcagcaacatgaagatctagagattttgcaattcactaatactaataccactgcctcttccaatacgcccacgtcgaaacccaacaacagaacgcttgatctgagcacggcaagcgcttcatcgtcatcgccatctgcagtgcccgcgacaacatctcccttggtcgtactgagtaaccaattgccacttaactcggtggcagcaagtagttccaccggtggtctgaagtttacctacgagagtcagacccagatggacgtgcccatgatgcctgtgagcgccataaaggattccccgcccagttcgcccggctcagagataggatcggccatgcactccgcaactactgcacccggttccctgactggagcttcgacagcggcgactgctcaacctggaaatgtacggaagcgtggacgcaaggccaaagatgcgacgatagctgctgcagcggcggcagcggcagcagcagctgctctcagcaattctcaacaggatctcaaggatgtgcgcatactccagaatggggcgagcaatacaccgggcaatccagctggcagcacaccaacgcctcctgctactcccgcttcgtctaatgctgtcagctcagccagttcgatcattacacacacggccgcgcatatgctgggcaaccagatcaacccaaacagcagcgtggcccagaagctgtccgagcagctgcacatggaggtccaggatcactcgatctacactcccgattcaatgaactcgcaatacgccggagttccgttccccggcaagcaggtaaggatctttaaatatataccaaatgaataaaatacaaattatattattagatggaacaaactttaaatataatgttttttcttcttccagcgtaactccactgccgttcctagcaacgccacgccagctcaaaatccgctgcaatcgatgttcagcggtggcggcatgaacggcaacatgcccattccgcaaagtctggagcagctgctggagcgccagtgggagcagggctcgcagtttctcatggagcaagcgcagcactttgacagtgagtatgagtcgcatatcgggagctaaatgcttgttctatgaaattaacacttaatgtctcaatcgcagttgcctcgctgcttaattgcttgcaccagctgcagagcgaaaacctccggctggaggagcatgtgaccagcctgatagcgcgacgtgatcacctgctggcggtcaatgcgcgcctgcagatcccgctgagtaccatcgcaagcaacaccaaggccgaggcgcatggtaagtaagagagggcgcctgttctctcttgtacttggtgtcggcacttgctggctccaaccatgtggcactggaggagcccacatcccacttacacagccactgctcacagaccaaattttgcgtttagttatctgtacatccatattttgtttggtattcgttgtacatacaaattgaattcgagtccacttcgagttgtagtcttaagtaacttatattaagttaacaactaatctggttaccaatggtcatccgtataaacaaataatgtacatatatacatacacagctgtaaatcaaattacagattgttgcacaaaagcagtgattgagaaattatccattgcatttatcgactacattgacaactcgtcatctttttaaaacggaatgcttctttacccttatcatcgaaccataccacgactagataactttacccttatttatacttttaagttagttatatgtatttacggaaaatacggatctaattatacttactattgtaacgagatatgatttctttggtcaagttaatagttaagttctttggatatttaaaagcaaatacttttcgattttatttatttacaaaatgaataaaatgtttaatatattaaacacaaaaccaacacaaattctaaatttatttacttaagttttcgttatcagtgcctagagttttcagagtttgcttagccaaatattaacacgctgggttggttgatggttaactccagggcaaaagctgttacttttagttacacttaagttcgttgtgttgctgtctgttgcatgcagagaggaaatccccacacccacacactaagttcaacactcctctctctacctaccataccgcactcacaaattacaaactaatacaataccgcacaaacatataaatttcgtggagatggaacagcaacaacggggtactcacaaatctaaccaaaatgcttacagccgccatatcaacaacggcagctccaacaaccacaa

SEQ ID NO: 197 - DNA, 3526 bp, DROSOPHILA
aagaagacgggggcgaggagcggccaaaatgatgatgatggacaccatggacacctcgcaatcgcagccgatggacgtggctccggccgtagcagtggcagccacttcgggcgcagctctggtggactttaccgctgccatggtgagcatggcggccaccgccgaggctgagtccgccgagagcaacaacaaccacatcgacatggccgagtacaaggagcaccgcaagaacaaaaaaaagaaacgcgagaagcgggagcgcgagggcaaggagcaccggcatcacaaacaccgtgaccgggagcatcgcgagcatcgacgacatcgcgaccgggatcgggacaaggagcgggatcgggagggacatcaccaccatccaacgcaccaccaccccaacaacagccagcactcgacctccgcctcgtcgtcgccttcgtctgcctctaccacgccctcggcgaccatcgaatacgtgggcggatcggcttccgcctcgccctcttatctgggtggtggagcgacagggacgggtgcagccgtaggagccaccaccacatatccgcacaacttaaaaatacgcttcctgctttccgggcaacgtaccgaactcagcccgccgacccaccaaacatccgcaaccgccgaagtaaatgcaccgctggccagctcgacgagtgcatccattgcggtaactgcgagtgcgacggcggcatcagcccctccagcaacgggcaccactaccttaggcagcagcattagcggcaatgctggctcaacctccagcggtaacagttccggagtatcggcgactggaggagcacaatccgccgtggggtctggcggctatccaaagacagaatcgagcaagtcgagtggcaccgcaagcgcaggcagtggcagtggcagcagcagcaatacaagtagcaccaagcacggcagcaacatcaaggatattagcagcagtagcaatcagcaggcatcgactgcgagcagcagtagtgcacccagcctttatgtctccgtgccactgtccacggccaacgtacctggaatcaatctgcccaccagcagcactagcagtagtaccaccagcgaatcccattcggcatcgtcgcgcagcagtggtgcacaatctcagcatcagcagcagctaagcaatgctttggttggtccgcccatgggaggatccgctggggcttttcatggcggaacaaccagcgctgggtcctcgtcggtcatccagcagcagagcggcaagtcatcgccggctctgggcacgctagtcagtggcaacagtggtggtagcataatctccgccagtggctttccactaccgagtggtaatctcactgccacgaccactgagagcggcaacttgaagatcagctatgagaaacagacgacacgagtgcaacaattgcaggagcaggaggcgccaccggccagacgcagcagatcgcgctccggtgagagtggcagtagtcaccaccatgcccatgcccatcaccaccaccatcaccccacccatcacaatagccatcaccaacaaaatccacagcagcagcaacagttacaccaacagcagcagcaaaacgcgtcatcgcatatgcacgcctgcaccaactcatcctcatccacctccacttccaccacctcttcctcgttgtccggcggaactgccccagccacgtcgtcctccaattccaagggtccctcgagatcgggcaaaaagcgtggcgctgcaatgaataagagcgagagtacgtcggtggcaacaacggcaacaccagcaactgttgctgccacaccagccgagaaacagagtcgccacagttcgcctcactacagtgcaacgccaaccccgccaccaacatctacgctaccaccagttgtatcctcgccggtggtgatgctgcaatctctgtcctcgtcctcaatagattccccgccagcgacagcagcggctggggcgacttcaaatagccgcaacacgcgcaataacagtagcaatggcaatcacaatggcgagcagacatcctcgtccagctcgtcctcttcgtcctcgtcttcgggtgggggcggcaccagtggtgcggctaatgtggttaatctgctagactctccggttaatatgtcagcttcaggaaactatcgcagcagcagcaactccaccggaaatgccttgccggcggcgagcagcaacgccagtcaagccaagcctctgaataagaaaatgttgcgtgcgcagcagacgcagctgtatcagcaacaacagcagcagcagcaatatgcaccccccgctagatccatttcccctacaaatcttagctcagcctcagcttccaactcagctagccttacgcacttgcaacaacagcaacagtcacatcagcaacatgaagatctagagattttgcaattcactaatactaataccactgcctcttccaatacgcccacgtcgaaacccaacaacagaacgcttgatctgagcacggcaagcgcttcatcgtcatcgccatctgcagtgcccgcgacaacatctcccttggtcgtactgagtaaccaattgccacttaactcggtggcagcaagtagttccaccggtggtctgaagtttacctacgagagtcagacccagatggacgtgcccatgatgcctgtgagcgccataaaggattccccgcccagttcgcccggctcagagataggatcggccatgcactccgcaactactgcacccggttccctgactggagcttcgacagcggcgactgctcaacctggaaatgtacggaagcgtggacgcaaggccaaagatgcgacgatagctgctgcagcggcggcagcggcagcagcagctgctctcagcaattctcaacaggatctcaaggatgtgcgcatactccagaatggggcgagcaatacaccgggcaatccagctggcagcacaccaacgcctcctgctactcccgcttcgtctaatgctgtcagctcagccagttcgatcattacacacacggccgcgcatatgctgggcaaccagatcaacccaaacagcagcgtggcccagaagctgtccgagcagctgcacatggaggtccaggatcactcgatctacactcccgattcaatgaactcgcaatacgccggagttccgttccccggcaagcagcgtaactccactgccgttcctagcaacgccacgccagctcaaaatccgctgcaatcgatgttcagcggtggcggcatgaacggcaacatgcccattccgcaaagtctggagcagctgctggagcgccagtgggagcagggctcgcagtttctcatggagcaagcgcagcactttgacattgcctcgctgcttaattgcttgcaccagctgcagagcgaaaacctccggctggaggagcatgtgaccagcctgatagcgcgacgtgatcacctgctggcggtcaatgcgcgcctgcagatcccgctgagtaccatcgcaagcaacaccaaggccgaggcgcatggtaagtaa

SEQ ID NO: 198 - protein, 1164 aa, DROSOPHILA
MMMDTMDTSQSQPMDVAPAVAVAATSGAALVDFTAAMVSMAATAEAESAESNNNHIDMAEYKEHRKNKKKKREKREREGKEHRHHKHRDREHREHRRHRDRDRDKERDREGHHHHPTHHHPNNSQHSTSASSSPSSASTTPSATIEYVGGSASASPSYLGGGATGTGAAVGATTTYPHNLKIRFLLSGQRTELSPPTHQTSATAEVNAPLASSTSASIAVTASATAASAPPATGTTTLGSSISGNAGSTSSGNSSGVSATGGAQSAVGSGGYPKTESSKSSGTASAGSGSGSSSNTSSTKHGSNIKDISSSSNQQASTASSSSAPSLYVSVPLSTANVPGINLPTSSTSSSTTSESHSASSRSSGAQSQHQQQLSNALVGPPMGGSAGAFHGGTTSAGSSSVIQQQSGKSSPALGTLVSGNSGGSIISASGFPLPSGNLTATTTESGNLKISYEKQTTRVQQLQEQEAPPARRSRSRSGESGSSHHHAHAHHHHHHPTHHNSHHQQNPQQQQQLHQQQQQNASSHMHACTNSSSSTSTSTTSSSLSGGTAPATSSSNSKGPSRSGKKRGAAMNKSESTSVATTATPATVAATPAEKQSRHSSPHYSATPTPPPTSTLPPVVSSPVVMLQSLSSSSIDSPPATAAAGATSNSRNTRNNSSNGNHNGEQTSSSSSSSSSSSSGGGGTSGAANVVNLLDSPVNMSASGNYRSSSNSTGNALPAASSNASQAKPLNKKMLRAQQTQLYQQQQQQQQYAPPARSISPTNLSSASASNSASLTHLQQQQQSHQQHEDLEILQFTNTNTTASSNTPTSKPNNRTLDLSTASASSSSPSAVPATTSPLVVLSNQLPLNSVAASSSTGGLKFTYESQTQMDVPMMPVSAIKDSPPSSPGSEIGSAMHSATTAPGSLTGASTAATAQPGNVRKRGRKAKDATIAAAAAAAAAAAALSNSQQDLKDVRILQNGASNTPGNPAGSTPTPPATPASSNAVSSASSIITHTAAHMLGNQINPNSSVAQKLSEQLHMEVQDHSIYTPDSMNSQYAGVPFPGKQRNSTAVPSNATPAQNPLQSMFSGGGMNGNMPIPQSLEQLLERQWEQGSQFLMEQAQHFDIASLLNCLHQLQSENLRLEEHVTSLIARRDHLLAVNARLQIPLSTIASNTKAEAHGK

SEQ ID NO: 199 - DNA, 4423 bp, DROSOPHILA
agacgtcttcgaaccgttctttccctgacaacggatctttgaccaccgatcggggagtttgtagaacatgtagaatttccgtaaaatataaccatcgttctttttagtttttttttttggttgtgtgtgtttttttatatttaattttttagtaatacacagttgcccgtggaattttgtataaatcaatgatattttgtaccgaaacacaagagatatacacaaatattatttatttaattatttattgttcaattgatctaaaaaaaattttaaaaaaatttcaatgatcaaggcgaactaattaaatgcgtctaaatacatttgccatcgcccaaatcgttgtctgtctagctttcttatcagcagaaggataattgaaaaggtaaacggcaaaatatacctctcgcgtgtaactttaattgcactcctttttatcatcaatactttactatttgtttggctgtaccgtactattttttatttttggttgctgtaattttctaattcgattactatattattgaatttatagtttcttcgtgatttcattatttatgttaataacccatttttagtattgaaaaatgcaaataagtgtcaatccatcccacgtccctctcttcgttcgtatgaacgtcgagatctcgttaatggtgtttttccattttttctgtgccaactatattatatagtgggccaatttaatcccaaaaataaaaagaaaagggttgggatgttttaatttgaaaacaaacatccatcgactcgtctgatgacacggatcaagaataccacaagaataccacatgatcgcacatgtcacctttattaaatttaagggcttattcacattgaattattgaaaacctaacgtacatatatttaaactgaccaacggcgttataaaacatttagtttgatttttgtttttattaatatgttctacaacttagtggatttcttcttgcttcacttccataaagtacctaaccaaatgctagtcgtcctcttctttgtccttgcgatgcgattttttcttttcgctacgactggaggatcctccggtattgctgctgctactcttgctgcttcgttcgcttcgatctttctcacgggacttggacttgcgacggctggacttttcgcgagatcgagagcgctcccgacgggagctctctttatccttttccttctccttatctttgtccttatccttctctttatctttttccttatccttatctttatctttgtccttttctttatctttatccttgtccttgtcacgagaccgctctttgtcgcgatgtcgttcacgttcctttaggtcacgttccttgcgcttctcttccttcagcaggtgcaaatagtcttcgaagtactcctcacgataggacgagtccagggctcggtaccttggatccgcctcaaactttttcttaatatcgtaccacctggtgtgcctttcgatgtcatgtcgctcccgcagcatgtcaaggaagtcctttctcagctgtacaaaaatgataattataattccatgacttgatatttatgtataaaacatacctgatctttcttcaacagtttttccttctcgcgcctcctgcgctcacgatcgtcgtcgtaggcgccacgatctgaaacgtataggaaaaaggcattttcataaaaaggactgcgttaggatcgtcagattagcatttagcttaacaaacaaattgcaagaatatgacgtaagagtagcttaattatgttagttgtgttcttaccgcccatggccaatctctgtggcggtgccatacccattcgcatctgtggcggggcatttcctcccatcatcattcctggtggcggtcccatgtctgcaagagaaaacatagataagccgggtccaggacatgataaatataaatatgctgaacgcactcatatttggcggcatgcgcatgttgggtggcataatgccgcgcaaattgggtggtggaccgcccatctgcggcggtggcacactcatcccaggaggcggcatgccaggcggaggttgttgcatatgagcatgaccaggagtaagctctttaatcccgctgggtacccatccggcattgtcattgttccactgcgactcttgggtgggctcatagccgtagtcaaagggttctggctcgtggaagaagggttcctcagaggcgccgggtagcgggaagtttggcgccatgggtcccaatcccccacgagaatactcgcggcactcggcggtcatcacctgaatggcgttctccttaacggctctctcccggtcacctcccctatcgccgcctgtggttgagatgggtcttggcgggcgctgcatcaatcccatcccggatcgcgactggtgttgcatcataggcggcggcattcccggcgggggcatttgcatgccgctttcaccgcccattcccaccatggactggatactgtgcattccgggagggcccatgcccataccgccatctgtgaggattccaatgggggcattctgattcacattctgagtgaggctggccagtccgacaccactctccgccacgcggaagcgtttctggcgctcgcaataggcgcgccacgtctcttcgttaaagccatagttgaagtagtcggtaatatccgctcccggctttcgccacggcttctcctcaagcgaatcgatactgaactcgtgcacggccactccgttgatggtgccggcaccttcgaagtcctcgatgctaaacttccctgcctgaccagccggcttggccttgtctccggcagcaccagtgcctccagccagcaggttgggtcgctgcttgatgttgtaggtgctgggggcctgtttaatgtctccgataaccacgttgatatcgtcgtcagagtcgtcgtcttcatcatcatcggaccctgagccgttcctttctctcctcgcggcaggaccatcgctcatctcgtcgtcctctgggtctggcgatgatcgggcgtcggccctgtccgcgcaccgaccacgatcccgttctcggtcgcgctccctcctgctcctgctgtccgtgttgggcaaggcatcctcgtcctcctccatttcctgcgcgggatcgtcgaactccgagtactcgggcacctcctcctttggacagcgcggcgagtcttcagtggagttagttccggccgaagcgcccggcttttcgccggccaccaattcggccaatgcctgagcctcagccgccgccgactcgtgctccgccgtcagagaatccccgccgttgcccagctcgccggtcgtcgagtcaggattcgaggtgccatacagccagctgtcctcatttgtgtcatctgccattgtagtttctcagaaatgcagaaataagcagcagctattgcgatggacaaaaattttacaagaaacacaacgcagcagtgtgaccattccgatacataaaaaaattccataaatactataataatactgttctgtttcaataaaaatatcatttttttaataatttttttatgtcttataaataaatatttcttattaaggtccaaacaacttaaaaattaaaaataaatatggttttttttttagaagtatttaaagatttgtacgatagcacatataggagtttttagagcaatatattaaaacttttgttaaacggcttccgtttcagatacccgccaaatggagtaagcgtcgtcgtataacttacactacatacatatgtatgtagcttccttcctcgccaatatgcttcgcagatatagattcaaaggagattttgattttgtaacggtttgccatgtagttggtagtggtcttaatagaagattaaatgaaaaagtctatggatatggatttttaagataatcttgattaccagtgtttcaaaacttgggcgggaacagaagaatttcttgtttcaacaagatgtgttcaaataatttttgtgaggaaatggctcttttttaattcatttggaaaaattcaatgttcctaatggttatgttttaatatttgctaataatgttagttctcactgttatttacaacatttctgtgttccaagcagattcacttgaaattacatacccctaatcttaaatcattgtagatctaaccatgatttgcattaaccctactgtgactataatatgctatgactgtatagcggctattgatcctggtaaaaagtatatatactttatatggtcgtacatacatgcttccttccgccttttatgactactttagtatagcattttactctacgaataaatgatataagaaggacaacacagaacactatccaagaccccggtcgagccacgccctgagcctgcccagaaatgtttcgggcaggaactaacgaacgatttcaacaacaaactatagtatatcccggcg

SEQ ID NO: 200 - DNA, 2171 bp, DROSOPHILA
tttcttgtaaaatttttgtccatcgcaatagctgctgcttatttctgcatttctgagaaactacaatggcagatgacacaaatgaggacagctggctgtatggcacctcgaatcctgactcgacgaccggcgagctgggcaacggcggggattctctgacggcggagcacgagtcggcggcggctgaggctcaggcattggccgaattggtggccggcgaaaagccgggcgcttcggccggaactaactccactgaagactcgccgcgctgtccaaaggaggaggtgcccgagtactcggagttcgacgatcccgcgcaggaaatggaggaggacgaggatgccttgcccaacacggacagcaggagcaggagggagcgcgaccgagaacgggatcgtggtcggtgcgcggacagggccgacgcccgatcatcgccagacccagaggacgacgagatgagcgatggtcctgccgcgaggagagaaaggaacggctcagggtccgatgatgatgaagacgacgactctgacgacgatatcaacgtggttatcggagacattaaacaggcccccagcacctacaacatcaagcagcgacccaacctgctggctggaggcactggtgctgccggagacaaggccaagccggctggtcaggcagggaagtttagcatcgaggacttcgaaggtgccggcaccatcaacggagtggccgtgcacgagttcagtatcgattcgcttgaggagaagccgtggcgaaagccgggagcggatattaccgactacttcaactatggctttaacgaagagacgtggcgcgcctattgcgagcgccagaaacgcttccgcgtggcggagagtggtgtcggactggccagcctcactcagaatgtgaatcagaatgcccccattggaatcctcacagatggcggtatgggcatgggccctcccggaatgcacagtatccagtccatggtgggaatgggcggtgaaagcggcatgcaaatgcccccgccgggaatgccgccgcctatgatgcaacaccagtcgcgatccgggatgggattgatgcagcgcccgccaagacccatctcaaccacaggcggcgataggggaggtgaccgggagagagccgttaaggagaacgccattcaggtgatgaccgccgagtgccgcgagtattctcgtgggggattgggacccatggcgccaaacttcccgctacccggcgcctctgaggaacccttcttccacgagccagaaccctttgactacggctatgagcccacccaagagtcgcagtggaacaatgacaatgccggatgggtacccagcgggattaaagagcttactcctggtcatgctcatatgcaacaacctccgcctggcatgccgcctcctgggatgagtgtgccaccgccgcagatgggcggtccaccacccaatttgcgcggcattatgccacccaacatgcgcatgccgccaaatatgaacatgggaccgccaccaggaatgatgatgggaggaaatgccccgccacagatgcgaatgggtatggcaccgccacagagattggccatgggcgatcgtggcgcctacgacgacgatcgtgagcgcaggaggcgcgagaaggaaaaactgttgaagaaagatcagctgagaaaggacttccttgacatgctgcgggagcgacatgacatcgaaaggcacaccaggtggtacgatattaagaaaaagtttgaggcggatccaaggtaccgagccctggactcgtcctatcgtgaggagtacttcgaagactatttgcacctgctgaaggaagagaagcgcaaggaacgtgacctaaaggaacgtgaacgacatcgcgacaaagagcggtctcgtgacaaggacaaggataaagataaagaaaaggacaaagataaagataaggataaggaaaaagataaagagaaggataaggacaaagataaggagaaggaaaaggataaagagagctcccgtcgggagcgctctcgatctcgcgaaaagtccagccgtcgcaagtccaagtcccgtgagaaagatcgaagcgaacgaagcagcaagagtagcagcagcaataccggaggatcctccagtcgtagcgaaaagaaaaaatcgcatcgcaaggacaaagaagaggacgactag

SEQ ID NO: 201 - protein, 701 aa, DROSOPHILA
MADDTNEDSWLYGTSNPDSTTGELGNGGDSLTAEHESAAAEAQALAELVAGEKPGASAGTNSTEDSPRCPKEEVPEYSEFDDPAQEMEEDEDALPNTDSRSRRERDRERDRGRCADRADARSSPDPEDDEMSDGPAARRERNGSGSDDDEDDDSDDDINVVIGDIKQAPSTYNIKQRPNLLAGGTGAAGDKAKPAGQAGKFSIEDFEGAGTINGVAVHEFSIDSLEEKPWRKPGADITDYFNYGFNEETWRAYCERQKRFRVAESGVGLASLTQNVNQNAPIGILTDGGMGMGPPGMHSIQSMVGMGGESGMQMPPPGMPPPMMQHQSRSGMGLMQRPPRPISTTGGDRGGDRERAVKENAIQVMTAECREYSRGGLGPMAPNFPLPGASEEPFFHEPEPFDYGYEPTQESQWNNDNAGWVPSGIKELTPGHAHMQQPPPGMPPPGMSVPPPQMGGPPPNLRGIMPPNMRMPPNMNMGPPPGMMMGGNAPPQMRMGMAPPQRLAMGDRGAYDDDRERRRREKEKLLKKDQLRKDFLDMLRERHDIERHTRWYDIKKKFEADPRYRALDSSYREEYFEDYLHLLKEEKRKERDLKERERHRDKERSRDKDKDKDKEKDKDKDKDKEKDKEKDKDKDKEKEKDKESSRRERSRSREKSSRRKSKSREKDRSERSSKSSSSNTGGSSSRSEKKKSHRKDKEEDD

SEQ ID NO: 202 - DNA, 3953 bp, DROSOPHILA
cgttcaagctgccaataggtgactggtgcaaaacccacaggcgccctcccgctcgcacatagcacgctcgtttaagggcgcgcttactatgcgcgtgagtgcaagcaggaggcaagcaggtggcgttcgtgttgcatccgccagcttatacacggcacccagcatacccctccgacacttcactactcagaagcaatcaaagtttttgcacttttttttacacttttattataacaacttatttgttattgctatccgcaaacctagacagccactctgctcgtcgctagcgcttccgcacgcgacacgcccactcagggcgccactttcgcactgcccattcttgggggagttgggattttgttatatattttacatttgggttttttgccgccgcagacacacacgccaagcacttgttactgaccgaagaccgctcacagtcttcgcatttcgtgaagcgtccgtatcaaactcacgtttcccaaaatcgcatttgcgttcgcaggaattacaattcttttgattatttattttatttttgagcaaaaattatttttctcagatcgccatgatgaacggttgcaaatttaaactatcgagtgcatttagtcggtggtcggtatcgatacacagcttgggtatatacagagttgcattcggcccaacgctgtattttgttttaacaacatttaattaatttccacagaattttcatattaatttgtatttgaaaaaaaaagttatttccattaagttaagatatgttaattaagaattttcttattattacctctaaatattatagattttcttaacttaatagaagttaataattatgtaacaaacaatgtcgaaatgatgaaattacaatctttttatttttttagagaggaattttttattcgttaaaaaaaacccgataagctgaaaacaaacatcgcgattgaagataaatatcggttaaaaatatgttattgtgattacagaggaaaactatcgactgagcgcacccaggagcccatctccagcaccaacaagaaaaaatatgtatatttataactatatgtaaaaaggaaaaagtcgcgtcgcacaaaggtaacgtgaatactatttaatcggacctctgatgcagcgataagcaggctttttttcaacggagcctcgctaatttgaccgccctctgccagattgtctttgtctctctcgaaaagtcggtggaacggtgttgtactggaatatttgaagagtggctcatcaaacgcaacaaacatgtcaaacactccaagtctgaacagtagtagtagcaatatcagtagcaaggcgccccttgcccagaagcaggacacgtacagtagcgacagcagcgaggaagttctcgaaacagccgaggagcggaggaggcgcatcctgaaggagcgcagccggctgaaccgtccgcagcacaatatgtcaggcggaggtgctgtgcccaagcacgacataaaatccccttgcggagcatctcccagctgccaggcaactggttccggaatgggccgcctgccgctccctcccgaaaggatcaccatgctggtggacggtgtgcgcttcacggtggagcaatcactgcttacagcacatcccaccacaatgcttggcacgatgttcggctccggcttccagttcgctcataccaacgagcgcggcgagtacgacgttgccgacggcatttcgcacttagtgttcagagccattctggagtactacaaaagcggtgttatccgctgcccgcccactgtttcggtaccggaactaaaagaagcctgtgattatctgctcattcccttcgacgcaaccacggtgcgctgccagaacctaagtgagtataacgcgaactattcctgccagggcgaaccttagttgtggccacctctgcttgttttccgtctctttccttgtaacatgccctctgttatgtttgacataaaggaggccttctccacgagcttagcaacgaaggagcgcgacaacaatttgaactctttcttgaggacctaattctgcccctcatggtggcctcggcgcagcgcggggatcgagagtgtcacgttgtggtgctccttgaagacgatatggtcgagtgggatgaagagtttccgcctcagatgggcgaggagtattgtcagagtgagtgtatttaaaaaatgtgtttgcattagtatcacggaagtggaagcaacactaacatttctaacgcagccgtgcacagcactgccatgcaccgattcttcaagtacatcgagaaccgcgatgtggccaaacaggtgatgaaggatcgcggtctgaagaagatacgctgtggcatagagggataccccacccacaaagagaagatccgaaggcgtcccggtggacgggctgaagtcatctacagctatgtgcagcgacctttcatccacatgtcctgggagaaggaggaagcaaagagtcgccatgttgatttccaatgtgtaaaatccaagtctgtaacgaatctagcggaagcaaatgcagatccgccactggaattggacgcaagtgcgtaaggctcgaaacggagagtaacagctcccttaaagcccaaattcgttttcaggtggaaatccgattccccctatagcagtggctaatccgcatcccaataacgctgagctcgctgccggtatggccgtcgcacccgcagctataggcgtggctggtccagcagtcgtggtagccgtcgacgaggcggccgggggcgttgtaatgctcaacgagttggaccaggcagcgatcgctgttgccgtcggaatagttgatgaaaatatgtagatcaactgaccggctggtagtcggaacacactgccagagcatcacagcgcacagaaaaacactttacgtttttaattaacatttttatatgtatatgtaataaatggaaatttcgaatacgaaaaaccaagcaattgatttacgaatagaagaacatgaacgttaccagacattagctgtgatcacgctccgtcaaaggcctcccgttcgccctgtggaagcgtcgaagtctcccagttcagtgaacgatcgatagccattttccacttttggtagcgcaggttgcgatcggtggcactgatcgatggctttatggcttctcgggggccagatttagagagtggagcctccatttggtatcggttttcaacggctttgtaggctgccattgcagctccctaaagcatttttgaagcattattgaagctgcatttacatcacaagttaaagtactaaccagcgctgttgtctctgcgatcttcgcccggagtacttgaattcctactaggtcggattgaagctgcaggaacagattattcacagtcatgcccccgtctaccataagcttggccagtggaatcttgcagtccttgtgcatcgaatcgagaatatcacggacctggaaacaaactgcttccagggtggctcttactatgtgctcacttgttgtttcttcactcagtccacaaatgacaccgcgagcgtcctgattccagtagggggcgtagagtccattgaaagctggtacgaagtatacgtcaagagagttgtccacagtgctagccatggtttcgatctgccccgagttttgaataaggttcatgttgtcgcgcagccagttgaatgctgcaccggcaatggacacgcttccctcaagggcgtaaaatgggactgccttccgtcctagttggtagccaacagtcgttagtaatccgtgcgttgagtgtacaattgaaggtcctgtgttataaagcagaaaacatccagtgccataagtggctttggcctgacctttggccaggcattgttgacccactagagcggcttgctggtcgcccagaaccgatgttatgcctatgccttgcagaacgccctgcgcaatgctgccatagaactctgag

SEQ ID NO: 203 - DNA, 1713 bp, DROSOPHILA
cgactgagcgcacccaggagcccatctccagcaccaacaagaaaaaatatgtatatttataactatatgtaaaaaggaaaaagtcgcgtcgcacaaaggtaacgtgaatactatttaatcggacctctgatgcagcgataagcaggctttttttcaacggagcctcgctaatttgaccgccctctgccagattgtctttgtctctctcgaaaagtcggtggaacggtgttgtactggaatatttgaagagtggctcatcaaacgcaacaaacatgtcaaacactccaagtctgaacagtagtagtagcaatatcagtagcaaggcgccccttgcccagaagcaggacacgtacagtagcgacagcagcgaggaagttctcgaaacagccgaggagcggaggaggcgcatcctgaaggagcgcagccggctgaaccgtccgcagcacaatatgtcaggcggaggtgctgtgcccaagcacgacataaaatccccttgcggagcatctcccagctgccaggcaactggttccggaatgggccgcctgccgctccctcccgaaaggatcaccatgctggtggacggtgtgcgcttcacggtggagcaatcactgcttacagcacatcccaccacaatgcttggcacgatgttcggctccggcttccagttcgctcataccaacgagcgcggcgagtacgacgttgccgacggcatttcgcacttagtgttcagagccattctggagtactacaaaagcggtgttatccgctgcccgcccactgtttcggtaccggaactaaaagaagcctgtgattatctgctcattcccttcgacgcaaccacggtgcgctgccagaacctaagaggccttctccacgagcttagcaacgaaggagcgcgacaacaatttgaactctttcttgaggacctaattctgcccctcatggtggcctcggcgcagcgcggggatcgagagtgtcacgttgtggtgctccttgaagacgatatggtcgagtgggatgaagagtttccgcctcagatgggcgaggagtattgtcagaccgtgcacagcactgccatgcaccgattcttcaagtacatcgagaaccgcgatgtggccaaacaggtgatgaaggatcgcggtctgaagaagatacgctgtggcatagagggataccccacccacaaagagaagatccgaaggcgtcccggtggacgggctgaagtcatctacagctatgtgcagcgacctttcatccacatgtcctgggagaaggaggaagcaaagagtcgccatgttgatttccaatgtgtaaaatccaagtctgtaacgaatctagcggaagcaaatgcagatccgccactggaattggacgcaagtggaaatccgattccccctatagcagtggctaatccgcatcccaataacgctgagctcgctgccggtatggccgtcgcacccgcagctataggcgtggctggtccagcagtcgtggtagccgtcgacgaggcggccgggggcgttgtaatgctcaacgagttggaccaggcagcgatcgctgttgccgtcggaatagttgatgaaaatatgtagatcaactgaccggctggtagtcggaacacactgccagagcatcacagcgcacagaaaaacactttacgtttttaattaacatttttatatgtatatgtaataaatggaaatttcgaatacg

SEQ ID NO: 204 - protein, 439 aa, DROSOPHILA
MSNTPSLNSSSSNISSKAPLAQKQDTYSSDSSEEVLETAEERRRRILKERSRLNRPQHNMSGGGAVPKHDIKSPCGASPSCQATGSGMGRLPLPPERITMLVDGVRFTVEQSLLTAHPTTMLGTMFGSGFQFAHTNERGEYDVADGISHLVFRAILEYYKSGVIRCPPTVSVPELKEACDYLLIPFDATTVRCQNLRGLLHELSNEGARQQFELFLEDLILPLMVASAQRGDRECHVVVLLEDDMVEWDEEFPPQMGEEYCQTVHSTAMHRFFKYIENRDVAKQVMKDRGLKKIRCGIEGYPTHKEKIRRRPGGRAEVIYSYVQRPFIHMSWEKEEAKSRHVDFQCVKSKSVTNLAEANADPPLELDASGNPIPPIAVANPHPNNAELAAGMAVAPAAIGVAGPAVVVAVDEAAGGVVMLNELDQAAIAVAVGIVDENM

SEQ ID NO: 205 - DNA, 3509 bp, DROSOPHILA
tcgccaggttaccagaagttttcggagcttcgagctcgtagaaaaacaatcaattaggcccaaaagtagcttccaactccaagggagcgccataagtttccgtctccccccaagatcatgatggtgatgatggggcttcggatggttaggatggtccggatggctggcatgttgcccagtggcatcgacacgactttgattctctttccgcgccgactggcaggagttttatggcctgctttggcgaaatttatgttacatttttatagttccagtgtaaattgacttttaaaatgcaaaaatttatcatagcaacgggctgcagtatgcagggggaagtcccgcgccaactttaattgcctgcgccccgcaagacggtggcaactctggcggaagcttcgaaaagtcaaaagaaagctctgtgaatgggacgataaacatctgcgcggtttcaagaggaaaacaacccccaaaattgttcgccaaggctttatttattggagaacgtttagatactctaaatcataattaatgattgtaatattttactaagaaaacgatatacaactttaaaaaaggagattcacaagctagcttggctattttaatcaacgtttggtcggggtcaccaattgaaagtcattactgaatataaagctattaagccataaatttaaaaaaaatatttggttagtctaagaatactttgatttttgaattatccttacatgtacatatattgtataaaccacacgctttagatagccaaaaaactcaacggcagagtatgaaacaaaacacagtcgtaaaagcttttcgccgagtcaaaacattttgcggaccttggcactcaacgttgttttatccatatagtttttttgattaattcgctagtgcagtttacgccccaaaccacaggaaaaagctccggaaaagtttgggtcgcgtgggtgttgcccctccaccttttcgcgaggtctccaagttcaattgcatgacgaaacagccgcggaacagttgcgtcgctccttgattagctgaataagcgggaaaaatccataaattgattaagtaaaactcggaaaactaaagtgaaatgctgctgccaacggtcagcggccaatccgccgcaggatgcaaatggaaaaactgctgtcgccgcagctgggaaatgctgatggcgcccgtatcgcccaagaacctcaggaccacggcgctcttgacgagcatctaccagttggtaagttcaaacatacatgtatatatagtagcggattatataagagactggagaatggatatctcaggcggggcgcagcgcactggcacgcagggagatccgggaatccccgagcaatccacaatgtgcagccgcggccccaaatacaaaaattacgcactggatatgcaaagccataccccactgggcgcgcaaggaggcgtcgaaggcggcaatggaacgctcgcccccgcctatccccggagaagtccaggggcggagcgaaggagacgctcctgcggcgcaatgcgtccgcacttgagtttcgtgatcggaaacgtgccaggacgagcaccctttttaaagctcttctcctgaaatatattgggagttgttgcgaaagctcctagaaccagttgggaattgtagaagcagctttctggcttcgttcagtttggtgaaaaataagggtggtagcttcagcagatcgctgggttgttccggttttcgcaaacactttttgttaagtgagatcctaaacagtcgcttttctatattccccagttaatctcccactgcgcccttttcctggttctcctgggactggcgcatgccgaacagatgtgcgaggtgctggagctggacatcttggaccagaaggacaatggtttctacaacatgtcgccctttcacaacgatcttcgcctgcaaaccgctgcccaattggccgtcgccacggagaatctgctctacgtgatggctggtatcgcgggtacctacgccctgagtgccatattcctgtttttcggagtcttcaaaaatcggccgggcctaatcataccctggctggttgtggagttcctattaatgattggtttgggggcactggtcttcatgctgagggatacaaaaatcgtgcaattgctgggtggtcaagtgccctactgtaagtttggatttttaggcttaaattttgaagtaaataataacgaattatcttatatttcagttatcatttgctacatcttgatctgcatggattactgcaagtggtatgtgatgcatagcttctaccagagtctacgcaccatgaataagcttcgagagattgccactgtggccataccatgtccagctccaggagccgtaagttggtatcaatattttgaaaactttaatagtaactttcttatacattagataccctatcgtttccaacgcgagcacatgtatctgggcagcaatggatataagcacattctaaccgagtctcccgatggacagtgttaaacatgtactgaaagattggatatttttggaacttcccatcaggtgtcttgattgcaattgcactgcaaattctgtattgcaaaacagagtgtgatatggttttggtagagatactattttatatagccaacggacatggagcggcttattagaaatgcagaatcggttcaaagcgttcggcgattaaactataaactatttttgtgtagaaatagctcccaaagcaccttaaaaaataaaaaaaataataataatatttggtcactaacgcgactcgaactcggaacttcgaagcgaaggtcgcactctctaacccctaggctacggcagcgaaactctcgggatagccgagattgattaagccccaaaatcttgaaacgaaaaacttgtcttaaataaattggcgttcatacaaatatgtattgtagcaacgaattttttaaagcttagtttctcagtagatttaccactacttaactataatatgccttaaattctgttgactagcaatattttaggtatttctattttgtggcacagaacgaatatcaaataaaagtgcaaaattgtaacatatctaatgaacgtgttttttattatttccacacttactaatttaatgtacatcaagttagaaaaatgtttggaatattcagttttgggtgcttttattatttggcctcagctacagatgcacattatctaataatatctttcttgtcttaggattatttgttccactagcctttccggccctttagcttcataattggcggtggcaaagtggttcctacagtggtggtgctcagagtgctggctcccattagactcatatcgttatccaggctgtccattacaaagtccactacggttatattgttagcgccttcagaatcccccttatctgtggggatactgatctgaaactgcagcaaaaccaccagataagtgaccattgtggttaagagtcctttaaagagagtcctgttcacatcaaaaa

SEQ ID NO: 206 - DNA, 849 bp, DROSOPHILA
aaacagccgcggaacagttgcgtcgctccttgattagctgaataagcgggaaaaatccataaattgattaagtaaaactcggaaaactaaagtgaaatgctgctgccaacggtcagcggccaatccgccgcaggatgcaaatggaaaaactgctgtcgccgcagctgggaaatgctgatggcgcccgtatcgcccaagaacctcaggaccacggcgctcttgacgagcatctaccagttgttaatctcccactgcgcccttttcctggttctcctgggactggcgcatgccgaacagatgtgcgaggtgctggagctggacatcttggaccagaaggacaatggtttctacaacatgtcgccctttcacaacgatcttcgcctgcaaaccgctgcccaattggccgtcgccacggagaatctgctctacgtgatggctggtatcgcgggtacctacgccctgagtgccatattcctgtttttcggagtcttcaaaaatcggccgggcctaatcataccctggctggttgtggagttcctattaatgattggtttgggggcactggtcttcatgctgagggatacaaaaatcgtgcaattgctgggtggtcaagtgccctactttatcatttgctacatcttgatctgcatggattactgcaagtggtatgtgatgcatagcttctaccagagtctacgcaccatgaataagcttcgagagattgccactgtggccataccatgtccagctccaggagccataccctatcgtttccaacgcgagcacatgtatctgggcagcaatggatataagcacattctaaccgagtctcccgatggacagtgttaa

SEQ ID NO: 207 - protein, 250 aa, DROSOPHILA
MLLPTVSGQSAAGCKWKNCCRRSWEMLMAPVSPKNLRTTALLTSIYQLLISHCALFLVLLGLAHAEQMCEVLELDILDQKDNGFYNMSPFHNDLRLQTAAQLAVATENLLYVMAGIAGTYALSAIFLFFGVFKNRPGLIIPWLVVEFLLMIGLGALVFMLRDTKIVQLLGGQVPYFIICYILICMDYCKWYVMHSFYQSLRTMNKLREIATVAIPCPAPGAIPYRFQREHMYLGSNGYKHILTESPDGQC

SEQ ID NO: 208 - DNA, 3802 bp, DROSOPHILA
gcacctcctgcccgagcacctgcaggcgagtattaacgcccaagtgggaatgtcgcctcctaggtgcttagctccaggcacgtctggcggcctttcacatgcctgtcaaatgcctctccgccttggaagtcccctccctcccgaaccttgctgtccgctgcacctaacaaaatgtactgtagcgaagagtaagcaaatcatacttgcttacataaactattttactattatttaggatgaccccttacaacgatctgaccaaatgggtatggagccaagaatatttctacgttctctactgtagacactataatttaacgttctataacgatttttgcactaattttacttcgaatcaaattttttcttcctcatttttgtttcagtgagtctccttcgtgcagctgcggcacgtaatgacatgcggctgccaatgttgtggacgcgcattgagctcctcgcatcgccatcccgtcgcagagcatctccgcctcgagggtcttgcataatttatataaccacgagagccgccaaaaaaccgcaaatctcgcagctccccgctgcacacgcgaggcgacatcggtggcaacaacagaagcagcagcagcaactgcatttgcaacatggtggcaatgtcaaagaaaccctcagcattgtggcagattccgggaccgcttaaagtagccagcgtttccatgcagcagtgttgatggttttcccatttaactcgtggaacattcgataatggatggctgcggatgtcatcgatttcacttgcggatagaagcaaatttgtgttgtgtgaattccgacaaagagcgttttaagaacttttcctaaaattcatgttcaatttgtttgaatttcctaagaataggaaatccatcttggtaagcatggagcatataaaaataaactctcatttccaatcgaaatcgacctcgtcttggttatttccttattagcaaccatttactggaaaattaaactcggatattttactattcgtatatttgcacatcgatatacaaagagagtaaaaatatgtattagtaatgtacataacatttcttctcatactcgtacaaggaataaataggaataatttcaaaatggaatttagcgattgattgcacttctttcaaggctttcaacatcaccaaaaacggttcagcaccaaatgtaaaatatggcttatcttatcgaaaccaattcaccaatggtctatgactgcaacttcaagtctgcaaacgttttgggcactgattcccccaatttgtctcgcagtttgttgggcaaggttatttcatcagcgatgactaagtattgatcataaggaagcgattccagcagtacggcattcgctatgtcaaatcttttgggaaagtcggccgattggggccacttggcaagctcccactccaaggtccacctagcagcgaggtccttgtagtaaccctctcttaaaaaatccaccttttccaacttggccaagtgcgccaagctcgtttcgtgattggctgagaaatcgatagcacgcattagaagggcacttgttagtagggtccacttgctgtccggctcaaactccagaagatctaggcaggattgcagctgcgtttgcagctccgccaggagatccttgctgcaactcgtagtgccgtgtggcggcgcaatgtaataggctccgttttccgagccagacagaggcgagaggtcaaccttctgatcggagagcctaagggagtaagctgagtttctttggtaatcgaagttctgctgacacttccaactggttccacgcttgtccactggtagccagaactccagtaaaatcgtttgtcctcccccaactagctcagtcttcaattgctttatatctgggtagggcttgtcaagggcgaggactgctccatgtgactccagtcgaaaagcagctatccttggagcccgatccaactgggcgccgctgcccagcaaccagcgctggtagaaccaagcactgctgtcgttaggatccgtgaaagcagcggtcagcaccatttcaagctccttctgcaacttctcctcactcatgggccggtctctctgctggttggggtagagctccggaagcaggagactgcggtggtgccagctggagtagttggagaagttagccctgatcttctcggtgcagaagtccagctcctgggtggccggcaccatggccttgccggtcacatagcgcctgtagtcccaggtgtggaagttgcgctcgtcgaatttgaggtacttgttgcacagtttcacctcctgctgccagtccgccctgggattctgttccagggtccagcagcggtggtgccaggcgttgtaggacttcgggttgaccattaggcactgctcggtgaggtccagttcgcaggtgaaaatggaatgggccttgtcctcgccagcggccttcttttcactcggcttattctcaccggtttggttttccttctctggcttctcctcgctgggcgtctcgcacgtggcctcctcttcctttagcctgaacagcttctccagcacgcactccctgcggatgttccacagcatgctgacatccggattccgcagcaagatctgaactgtcaggctgagcatttcgttgtccagctcacccgcctccctcttcttctgaatccttcccatggctgcacggtaggcccggactttcagagcctgctccttcttcttccgctcgcgctcctcctccgtggtcctcacttttacgcgtccgtgcattgccctgaattgaattaaagtccaatatttacaaaatacgaaaattattagtcagcagtgtggccgcgccgggaacgataaaaaataccaaccgtcctacaagtaaataccgtcgtatgccaatttactttcaagaaataccctttccatgcactggaaataaaaaataaaatttcccaatttccttacttaagtaaaatcgtattgtttataattcattcaacaatttatattcaacaatttgaaaattaccaatagatgatactgtaattggcgtgtaaacagccaaaatactcaaatcaggaagcattttagtggcgagactccgaatttatatacaaaattaacagaatatgcaaacctctgcaacgcaatacaaaataggtgcatatcattcattcaaacaacttaacaactaatcgattttatagtcattgcaattcaatttaaaatatagaagaggccatggaatatatgtattccaaaggaaaacataaattcaattttaagatgcgaattgaaaacaaatattatcaaaatatgatatctattacctttacagcaaatacaaaacaataattattttcccaaaaagtgtaaattttaaaattccactctttatttcaaaaagatttcttcaatatctttgaaagcaatcttacatctcattttgaaagtaacgtactttcacacttcgccatcccaagttcaacagtttttaatcgaaacacatccttagaaatcgggatggtgcctgagaaaacaccttaaaatgcgaaagcgctttatttttaaattccggtgtaggaaaaaaaaagttttatgggatgtattagctcagcataagtttctaataattatatataatctgatatctaatctcatgttaattgaacattttttgacccgattgttgacaagcaattactacagaagtcttgtaccttttcctttcaaaaatgagccgtgccatcatattttcgttgatttataaagttcgtagcacattttacatttaataagatttcgt

SEQ ID NO: 209 - DNA, 1802 bp, DROSOPHILA
aaatattggactttaattcaattcagggcaatgcacggacgcgtaaaagtgaggaccacggaggaggagcgcgagcggaagaagaaggagcaggctctgaaagtccgggcctaccgtgcagccatgggaaggattcagaagaagagggaggcgggtgagctggacaacgaaatgctcagcctgacagttcagatcttgctgcggaatccggatgtcagcatgctgtggaacatccgcagggagtgcgtgctggagaagctgttcaggctaaaggaagaggaggccacgtgcgagacgcccagcgaggagaagccagagaaggaaaaccaaaccggtgagaataagccgagtgaaaagaaggccgctggcgaggacaaggcccattccattttcacctgcgaactggacctcaccgagcagtgcctaatggtcaacccgaagtcctacaacgcctggcaccaccgctgctggaccctggaacagaatcccagggcggactggcagcaggaggtgaaactgtgcaacaagtacctcaaattcgacgagcgcaacttccacacctgggactacaggcgctatgtgaccggcaaggccatggtgccggccacccaggagctggacttctgcaccgagaagatcagggctaacttctccaactactccagctggcaccaccgcagtctcctgcttccggagctctaccccaaccagcagagagaccggcccatgagtgaggagaagttgcagaaggagcttgaaatggtgctgaccgctgctttcacggatcctaacgacagcagtgcttggttctaccagcgctggttgctgggcagcggcgcccagttggatcgggctccaaggatagctgcttttcgactggagtcacatggagcagtcctcgcccttgacaagccctacccagatataaagcaattgaagactgagctagttgggggaggacaaacgattttactggagttctggctaccagtggacaagcgtggaaccagttggaagtgtcagcagaacttcgattaccaaagaaactcagcttactcccttaggctctccgatcagaaggttgacctctcgcctctgtctggctcggaaaacggagcctattacattgcgccgccacacggcactacgagttgcagcaaggatctcctggcggagctgcaaacgcagctgcaatcctgcctagatcttctggagtttgagccggacagcaagtggaccctactaacaagtgcccttctaatgcgtgctatcgatttctcagccaatcacgaaacgagcttggcgcacttggccaagttggaaaaggtggattttttaagagagggttactacaaggacctcgctgctaggtggaccttggagtgggagcttgccaagtggccccaatcggccgactttcccaaaagatttgacatagcgaatgccgtactgctggaatcgcttccttatgatcaatacttagtcatcgctgatgaaataaccttgcccaacaaactgcgagacaaattgggggaatcagtgcccaaaacgtttgcagacttgaagttgcagtcatagaccattggtgaattggtttcgataagataagccatattttacatttggtgctgaaccgtttttggtgatgttgaaagccttgaaagaagtgcaatcaatcgctaaattccattttgaaattattcctatttattccttgtacgagtatgagaagaaatgttatgtacattactaatacatatttttactctctttgtatatcgatgtgcaaatatacgaatagt

SEQ ID NO: 210 - protein, 515 aa, DROSOPHILA
MHGRVKVRTTEEERERKKKEQALKVRAYRAAMGRIQKKREAGELDNEMLSLTVQILLRNPDVSMLWNIRRECVLEKLFRLKEEEATCETPSEEKPEKENQTGENKPSEKKAAGEDKAHSIFTCELDLTEQCLMVNPKSYNAWHHRCWTLEQNPRADWQQEVKLCNKYLKFDERNFHTWDYRRYVTGKAMVPATQELDFCTEKIRANFSNYSSWHHRSLLLPELYPNQQRDRPMSEEKLQKELEMVLTAAFTDPNDSSAWFYQRWLLGSGAQLDRAPRIAAFRLESHGAVLALDKPYPDIKQLKTELVGGGQTILLEFWLPVDKRGTSWKCQQNFDYQRNSAYSLRLSDQKVDLSPLSGSENGAYYIAPPHGTTSCSKDLLAELQTQLQSCLDLLEFEPDSKWTLLTSALLMRAIDFSANHETSLAHLAKLEKVDFLREGYYKDLAARWTLEWELAKWPQSADFPKRFDIANAVLLESLPYDQYLVIADEITLPNKLRDKLGESVPKTFADLKLQS

SEQ ID NO: 211 - DNA, 5906 bp, DROSOPHILA
cgcgccaaagtttgccaactttaaaacgacgtattcccattcgactgggccctctacttaagcacgcgctggcagggaaaatgtttcggcaactttcaactttgacataatgcaaattatttgatttcgctttattatttgtttatctctgcgactcggccatctgcaagtttgctaagtgtttaatttggccaagtcatggatgggcaatggcggtggatgagaacctgccatacattttaatagccacggcacataagccacttggctttctgtgcggcatggagcggtcgtcgtggccatgtcaaaccacaaaacaatttaagttgcaaacattgaaaagttttcgatttctgttttctattctattctatttgtcgcacaacaaattcgcaacagtcgaaactttctgggggaaagcgaacaacttttcagcattttttttaacaaggaatattcggggcgtacatcctgaaatctccctgctgtcgatctccctccagctggtcatccctcatacgctccgtttgccgtgggcgagactcgtttctgtcaattgccggtggcacacagggcgtatgattgacatcgcccctcacttcgctcatggccaacacagaaggaattcaatgattagctcacttgagcgaagcgctcatccattgactccacttacattatggtgcttcatttaatatgtttggacgttgattaattgtctgtatatatttcttgtacttttcgacgtggcacaacagatgcctggatcaatttgtttgcaggaatattgtgtccccatcagctataaacaatttcgaatgctccttttgaagtttaaagtttaatttattaattaattttaaatcagttatatttataatgttacatatgtaatttttacagttcgtaaagctaactcgaaaatgttcatttttctattccactatccattcatttttcaccacttttaccatatgggatttggtttttttttttttttggggtttctctaaagttcctaaagttgacaactctcagatgtagtttctgcatacgtctctaatacaaggtttaatcgctgcccatcgtttagttctgtaagtgcttgtaaggatgtggcggaagtcaaaatatcatacaacttaggatctataaactgtgcagcgtaaggatttaacaacaattgcagctaacaaattaatcgtattgcaaaggataataagattgggaaaacaaaggtactaagctataacgaaatccaaatccaaatccttgcgtaacgcagagcaatagatactaaacaggggatatatattagcagcagaagcatctccacgacgaaaaagcacgacgaatacttcaacggcttcaacattctggtgtccttctccttgtcgggttgaaataaaaatctttaaatagaaattggacatgctttaatttcttaagatagaaacaaaagattgccatcattattatcaatagaaaaacttaaatatttcaaagagtttaacaattttaaacgtgagaacctaatagcctccatgagctgataatttattgattcccctcctcctgtcgcacatattagaaactgaaaaacctacgcttcgcacctgatctcgttacagaagttcagccaactcgagctcctggaccaactgttcccgctctcgctcccgatctctctcctggttctcccttaattcccgggccgcccgctgttgctccttctcctcctcctgctgctgttgctgcttcttgcggtgctcatagttgaccagcctctgacccaccaggtacttatccaccttgatggacagatagagcttcttcagctgatcgatctggaacaaaaggatgcatatgctgcccaccacaatgaagcttacgggatacacgagccgtgcgacgacatgctgagcataggcgtccgctaggaaaatcggaaacatcatatgtgccatgacatagggtatggccagggccagaccaatggtagtaacgaccggcacagccaagtctcgcatcacaaacttcaagtcgaaatcgcgcaatccatccatgtaggctcgatctaatgcacgcttcaagtgccaatctgggcccatcatcgtcaaggcgatggctatcttgcagtagagcactcccagcgcccaatcctcccataggaagtggattggtgtcttgcgtagtggaacgcgtaggggaatgaccaccgccaactcgatcagcaatccaatcagcaacggaaccagcacgaagattcccaggagtgttagaacgggcagggcatattgcaatgccactcggacccagtgctttatcttgtcgacaatagccgcgcggccttgtggcagcagggtgaccaccgcagctactacccggcagacaatccagcacaggtaaccaccaagctcagcggtgtacagctcatgcgagcgcagtagtcgctcgttctttctggctccttccggatcgattggatctagattttcaaccacttcgcccgctccttctgcggctgccgctccagctgccttctcatccggctgggaggaccagatcaacatcagccgccgaccgatgtagactggaaccgtgagcgtcaacatggcagcacaaacgatggacaaacacatgagtgccaacagggcacacaaacgtaaagcgaacagcgatggcttgtcgtacggctggaatcccacgggtgcatcccgttgcatgatggcctgatgggcggcggcaaggtttcgtggtgccggcgccggttccactggcggtggcggtggaggaggtggtgctggtggttgggctgccgcatccgctgcctcaccttcctggttttcattttcgccagcggcattctccacgccttcttctccagcagcgggaatttccggttccggctccggtgctgggagcaggtagcttcgtatgcccagcaaccaggccaccgctgtgcaccaaatgcgcagcaagccctttagccagatgcgtgtttgggtctgctcgaagaagcccggcaaaacgatctggaatggcgagtttagattgtttaagttattcaaataagtttgcgggtaacttacttgtaagagcagcaattgcaagttaaccgctgaatcgccactaagtgcatatggcaagaagtccggacaaaccacctgcagaattctaatgggcagccagagcatcaagagcactgcaaatccaaagatcatagccgaagcgaccagccgccggatgtgtctcacaattggtacatggatcatttcctggatgggactgaagtcaggatcgttgacattgcggaatatccagagcactcccggtcgcagcacctcgcgcaacaacgatacaaacgcagcgaagtagtaaacgtataccatgccaaacatccagtggacaaaaagtgaggtgcccggagcagccttaaaactctctttacgatccttgaggctggcatctagtaggggcaacgaacaaatgtccagccaccagccgcaaatcagcgggagtactccgatctccaacaccgacagcagcgacaccttgaccacaatatagcacaatccaatgaaccagcagactctccgcaggcggaaaactctggagaagaagtgcagcaccaccagggtcaatccaatgcagcagtaaccaaatagcgtggtaatcaggccgtgaaagtgtagcagtggtttctcgggctgcaaaagatccatggagctcagaatgaagttgcccacgcagtagggacaaaaggcgaaggtgaagatgaacatggtgttcagtgagatgatccagaagacgtgctccagaaaaactagcgagccatcgagtccgagcaggcgttcccaggtaagctcctcggcagcccgatcccactccatgggattccaattctgctcatcggcatcggcgtccacgacgggagctgcagccgctggtgcggcatcctgggcctgggcatcctgcccatcgttgtccgctggagccggcgcttcattgtcgtcggcattgttgttgtcgtcctgaggctgtggagctgcctcggcggcgggatcaggcgcaggattagcagccgctgcctgtagaggggcatcgtcccgctccagccaatcgggtccgccgccatgcaggatctgctcgcgcagccagaccaatcctatgaaggacaaaagtgtgcatgtgaccacaaaacagccccgaaaggcatccgatgccaggttttcaacggagaagatgtcaaagggcagcgtgagaatcatatcgaaggagctcgcccggaagaggtaccgataggtcctgtaggcagacagcggcaccactccgaaccaggccaaaccgaccagggtgtaatgaagccagcagcgagcgccctccaaaacggcggacatcagtcccacaaggacatcctttatcggcaggactcgcggcatatccggagcatagatgggctgaaagctgaagctgtagctgcacagctcgcagtattccttgtgcgagtagcgcatccataacatcaggcagtcctgatgaatgtacttgatcgatccagtgcagatgcacgggtagaaaagaggcctatccggctgtgcctcgcatctgcacacgcggcaaatgtcgccctgcgacaggtcgtccatactgataactttttcccggatcctgggtcttcagtttgactgaattactaaagttccactggtcatttgcgaaattcgctggacaatttccgtaattgacccgagggtacgggggttttaagacgattatacccgccttttatgtgcgccaattaacctttcgatgattacggaccgtaatgcgattgtaacacttgaattttaaccgaaaagttgggatattattacgacaaaacaaaacaagactacttctcaaaaaaaggagagccaatgtgtgcacaccatgaaattgctgattattttctcaacggagatgccaactagttcgatagattgagagaacgaaatatcgttattcattttttaatcataaattgaaaattaaaaaagattacatagttatggttaataaatataagtttttaacttaaataatataaaacaaaattatcatgaccgggaagtaacagttaatgaaacagtgtgtgcacacatcattaggcaataccaatccatctggcaaccccaccacactcattgttgttgttctgattctcttgtcattattttgcaatcaatcgctgaactttttgcactgagaaattgtagaaaataagccatgcagcgacagattattaacattctgggacagacgacgcgtcgcctggctagcggccagcaaattcgcatgctgtcagtttctgcgccgcgacaggagatcttcaaagtccagagcgccgaggactttgacaagaaagtaaagaacagccagcagcccgtgattgtggacttcttcgcaacgtaatttttatattttcaatttgaggacatggcaaattaatgtttatattgtaatccaccagctggtgcaatccctgcaagctgctaaccccgcgcatcgagagtattgtgggcgaacaggccggttccatcaagctggccaaggtggacatagatgagcacagcgaactggctctggactacgatgtggccgccgtgcccgtgctagtggtgctgcagaacggcaaggaggtgcagcgcatggtgggactccaggacgaggacaaaatccgggcctgggttgccgccgccgtcaaacaggccaagtaataattgagaaatcccaaaaaaaaagtggaggttgacctcctcgcaaataaagctgagctttaggttaattcggactttcgaaataaatgtttatttacccgttgaaacgaaaagtactacgattacacactaaaaactaaatggaaa

SEQ ID NO: 212 - DNA, 3702 bp, DROSOPHILA
tttgagaagtagtcttgttttgttttgtcgtaataatatcccaacttttcggttaaaattcaagtgttacaatcgcattacggtccgtaatcatcgaaaggttaattggcgcacataaaaggcgggtataatcgtcttaaaacccccgtaccctcgggtcaattacggaaattgtccagcgaatttcgcaaatgaccagtggaactttagtaattcagtcaaactgaagacccaggatccgggaaaaagttatcagtatggacgacctgtcgcagggcgacatttgccgcgtgtgcagatgcgaggcacagccggataggcctcttttctacccgtgcatctgcactggatcgatcaagtacattcatcaggactgcctgatgttatggatgcgctactcgcacaaggaatactgcgagctgtgcagctacagcttcagctttcagcccatctatgctccggatatgccgcgagtcctgccgataaaggatgtccttgtgggactgatgtccgccgttttggagggcgctcgctgctggcttcattacaccctggtcggtttggcctggttcggagtggtgccgctgtctgcctacaggacctatcggtacctcttccgggcgagctccttcgatatgattctcacgctgccctttgacatcttctccgttgaaaacctggcatcggatgcctttcggggctgttttgtggtcacatgcacacttttgtccttcataggattggtctggctgcgcgagcagatcctgcatggcggcggacccgattggctggagcgggacgatgcccctctacaggcagcggctgctaatcctgcgcctgatcccgccgccgaggcagctccacagcctcaggacgacaacaacaatgccgacgacaatgaagcgccggctccagcggacaacgatgggcaggatgcccaggcccaggatgccgcaccagcggctgcagctcccgtcgtggacgccgatgccgatgagcagaattggaatcccatggagtgggatcgggctgccgaggagcttacctgggaacgcctgctcggactcgatggctcgctagtttttctggagcacgtcttctggatcatctcactgaacaccatgttcatcttcaccttcgccttttgtccctactgcgtgggcaacttcattctgagctccatggatcttttgcagcccgagaaaccactgctacactttcacggcctgattaccacgctatttggttactgctgcattggattgaccctggtggtgctgcacttcttctccagagttttccgcctgcggagagtctgctggttcattggattgtgctatattgtggtcaaggtgtcgctgctgtcggtgttggagatcggagtactcccgctgatttgcggctggtggctggacatttgttcgttgcccctactagatgccagcctcaaggatcgtaaagagagttttaaggctgctccgggcacctcactttttgtccactggatgtttggcatggtatacgtttactacttcgctgcgtttgtatcgttgttgcgcgaggtgctgcgaccgggagtgctctggatattccgcaatgtcaacgatcctgacttcagtcccatccaggaaatgatccatgtaccaattgtgagacacatccggcggctggtcgcttcggctatgatctttggatttgcagtgctcttgatgctctggctgcccattagaattctgcaggtggtttgtccggacttcttgccatatgcacttagtggcgattcagcggttaacttgcaattgctgctcttacaagtaagttacccgcaaacttatttgaataacttaaacaatctaaactcgccattccagatcgttttgccgggcttcttcgagcagacccaaacacgcatctggctaaagggcttgctgcgcatttggtgcacagcggtggcctggttgctgggcatacgaagctacctgctcccagcaccggagccggaaccggaaattcccgctgctggagaagaaggcgtggagaatgccgctggcgaaaatgaaaaccaggaaggtgaggcagcggatgcggcagcccaaccaccagcaccacctcctccaccgccaccgccagtggaaccggcgccggcaccacgaaaccttgccgccgcccatcaggccatcatgcaacgggatgcacccgtgggattccagccgtacgacaagccatcgctgttcgctttacgtttgtgtgccctgttggcactcatgtgtttgtccatcgtttgtgctgccatgttgacgctcacggttccagtctacatcggtcggcggctgatgttgatctggtcctcccagccggatgagaaggcagctggagcggcagccgcagaaggagcgggcgaagtggttgaaaatctagatccaatcgatccggaaggagccagaaagaacgagcgactactgcgctcgcatgagctgtacaccgctgagcttggtggttacctgtgctggattgtctgccgggtagtagctgcggtggtcaccctgctgccacaaggccgcgcggctattgtcgacaagataaagcactgggtccgagtggcattgcaatatgccctgcccgttctaacactcctgggaatcttcgtgctggttccgttgctgattggattgctgatcgagttggcggtggtcattcccctacgcgttccactacgcaagacaccaatccacttcctatgggaggattgggcgctgggagtgctctactgcaagatagccatcgccttgacgatgatgggcccagattggcacttgaagcgtgcattagatcgagcctacatggatggattgcgcgatttcgacttgaagtttgtgatgcgagacttggctgtgccggtcgttactaccattggtctggccctggccataccctatgtcatggcacatatgatgtttccgattttcctagcggacgcctatgctcagcatgtcgtcgcacggctcgtgtatcccgtaagcttcattgtggtgggcagcatatgcatccttttgttccagatcgatcagctgaagaagctctatctgtccatcaaggtggataagtacctggtgggtcagaggctggtcaactatgagcaccgcaagaagcagcaacagcagcaggaggaggagaaggagcaacagcgggcggcccgggaattaagggagaaccaggagagagatcgggagcgagagcgggaacagttggtccaggagctcgagttggctgaacttctgtaacgagatcagatttttatttcaacccgacaaggagaaggacaccagaatgttgaagccgttgaagtattcgtcgtgctttttcgtcgtggagatgcttctgctgctaatatatatcccctgtttagtatctattgctctgcgttacgcaaggatttggatttggatttcgttatagcttagtacctttgttttcccaatcttattatcctttgcaatacgattaatttgttagctgcaattgttgttaaatccttacgctgcacagtttatagatcctaagttgtatgatattttgacttccgccacatccttacaagcacttacagaactaaacgatgggcagcgattaaaccttgtattagagacgtatgcagaaactacatctgagagttgtcaactttaggaactttagagaaacccc

SEQ ID NO: 213 - protein, 1007 aa, DROSOPHILA
MDDLSQGDICRVCRCEAQPDRPLFYPCICTGSIKYIHQDCLMLWMRYSHKEYCELCSYSFSFQPIYAPDMPRVLPIKDVLVGLMSAVLEGARCWLHYTLVGLAWFGVVPLSAYRTYRYLFRASSFDMILTLPFDIFSVENLASDAFRGCFVVTCTLLSFIGLVWLREQILHGGGPDWLERDDAPLQAAAANPAPDPAAEAAPQPQDDNNNADDNEAPAPADNDGQDAQAQDAAPAAAAPVVDADADEQNWNPMEWDRAAEELTWERLLGLDGSLVFLEHVFWIISLNTMFIFTFAFCPYCVGNFILSSMDLLQPEKPLLHFHGLITTLFGYCCIGLTLVVLHFFSRVFRLRRVCWFIGLCYIVVKVSLLSVLEIGVLPLICGWWLDICSLPLLDASLKDRKESFKAAPGTSLFVHWMFGMVYVYYFAAFVSLLREVLRPGVLWIFRNVNDPDFSPIQEMIHVPIVRHIRRLVASAMIFGFAVLLMLWLPIRILQVVCPDFLPYALSGDSAVNLQLLLLQVSYPQTYLNNLNNLNSPFQIVLPGFFEQTQTRIWLKGLLRIWCTAVAWLLGIRSYLLPAPEPEPEIPAAGEEGVENAAGENENQEGEAADAAAQPPAPPPPPPPPVEPAPAPRNLAAAHQAIMQRDAPVGFQPYDKPSLFALRLCALLALMCLSIVCAAMLTLTVPVYIGRRLMLIWSSQPDEKAAGAAAAEGAGEVVENLDPIDPEGARKNERLLRSHELYTAELGGYLCWIVCRVVAAVVTLLPQGRAAIVDKIKHWVRVALQYALPVLTLLGIFVLVPLLIGLLIELAVVIPLRVPLRKTPIHFLWEDWALGVLYCKIAIALTMMGPDWHLKRALDRAYMDGLRDFDLKFVMRDLAVPVVTTIGLALAIPYVMAHMMFPIFLADAYAQHVVARLVYPVSFIVVGSICILLFQIDQLKKLYLSIKVDKYLVGQRLVNYEHRKKQQQQQEEEKEQQRAARELRENQERDREREREQLVQELELAELL

SEQ ID NO: 214 - DNA, 3533 bp, DROSOPHILA
gtatcctcccacacggtgccgccagcgatacgcaccgtcttgcggtctttctttttccgctctgttgtctggaaggattgcagcgccgatgatgcgcgcgctgccttaatggcctcctctgcaatgggattgggtccagacttttccgccttgagcttcttcagcttctgcgttacgtcaaaagagacggcgttgatgtcgatggagggcgcggcggccacggtgggcacgtgcacagactgccggcactgataaagtttgggggcgctgctcaggactacgggagtggcagacatagccttggaagaaccacctccactgcccgtaggcacgaaggtggacataaacgtgggtggaggcggcatcgggggcgggggtacggtcagacgcgatcctccattgccctggtgatgctgcagcttgtgctgcgagttttggtacgtattggcggctatgatcgggcgcacctggttgggcacgaagagattgcgggcggggggcttcgagatctccgcctcgaagcgtgagagctcatcctcgatgttgcgacgctttgtacccatttgaagtggggttttctcttttaaaaaatcaaatcaaagcaagtttttacgaaagtgctgcagaaaactcggagtactaaacaaatatcgatttcgttcccaatcgattgcactatttttattttaaaggcctgtttagacatgtccacagaatcaggctctatttgcaatatataacaaataaaacagttattttaatatcataaaacgaagacatttaatatgttttaactatttaagaaaataactgcgactttttacacttgattacgacaagcacctttccgaacgggccttgatattttctgcaattgttgaccgttaaactagtagacgatagtgtagtgtgacggttcctcattagctggcaaatgccttatgttagtaggctaggagtggtatttcggcttcgtcgacaccagcactgattcaacttcagaattactgttttcttttagacgatctgataaataatactggaattaaaatcgccggaaaagctctagctgtgatagaaagtatcctcagcaagcaaaataaacgcagaagcaatattcctcatacacacatttaaagaaggagcacgggcatacccacacaagcgcacaaaaagtcgaggggcgacagcaaaaacaaaagtgtggaaaatcacaaaaccaataaatttctccatttatttcaaagcactgggccccaggaaaatgccaaccaaggagcgccacatagccatgatgggctaccgatcagtgggtgagttttcccagaaagttccgccagaagcactgacactgttgctgctggcactggtaattgcgtagtatttcgacaacagcaagaactatgatcaattgaccataataattacgcttcgcccgcaggcaaatcgtcgctatgcatacagttcgtggagggccagttcgtggactcctatgaccccaccattgagaacagtaagtgtcacatcccattccgtgcggatttcttagaagccaggctgactccatgcttcgatagcagtagcaatgcgtaatgatcggtaattcccattcgcagccttcaccaagatcgagcgtgtaaagtcgcaagactacatcgtaaagctcatcgacacggcgggccaggacgagtacagcatattcccggtgcagtacagcatggattaccacggctacgtcctggtgtactcgataaccagccaaaagtcttttgaggtggtgaagatcatatacgaaaaactgctcgacgtaatgggcaagaaatagtaggcttcttccccgtgggttccgcttgagagctaagctaatcttttttgcctttcagtgtacctgtggtgttggtcggcaacaagatcgatctccaccaggaacgaaccgtttccacggaggaaggcaagaagctggccgagtcctggcgagctgcatttctcgaaacgtccgccaaacagaacgaggcaagtaccaagacgaatcacactagctgaatgcaactaaggtacttccttcgcagtccgtgggagatatattccatcagctactgatcctcatcgaaaacgagaacggcaatccccaggagaagagcggttgtcttgtatcgtagggcggctgagtagctaaaactacggccgaactgttggaaatacggcaaatcgctatggcaatacgaaaatcgattatctcttatctacacagttgggtcagcgtgcatggcggggccgtaccctttgtgcgcagcaggaaaatctaaaaatctaatagacctagtattcttaagaccacacagcaagtaaccaatatcaagcgatctgaatgcgtccgctaaacgctgcccagcaggttttgtggttcgcgtctggcgcaacacaacaggtttaagttagtacgttttttttacaacaacaattcagttacaaatttcatatacaaattctgcaaacttttagtttcaatttaaatataatttttcaaaatactattcaagattgtattttaatggtcaacattttcgattgtgaaaaatatagaggttgatttactaaagttacaagtgcgtcgagaagacctgccagttgcaattccaaaaagctggatttactttatctcgtccctataactgattaaataggaccaataccttaatgatttctatagattcccaaccgttgtgaattctctggagaccaaggttcagcaagtaaaagaactgggaggatctcggtatggttcttaataagagtaatttcaaaccaaattactatttggataaactgaaagactcacctggccactctagcaatatctgcatctgttagcaaaaaaaggggtctttaaattttaataccgctatttcttatgtcacaattggtcggacgaatttgattgaattaagatttggctggcttaatatttctaaagactgattatagaaaaaagacatagaaattatttcgcattaaaccgattatgaataaaaatatttcttgtcttacttatcttaaatctaaaatgccggctaacagagcgttgcgcggactaacagtgctgttaactgtcagctgccataacccaccacgaaaatagcaaatccaccacaacgcgagttccaatcggaccgagagttaaatgttttccgattttcaaacagcgaacttgtgcgtgcgttaaaattaaactcgttcagcatttaaatcgtgtgagatctttgccttttaacggtaatttaccaaagcgagcgattcgtattaaatgtgaatgttccccatgcagaagaaagcgagcttgtttttcttctctattttctgtattgcaattgtttttttggctgactttggctgggtctgtgtgtgtatacttgtgcgcaatgcgtgggtattttctcagttttttgttctattttcaaattttattgctctcgcataatggtatacatatgtacatcattatgtttgaccgttatttcgaatctccaacaccg

SEQ ID NO: 215 - DNA, 1021 bp, DROSOPHILA
agaattactgttttcttttagacgatctgataaataatactggaattaaaatcgccggaaaagctctagctgtgatagaaacactgggccccaggaaaatgccaaccaaggagcgccacatagccatgatgggctaccgatcagtgggcaaatcgtcgctatgcatacagttcgtggagggccagttcgtggactcctatgaccccaccattgagaacaccttcaccaagatcgagcgtgtaaagtcgcaagactacatcgtaaagctcatcgacacggcgggccaggacgagtacagcatattcccggtgcagtacagcatggattaccacggctacgtcctggtgtactcgataaccagccaaaagtcttttgaggtggtgaagatcatatacgaaaaactgctcgacgtaatgggcaagaaatatgtacctgtggtgttggtcggcaacaagatcgatctccaccaggaacgaaccgtttccacggaggaaggcaagaagctggccgagtcctggcgagctgcatttctcgaaacgtccgccaaacagaacgagtccgtgggagatatattccatcagctactgatcctcatcgaaaacgagaacggcaatccccaggagaagagcggttgtcttgtatcgtagggcggctgagtagctaaaactacggccgaactgttggaaatacggcaaatcgctatggcaatacgaaaatcgattatctcttatctacacagttgggtcagcgtgcatggcggggccgtaccctttgtgcgcagcaggaaaatctaaaaatctaatagacctagtattcttaagaccacacagcaagtaaccaatatcaagcgatctgaatgcgtccgctaaacgctgcccagcaggttttgtggttcgcgtctggcgcaacacaacaggtttaagttagtacgttttttttacaacaacaattcagttacaaatttcatatacaaattctgcaaacttttagtttcaatttaaatataatttttcaaaatact

SEQ ID NO: 216 - protein, 182 aa, DROSOPHILA
MPTKERHIAMMGYRSVGKSSLCIQFVEGQFVDSYDPTIENTFTKIERVKSQDYIVKLIDTAGQDEYSIFPVQYSMDYHGYVLVYSITSQKSFEVVKIIYEKLLDVMGKKYVPVVLVGNKIDLHQERTVSTEEGKKLAESWRAAFLETSAKQNESVGDIFHQLLILIENENGNPQEKSGCLVS

SEQ ID NO: 217 - DNA, 7412 bp, DROSOPHILA
gctcgctgctcgcagtatttcagtgtgaccgaggaggaccgcagcaccatattagattcgtcatgtaatattagggggattcccgaagccgattggtattgtgtggtatttccgtatgcggaaaatagctagccatttgcaatactgcactaatttttaacgcaaagtaagaaaaaaccaaactttttttttcattaatgacatattccggcgttgtgagcaataaatgtaaccccaccgatagatggctttcgtttgtaattgtagaagaataccgggtacctggtagaaaggaaattcgaatagacatttacgtatacatatatataagtattaaatattcttaatcagtaaaaacagacaagtcgatatagccatgtccgcccgttttacgcgggcgatgaaatagcagcaaaataaataatcgaaaaaccaaaaataaacacttagttcttagttctttttgatatttttggacaataattaattttgatttgtgatagtttctgagatctcgacgtccatagggacggacatggccagatcgatcctgatcaagacctcttctacctgctacatattttttaactagtctggtatacccttttacttcacgagtatcgggtataaaatgcaggagtagtattaccaggtgaacaaaaagggacataaatatggccaaccggggcacacgttcataattaattcataattcattattccaagtaaaaaaatagggatattgttatttttagttcagcaacatactggaccatataatggtattcatatttattttgttgataaaattttagaaattattttttgataaaagtctataaaatggacggaattgcatttgtatcaattaaggggcttgcaagagagcacggatggaatgtagttctttttataacttcacttactcaaatataaggtcacttcttagtatatgtatgttcttactgcctaaagttatggatcttaatttgtgctgcattcattggcttgtgtaaagaaaggtgctaatgagtagcaatgtgcttaagataagagccgtattgatattgtggccatgtcgggtatttgcgccgttgcgcgtggtcttgcccatctggaagtgtaaagttggactggacatgcgaccgtctcctccattgctgtatgcgaggactcgcatgttgtaactcttccctggcgtcagattgttgatgtacgactccagtttctgtccgattggcactatggtattgttggccgtaatcatgttctggtccgattcccaaatgcgaacctagaaagtttcaaactgtaatcgattttcttggtcacggtgccgggagttgtaccttataaccctctactggttcctcgtcttgcgaaggtgaaacatatctccaaacaacccgcacggtagacgggtttattccatacacgtgaaccgaagatggcggcttttgcggggcctttctatatgttcgttctaaaaagcatggtgtttaagcattttctttaaatggttttttaaactgttcgttacacaccttcaaagcgttcgctttcaggtccttcacctgcagcattgtaagccatgactttaacaaagtagtaagtatctggttgtagacctacgataagcgcccaattccttgtagtacgtgacaggtagtataccgagtcttcttcctggtgcgtcgttttccaatacttcaactggtgaaagataagggtttttgacaatgcaatggaattaagtgcagtaaccataccctgtggccaatgagtttgccacgaatgttttcacgggacatgtctataggttgccaagtgacattaaagcatgtggagttgtaggcgagcgcaatgggcttttgaggagccacctgtggcatgtcctcagcggagtgtatgacagctatttcactctccggtcccttgccaacactgttaatggcttggactttgacttcgtactccgtatagtagttattaagaggaatattaaccacagccacgcccatgtgatcctgtttttttatttcgtcagatgcccattcaatggctcccttgagcttccaaaacactttatagtgtatgccgtggctatgctgctcttgcggtagaagcggatcccaggtgatagttaggtcgccaatctttccacctccaccacccacgttcctcggggctatgtatggtttgtcctcataggtgctgtaaattggcgagggggccgagggcgttccgattcccagatcgtttacagcagtaacactaaattcgtaagccgaccacggcgtcagattgacaacctcggcttgctggcgagaggtgtatcgatctacttctcgcgcctgcacatgggtcgacacattaacccaggtgcgattccagtttgtacggcctaggatgttgtagtagcggatcgcacgaccgttgtgcgatccgtccacccactcaatgatggccttcgttttacttatctgtatgacttgaacaccaccaggagcgccaggagctccctcaatagaaacactggtcttgctgctaatttcgtttaccgccgacttgacaacgcattcgtagtccccggcatcgcgcatgctcgtgttatgcactgtcaatctgttccaatctacaatctgcaataacaaaaaggttaatataaggacaggtttagtgcagatttcagaacattaacttacaatgcgtccggtgccgtcgtgattgttttttaggacttcgccgttgtgtttccaaacataagcaatgtcgaggagttcatcaaaggcggcctcgcaatgcaagaagattaagtcgtgttccttagaaacgattcgttgtggaggcgtttcaatgaaacgaatttcctctgtaaatatttgaataaataggtttacataagtcttgataaaatttcaagtatttaaatactaaattagtttattatgtattagtcattttactcttactatgctactcagacaataacaaagataggtgcattaaaaacaattttaaaaaagttctctaaacaatgcgttttatcaaagtaaatatatattatttataaactatatataaattaacttttttaaataaaatcattttgcatccaattgaggaaacacaagtaggttttttgacaaaataaaattactttttaaaaaaaatgtatattgcatatgaatgacattttctacttacgcaatacaataacacgcgcgtgcgattcgtcggtgccggcttggtttgatgcaatacatgtgtaaatgccctcatcgtcccgcgacgtgggtgatattgtcagggtaccactgggcagaatgcgccggtggcctcccgagccaatcacctgtccatccttcttccattgaaacttagggcgtggagcggcttccgggtcgcacacaattgtcgtattgccgttgtaaacagcatagacttcagattcaaggggatgctttttaaaggacggtttcatagacagcactcggagctgcgccgaagagaaggaggtcttcagttggttttgggcaccacattggtacattgcgtcgtctttatccttttctagaaatttaatggttaacacattgtcttggataatgtatcggtcgcgattaatattcgctgggtcgagtcgttcggcatttttgtaccacgtgtaattcgcgtccggaattgcaaatgcctcgcaaatgaaagtcacgtcactgttgtagtcttttatcatgtctttaagaggtatggtaaattgtgggcgcatttgaatattgatgtatatgctcttcataagtgtcttccggggattggtaatcgtgcaggagtactcgccgttgtcgttcgttgtcgcattttggattattaagacacgcccatagttgatcgtgtaggcgttgcgttggagaggtaggccttggcgggtccaattgtatgacggaatggggtaaccgaaggccatgcactccagccgaatctcgtcacctgccactggcgcctccggaaagactttagggaaggtgttggcaaatatcagtgcttgatagttgctgttgggggtaacgcgcaacggaaagaagggtccgttgcgaccggtgtccgacacaagggtctgtacggtgcacgagtagttggctctgtccacagtttctatgaaggagaagtatagggcaccatcgcgggagacgaatacgcgttgatcttcctccacgaagttaggaaaatagtctcgagcccagtaatagcgtacgtcgggatagtgctgcggggggtcacagaatatggatttgccccaattcatctcgcttgtctccgcagaccgttttagattgaattccataatgaaaccgaagtttaaatgcgcgctttcggatcgaattcgcccaaatttgttttctgccacacaatgatacgcgccctggtccagcgcttgcttcggctcgtagataatcaggttgcctcctgatatggtgtatcgatcctgcgccaggggatcaatcttttggtactcgagtctgtcgtctacgtatacctctcggtaccatgtgtatgaaggtgttggatacccgttggccaaacagctaagagtaacatcattaatcaggcgattcttgttcacatcgaaagtcgtgtcgtttggctgctttacgaaataaggaccccgtggaatccgttccatgtcgtttatatcgagtccataatggtagggacgcttgtcgtctaactttatgttgacattgtctgagctgtatagtacttttgactcgcatataaagagatttagttcaatttcataggctggcatgaacatccaccgatcccttttctttgagaaggcgtacacaacgcgatcgcgcacatatcggttgtctccatacggctggttgggacctgtaaggaaacgatgtttagcaaatcgacaattttaaatagtgaaacttgcctataaagccgcgaaggttattttgattgcgctgattaacagtccccggaagagagttgtaaaactgatttggattattgatattttggttgttgaggtcgttttgcacaaggaatctattgtcgtgcagatcttcgttttccaagggcacttgctcgtccatggaaaaggagtcttcgatctggactaactgggtgttgtcatcgttgacccaattcaacgggcccgtttgccgggcggagatgaagaatcggttctgccgttgattctgcaggatgagattcttgagtataaacgagtgcttctctacattatccacgtttatcaggtcggcattgtgtgccttgcagatctttttagcctctgcccagttgcgcttgggcgagcggatgaagcgatagcacgtctgtctgaacgagacccagtgctccgggcaaaagttatcttcatccgtataggcgtcccggtagctgacacctgctgaacctatgctgttccgattaaaggggtcgtactgtgggccgagtccgccgaggttgtttccaggcccgactacattgccgccaaggcccccacctcctgccctgccatcatagtaccccttgtaggtattagggctctgtccgtcgaccagcgtattgtcgaactggttggggtcagcgctttgctgtccagtatacagggggttgtatcgcggagagtaatccttgttgtagctaggctgatagttctgaggctgctgtcccgactgcggatccggatccggcaggttttcggaaaattggggcgtgatctggccaactaagttgagcacaagaatactcgccagaaggccgatttttgctagcatagttggtccttagctttaatagcgtgggttctggtttagatgtctcgcagcagactaaaggcacattttgctctggaattcgatagtttctgaaagcagaacgaaagaatgttcttgtttattttgcccctcttatggcataaacaaattgaatgtaaacagatttgtcgatcgcaggtcattcaaatttgtgatacgatgtgtcagcacgcgtatatacaaatgtacatatgtgtatgtgtgtgtgtatatgtgattaggcgtggtcgtaagccgcgattgatcttcgatcaactgactttttagattattcaagcacactttagttgtgtttcctattgaacaaggacagttttaactgactaaagaagggggctcaatccaagtagcccgtgctggcaaaactaattggtcgcataggcaaacacttaaccacaccttaattacgactccaggacgcagcacacgaacggttgaaaacgctaccactgcgaggtgttcctgctgacaaaaaaaaaaaccacgagttgtgcggatccggacaaaataagtatcagaggcaatttacagctttttaaattatagtttaattaaataaaaacaaaacagtccagaagctgagtcgaccagcaattagatatgcgcaagccacgactgtgggctacgctgccatcgatggtgcgatagaggcatcgatatgcatagtcgatatcccgctgtaatcgccattcgaataaatagtgtgcgcgggccatttgaaactgagttcagataacagttaacagatatatttttgtttcatacattttcacttttacacaatcactataatatacactgtaaatttgattcactgacgtgtcgcttgctgtgaacggtaagcatatgcggtcaggctaatatcaggagtatttcgaacagaagtcaacaggcaaaatgccaataaatgcaagaagggaaataaatagttgctcaatcgagcagtattgtctccgttaagctcgtaaatggcatagggcctcacagtcccttgttgaaccagacagtttccaattccggacgcttcttcctaatgctgtcgcggacctccgactccaggctatccactttgatgtccgctcgctgcttgaagaaggcgcagccaaggggcgtggcgaaaatcagcacgaagccgcagaagagcgtttggatgggagcgttggatcgcgggtatttagccaggaatcccctcttttcgaggacattcatcaacaccggtgtcagtgctgaaattgagaatagcgtaagtatcgtaagttgttacacttttgtgcgcaaggatgtccaggagacgtactcattcccggtatggccatggcgattcgacttaggattacggttgagatcccaacaacggccgccttctttgagatgcccatttcgttgctgtgttcatcgaaaagcgtcactccgttgcgcagctctctgtaaaagaggaatattatatacataattaattcactgttttacgaacggccgaagtagcgtaaattcggtaaacagctttaataaaatatgaataaattaataaaatgctggtaaaattatctctctaaaattgtagcagagctgctctaa

SEQ ID NO: 218 - DNA, 4279 bp, DROSOPHILA
cttctggactgttttgtttttatttaattaaactataatttaaaaagctgtaaattgcctctgatacttattttgtccggatccgcacaactcgtggtttttttttttgtcagcaggaacacctcgcagtggtagcgttttcaaccgttcgtgtgctgcgtcctggagtcgtaattaagaaactatcgaattccagagcaaaatgtgcctttagtctgctgcgagacatctaaaccagaacccacgctattaaagctaaggaccaactatgctagcaaaaatcggccttctggcgagtattcttgtgctcaacttagttggccagatcacgccccaattttccgaaaacctgccggatccggatccgcagtcgggacagcagcctcagaactatcagcctagctacaacaaggattactctccgcgatacaaccccctgtatactggacagcaaagcgctgaccccaaccagttcgacaatacgctggtcgacggacagagccctaatacctacaaggggtactatgatggcagggcaggaggtgggggccttggcggcaatgtagtcgggcctggaaacaacctcggcggactcggcccacagtacgacccctttaatcggaacagcataggttcagcaggtgtcagctaccgggacgcctatacggatgaagataacttttgcccggagcactgggtctcgttcagacagacgtgctatcgcttcatccgctcgcccaagcgcaactgggcagaggctaaaaagatctgcaaggcacacaatgccgacctgataaacgtggataatgtagagaagcactcgtttatactcaagaatctcatcctgcagaatcaacggcagaaccgattcttcatctccgcccggcaaacgggcccgttgaattgggtcaacgatgacaacacccagttagtccagatcgaagactccttttccatggacgagcaaccgtatggagacaaccgatatgtgcgcgatcgcgttgtgtacgccttctcaaagaaaagggatcggtggatgttcatgccagcctatgaaattgaactaaatctctttatatgcgagtcaaaagtactatacagctcagacaatgtcaacataaagttagacgacaagcgtccctaccattatggactcgatataaacgacatggaacggattccacggggtccttatttcgtaaagcagccaaacgacacgactttcgatgtgaacaagaatcgcctgattaatgatgttactcttagctgtttggccaacgggtatccaacaccttcatacacatggtaccgagaggtatacgtagacgacagactcgagtaccaaaagattgatcccctggcgcaggatcgatacaccatatcaggaggcaacctgattatctacgagccgaagcaagcgctggaccagggcgcgtatcattgtgtggcagaaaacaaatttgggcgaattcgatccgaaagcgcgcatttaaacttcggtttcattatggaattcaatctaaaacggtctgcggagacaagcgagatgaattggggcaaatccatattctgtgaccccccgcagcactatcccgacgtacgctattactgggctcgagactattttcctaacttcgtggaggaagatcaacgcgtattcgtctcccgcgatggtgccctatacttctccttcatagaaactgtggacagagccaactactcgtgcaccgtacagacccttgtgtcggacaccggtcgcaacggacccttctttccgttgcgcgttacccccaacagcaactatcaagcactgatatttgccaacaccttccctaaagtctttccggaggcgccagtggcaggtgacgagattcggctggagtgcatggccttcggttaccccattccgtcatacaattggacccgccaaggcctacctctccaacgcaacgcctacacgatcaactatgggcgtgtcttaataatccaaaatgcgacaacgaacgacaacggcgagtactcctgcacgattaccaatccccggaagacacttatgaagagcatatacatcaatattcaaatgcgcccacaatttaccatacctcttaaagacatgataaaagactacaacagtgacgtgactttcatttgcgaggcatttgcaattccggacgcgaattacacgtggtacaaaaatgccgaacgactcgacccagcgaatattaatcgcgaccgatacattatccaagacaatgtgttaaccattaaatttctagaaaaggataaagacgacgcaatgtaccaatgtggtgcccaaaaccaactgaagacctccttctcttcggcgcagctccgagtgctgtctatgaaaccgtcctttaaaaagcatccccttgaatctgaagtctatgctgtttacaacggcaatacgacaattgtgtgcgacccggaagccgctccacgccctaagtttcaatggaagaaggatggacaggtgattggctcgggaggccaccggcgcattctgcccagtggtaccctgacaatatcacccacgtcgcgggacgatgagggcatttacacatgtattgcatcaaaccaagccggcaccgacgaatcgcacgcgcgtgttattgtattgcaggaaattcgtttcattgaaacgcctccacaacgaatcgtttctaaggaacacgacttaatcttcttgcattgcgaggccgcctttgatgaactcctcgacattgcttatgtttggaaacacaacggcgaagtcctaaaaaacaatcacgacggcaccggacgcattattgtagattggaacagattgacagtgcataacacgagcatgcgcgatgccggggactacgaatgcgttgtcaagtcggcggtaaacgaaattagcagcaagaccagtgtttctattgagggagctcctggcgctcctggtggtgttcaagtcatacagataagtaaaacgaaggccatcattgagtgggtggacggatcgcacaacggtcgtgcgatccgctactacaacatcctaggccgtacaaactggaatcgcacctgggttaatgtgtcgacccatgtgcaggcgcgagaagtagatcgatacacctctcgccagcaagccgaggttgtcaatctgacgccgtggtcggcttacgaatttagtgttactgctgtaaacgatctgggaatcggaacgccctcggccccctcgccaatttacagcacctatgaggacaaaccatacatagccccgaggaacgtgggtggtggaggtggaaagattggcgacctaactatcacctgggatccgcttctaccgcaagagcagcatagccacggcatacactataaagtgttttggaagctcaagggagccattgaatgggcatctgacgaaataaaaaaacaggatcacatgggcgtggctgtggttaatattcctcttaataactactatacggagtacgaagtcaaagtccaagccattaacagtgttggcaagggaccggagagtgaaatagctgtcatacactccgctgaggacatgccacaggtggctcctcaaaagcccattgcgctcgcctacaactccacatgctttaatgtcacttggcaacctatagacatgtcccgtgaaaacattcgtggcaaactcattggccacaggttgaagtattggaaaacgacgcaccaggaagaagactcggtatactacctgtcacgtactacaaggaattgggcgcttatcgtaggtctacaaccagatacttactactttgttaaagtcatggcttacaatgctgcaggtgaaggacctgaaagcgaacgctttgaagaacgaacatatagaaaggccccgcaaaagccgccatcttcggttcacgtgtatggaataaacccgtctaccgtgcgggttgtttggagatatgtttcaccttcgcaagacgaggaaccagtagagggttataaggttcgcatttgggaatcggaccagaacatgattacggccaacaataccatagtgccaatcggacagaaactggagtcgtacatcaacaatctgacgccagggaagagttacaacatgcgagtcctcgcatacagcaatggaggagacggtcgcatgtccagtccaactttacacttccagatgggcaagaccacgcgcaacggcgcaaatacccgacatggccacaatatcaatacggctcttatcttaagcacattgctactcattagcacctttctttacacaagccaatga

SEQ ID NO: 219 - protein, 1336 aa, DROSOPHILA
MLAKIGLLASILVLNLVGQITPQFSENLPDPDPQSGQQPQNYQPSYNKDYSPRYNPLYTGQQSADPNQFDNTLVDGQSPNTYKGYYDGRAGGGGLGGNVVGPGNNLGGLGPQYDPFNRNSIGSAGVSYRDAYTDEDNFCPEHWVSFRQTCYRFIRSPKRNWAEAKKICKAHNADLINVDNVEKHSFILKNLILQNQRQNRFFISARQTGPLNWVNDDNTQLVQIEDSFSMDEQPYGDNRYVRDRVVYAFSKKRDRWMFMPAYEIELNLFICESKVLYSSDNVNIKLDDKRPYHYGLDINDMERIPRGPYFVKQPNDTTFDVNKNRLINDVTLSCLANGYPTPSYTWYREVYVDDRLEYQKIDPLAQDRYTISGGNLIIYEPKQALDQGAYHCVAENKFGRIRSESAHLNFGFIMEFNLKRSAETSEMNWGKSIFCDPPQHYPDVRYYWARDYFPNFVEEDQRVFVSRDGALYFSFIETVDRANYSCTVQTLVSDTGRNGPFFPLRVTPNSNYQALIFANTFPKVFPEAPVAGDEIRLECMAFGYPIPSYNWTRQGLPLQRNAYTINYGRVLIIQNATTNDNGEYSCTITNPRKTLMKSIYINIQMRPQFTIPLKDMIKDYNSDVTFICEAFAIPDANYTWYKNAERLDPANINRDRYIIQDNVLTIKFLEKDKDDAMYQCGAQNQLKTSFSSAQLRVLSMKPSFKKHPLESEVYAVYNGNTTIVCDPEAAPRPKFQWKKDGQVIGSGGHRRILPSGTLTISPTSRDDEGIYTCIASNQAGTDESHARVIVLQEIRFIETPPQRIVSKEHDLIFLHCEAAFDELLDIAYVWKHNGEVLKNNHDGTGRIIVDWNRLTVHNTSMRDAGDYECVVKSAVNEISSKTSVSIEGAPGAPGGVQVIQISKTKAIIEWVDGSHNGRAIRYYNILGRTNWNRTWVNVSTHVQAREVDRYTSRQQAEVVNLTPWSAYEFSVTAVNDLGIGTPSAPSPIYSTYEDKPYIAPRNVGGGGGKIGDLTITWDPLLPQEQHSHGIHYKVFWKLKGAIEWASDEIKKQDHMGVAVVNIPLNNYYTEYEVKVQAINSVGKGPESEIAVIHSAEDMPQVAPQKPIALAYNSTCFNVTWQPIDMSRENIRGKLIGHRLKYWKTTHQEEDSVYYLSRTTRNWALIVGLQPDTYYFVKVMAYNAAGEGPESERFEERTYRKAPQKPPSSVHVYGINPSTVRVVWRYVSPSQDEEPVEGYKVRIWESDQNMITANNTIVPIGQKLESYINNLTPGKSYNMRVLAYSNGGDGRMSSPTLHFQMGKTTRNGANTRHGHNINTALILSTLLLISTFLYTSQ

SEQ ID NO: 220 - DNA, 5410 bp, DROSOPHILA
ttaggtatataatggtattcgaagcgtgacagaaatatgaataattattttatatctcaacgcttccttctattcctgaagtcgcctttattttcgccaccctattgtgtcaggtctgtgtacaattgtacattgaacaacaaactatttaaaagagaatatatgttgaagctaaataataaaataaaaataactaaataaaatagtaattaagtattcggcaaaaaattgagctcagcatttgaaaattttacagcccctctgatttctatcaaagacaaaaaccttatatcaggagggtgccttcgctaaaaacaaatatacatatatgtgaaggatgtctccgctaaagatgtattcgctaaatacatcgaaaatcgcatgcgatatgatctgtagatctgcacttgaagtaaaaaattggtgaaattaacattcatgtaaataaaattataacacggttcacgaaatcaaagtcatcaaagacaaagaaatatataaacaatagatttatcagttttaagatttgcaacgtgcagcccgttgccgtccgaacttttttgttggaatatcgattacaactggattagataaccaactgaatgtaaagtggaaaatacttttcaattcctcgctacagtgacagagaatgacaaaattgatttattggttatttatcatatttaataacacaacaagtgttatgttcatttaatttctttccagtttttgtgcctctttcataaaattgacttttttcttttctgtacgtgcttaaaacaataaattctatttccttttcattcgcaattcaccgttgcgaatttttttttgctgcccagacgactttataccttttgtatcttgacacacatttagtgagctatcgataacgttcagtgcttttgattctttaaaatacttatactagtttttttcaatcgtcaccgacgcggttacactggggatttcgtgtctggtaacactgttccgtattctgaagctcgcagcattaattttataataattaattcctgccgtaatgcaacgcgtaagttgtgtagagacagtcaggcactaggtgaaaacatcaatttaacaaaatcatttgttccagggcattgactcctttttcaaacggctgccggccaaggcgaaaagtgccgaggccgaaaatggagagacgccgtcgaaggcgccaaaacgcaggaaagccgtgataatttccagcgacgaggacgaggtggtcagtccgccggagaccaagaaacgcaaggcttcgaagacagcatccagcgaggatgatgtggtggccgccacaccggaaccgattgcgaagaaggccaggaacgggcagaaaccagcgctctccaagcttaagcggcacgtagatcctacggagcttttcggtggagaaaccaaacgggtgattgtgcccaagccgaagaccaaagctgttctcgagttcgagaacgaagacattgaccggagtttaatggaagttgatctggacgagagtatcaaagaggctgcccccgaaaaaaaggttcactcgataaccaggagctctccctcgcctaaaagagcaaagaacagcagcccggaaccgccaaaacccaagtcaacaaaatccaaagccaccactccgcgtgtgaagaaggagaaacctgcggcagatctagaatccagtgtcctaacagacgaggaacgccacgagcgtaaacgtgcttccgccgtgctctaccagaagtacaaaaaccgcagttcgtgcctgaaccccggcagcaaagaaattccaaagggatccccggattgtctgagtggcttaacctttgtcgtaaccggagtcctcgagtccatggaacgagaggaggcggagtccgtgatcaaggagtatggcggaaaggtgatgaccgtggttggaaagaaactcaagtatctggtcgtaggagaagaggctggaccaaagaaattagctgtggctgaggaactcaatatacccattctcagcgaggacgggctcttcgatctaatcagggagaaatcaggaatcgctaagcaggtaaaggaagagaagaaaagcccgaagaaggagcacagctccgaggagaaagggaaaaaggaagtcaagacttctagaaggtccagtgataaaaaggagaaggaagccactaaactgaaatatggcgagaagcatgatatcgccaaacataaagtcaaggaagaacacacttccccgaaggagacgaaggataagcttaatgatgtaccagctgttaccttgaaagtaaaaaaagagcccagctcccagaaagaacaccctccgtcgccaagaactgccgatctgaagactctggatgtggtcgggatggcctgggtggacaagcacaagcctacgagcataaaagaaatcgttggccaggcaggagccgccagcaacgtgaccaagtgagtaacctaaatgtataaatggtagcttccactttcaaagttatatatttattatacagtcacaatttgaaactgaaagccaaacaggagagggttaaagttttacattattttaattttcctaggctgatgaactggttgtccaagtggtatgttaaccatgatggaaacaagaagccccaacggcccaatccttgggccaagaacgacgacggcagcttctacaaggcggccctactttcgggaccccctggaataggaaagaccacgacggcgactctggtagtgaaggagcttggcttcgatgcggtggagttcaacgcctccgacacacgcagcaaacgcttgctcaaggatgaagtgtccacgctgctgagcaacaaatccctctccggttactttacagggcaaggccaagcggtctcccgcaagcatgtgctcataatggacgaagttgatggcatggccggtaacgaggaccgtggtggaatgcaggagctgattgccttgatcaaggatagctctattccaattatttgcatgtgtaatgatcgcaaccatccaaaaattcgatccctggttaactattgctacgatctgcgatttcagaggcctcgcctcgagcaaatcaaagggaaaataatgagcatctgctttaaggaaaaagtaaagatatcaccggccaaagtggaagaaatcatagcggctaccaacaacgatattcggcaatccattaaccacattgccctgctgagcgccaaggaagacgcttcccaaaagtcagggcagcaggttgccaccaaggatctgaagctgggaccctgggaggtggtgcgaaaagtcttcaccgcggacgagcacaaacacatgtcttttgccgacaagagcgaccttttctttcacgactacagcctggccccgctctttgtgcagcaaaactatctgcaggtcctaccacagggaaacaagtaagtctagtttacctaagccaagggcgtacccattcaccaacttcactctttgcagaaaggatgtcctggcaaaggtggcagctacggcagatgccctaagcttgggtgaccttgttgaaaagcgtattcgtgcgaattctgcttggagtcttctacccactcaggcctttttcagctcggtccttcctggcgagcacatgtgtggccacttcactggacagattaactttcccgggtggctgggcaagaattccaagtctggaaaacgtgccaggctggcccaggagctgcatgatcatactagggtctgcacctcgggctcaaggctatcagtgaggctggattacgcccccttccttctggataatattgtgcgacctcttgcaaaggatgggcaggagggtgtgcccgctgctttagacgttatgaaggattaccatctactccgtgaggatctggactcgctggtcgagcttacatcctggcccggcaagaaatccccactggacgcagtggatgggagagtaaaagccgctttaacgcgatcctacaacaaggaggttatggcatactcctattccgctcaagcaggcatcaaaaagaagaaatcagaggctgctggagcggatgacgattacttggacgagggtccgggcgaagaggacggagctggtggccacttatcatcagaggaagacgaggacaaggacaacctagagctggatagtttgatcaaagccaaaaagaggacaactacgtcaaaagcgtctggtggatccaaaaaggctacatcttccacggcttcaaagtctaaggccaaggccaaaaagtgaatgcactaacgatttcctatattatatgatgatttttttgccatcaaatttcccatttgtaagtagtttttgtttaaaatctcatgaatggccggcactggccgacactgtttatactgctgaaaatatatatttaccaataaaatatgtgcttgaattgcaaaacattttattataacactgagtggcgtaggtgtaaactaaaaagggaaaaattggtaataaaataattgtctgtatgaataatactacgaaagaattgagatgatgattttttaattgatcaattgtttgctttaactgtataaggatcaagagcgcgaatatgtcaagctcaaatttatttaaaaaaaattgttggtaacgcgatcagtgatggtcactccatgctctataatttaaactaatttgtactatcgtacatttacatttgtgaaaaatacgtttacaatttaaaaattaatttaagtctttaatttatacttaattaattattataaatatattataacataataacgtttttggcctgaaacaaatcgatgatgttgcgaagcacaatcgataatgcagcaatcgatgtttcggcagccctgctatctcgtggtagcgccaaagagtatcgtatctgagttttttccccgatgtcaacgcgaacggatgcacgtactgggcagcggaaaatgcagtgaaaattgccagaaaagtcaggggacagcatgtgcgggcaaattcaagcgaagcattcgattaactgccagagtgcgcgatccacttgattttccgggaatacctgccacgttcgacgggtttcgcgttctatatttttcgcactgaaaattctcggcttacgcgcgcctgtgtgtgtgggagtgtgtatctgtgtatccgtgtaaagggcgcagctcggcgaaaaacaacacccataaatgagcgaagccagcctggcgtcgcgcttttaatcaaattaaaattaattgtagttcaaagcgtcgaactcgtccgcttttttttgttttttgcgcaactctctgaaaattcaataagcacgtaaattccagcacacacacaacgacttcaaccgcgcacacacacagatacaacgctgccgagctgggcgagcgaacgcgagagcgagagcgagcgcgcgataga

SEQ ID NO: 221 - DNA, 3158 bp, DROSOPHILA
aagctcgcagcattaattttataataattaattcctgccgtaatgcaacgcggcattgactcctttttcaaacggctgccggccaaggcgaaaagtgccgaggccgaaaatggagagacgccgtcgaaggcgccaaaacgcaggaaagccgtgataatttccagcgacgaggacgaggtggtcagtccgccggagaccaagaaacgcaaggcttcgaagacagcatccagcgaggatgatgtggtggccgccacaccggaaccgattgcgaagaaggccaggaacgggcagaaaccagcgctctccaagcttaagcggcacgtagatcctacggagcttttcggtggagaaaccaaacgggtgattgtgcccaagccgaagaccaaagctgttctcgagttcgagaacgaagacattgaccggagtttaatggaagttgatctggacgagagtatcaaagaggctgcccccgaaaaaaaggttcactcgataaccaggagctctccctcgcctaaaagagcaaagaacagcagcccggaaccgccaaaacccaagtcaacaaaatccaaagccaccactccgcgtgtgaagaaggagaaacctgcggcagatctagaatccagtgtcctaacagacgaggaacgccacgagcgtaaacgtgcttccgccgtgctctaccagaagtacaaaaaccgcagttcgtgcctgaaccccggcagcaaagaaattccaaagggatccccggattgtctgagtggcttaacctttgtcgtaaccggagtcctcgagtccatggaacgagaggaggcggagtccgtgatcaaggagtatggcggaaaggtgatgaccgtggttggaaagaaactcaagtatctggtcgtaggagaagaggctggaccaaagaaattagctgtggctgaggaactcaatatacccattctcagcgaggacgggctcttcgatctaatcagggagaaatcaggaatcgctaagcaggtaaaggaagagaagaaaagcccgaagaaggagcacagctccgaggagaaagggaaaaaggaagtcaagacttctagaaggtccagtgataaaaaggagaaggaagccactaaactgaaatatggcgagaagcatgatatcgccaaacataaagtcaaggaagaacacacttccccgaaggagacgaaggataagcttaatgatgtaccagctgttaccttgaaagtaaaaaaagagcccagctcccagaaagaacaccctccgtcgccaagaactgccgatctgaagactctggatgtggtcgggatggcctgggtggacaagcacaagcctacgagcataaaagaaatcgttggccaggcaggagccgccagcaacgtgaccaagctgatgaactggttgtccaagtggtatgttaaccatgatggaaacaagaagccccaacggcccaatccttgggccaagaacgacgacggcagcttctacaaggcggccctactttcgggaccccctggaataggaaagaccacgacggcgactctggtagtgaaggagcttggcttcgatgcggtggagttcaacgcctccgacacacgcagcaaacgcttgctcaaggatgaagtgtccacgctgctgagcaacaaatccctctccggttactttacagggcaaggccaagcggtctcccgcaagcatgtgctcataatggacgaagttgatggcatggccggtaacgaggaccgtggtggaatgcaggagctgattgccttgatcaaggatagctctattccaattatttgcatgtgtaatgatcgcaaccatccaaaaattcgatccctggttaactattgctacgatctgcgatttcagaggcctcgcctcgagcaaatcaaagggaaaataatgagcatctgctttaaggaaaaagtaaagatatcaccggccaaagtggaagaaatcatagcggctaccaacaacgatattcggcaatccattaaccacattgccctgctgagcgccaaggaagacgcttcccaaaagtcagggcagcaggttgccaccaaggatctgaagctgggaccctgggaggtggtgcgaaaagtcttcaccgcggacgagcacaaacacatgtcttttgccgacaagagcgaccttttctttcacgactacagcctggccccgctctttgtgcagcaaaactatctgcaggtcctaccacagggaaacaaaaaggatgtcctggcaaaggtggcagctacggcagatgccctaagcttgggtgaccttgttgaaaagcgtattcgtgcgaattctgcttggagtcttctacccactcaggcctttttcagctcggtccttcctggcgagcacatgtgtggccacttcactggacagattaactttcccgggtggctgggcaagaattccaagtctggaaaacgtgccaggctggcccaggagctgcatgatcatactagggtctgcacctcgggctcaaggctatcagtgaggctggattacgcccccttccttctggataatattgtgcgacctcttgcaaaggatgggcaggagggtgtgcccgctgctttagacgttatgaaggattaccatctactccgtgaggatctggactcgctggtcgagcttacatcctggcccggcaagaaatccccactggacgcagtggatgggagagtaaaagccgctttaacgcgatcctacaacaaggaggttatggcatactcctattccgctcaagcaggcatcaaaaagaagaaatcagaggctgctggagcggatgacgattacttggacgagggtccgggcgaagaggacggagctggtggccacttatcatcagaggaagacgaggacaaggacaacctagagctggatagtttgatcaaagccaaaaagaggacaactacgtcaaaagcgtctggtggatccaaaaaggctacatcttccacggcttcaaagtctaaggccaaggccaaaaagtgaatgcactaacgatttcctatattatatgatgatttttttgccatcaaatttcccatttgtaagtagtttttgtttaaaatctcatgaatggccggcactggccgacactgtttatactgctgaaaatatatatttaccaataaaatatgtgcttg

SEQ ID NO: 222 - protein, 986 aa, DROSOPHILA
MQRGIDSFFKRLPAKAKSAEAENGETPSKAPKRRKAVIISSDEDEVVSPPETKKRKASKTASSEDDVVAATPEPIAKKARNGQKPALSKLKRHVDPTELFGGETKRVIVPKPKTKAVLEFENEDIDRSLMEVDLDESIKEAAPEKKVHSITRSSPSPKRAKNSSPEPPKPKSTKSKATTPRVKKEKPAADLESSVLTDEERHERKRASAVLYQKYKNRSSCLNPGSKEIPKGSPDCLSGLTFVVTGVLESMEREEAESVIKEYGGKVMTVVGKKLKYLVVGEEAGPKKLAVAEELNIPILSEDGLFDLIREKSGIAKQVKEEKKSPKKEHSSEEKGKKEVKTSRRSSDKKEKEATKLKYGEKHDIAKHKVKEEHTSPKETKDKLNDVPAVTLKVKKEPSSQKEHPPSPRTADLKTLDVVGMAWVDKHKPTSIKEIVGQAGAASNVTKLMNWLSKWYVNHDGNKKPQRPNPWAKNDDGSFYKAALLSGPPGIGKTTTATLVVKELGFDAVEFNASDTRSKRLLKDEVSTLLSNKSLSGYFTGQGQAVSRKHVLIMDEVDGMAGNEDRGGMQELIALIKDSSIPIICMCNDRNHPKIRSLVNYCYDLRFQRPRLEQIKGKIMSICFKEKVKISPAKVEEIIAATNNDIRQSINHIALLSAKEDASQKSGQQVATKDLKLGPWEVVRKVFTADEHKHMSFADKSDLFFHDYSLAPLFVQQNYLQVLPQGNKKDVLAKVAATADALSLGDLVEKRIRANSAWSLLPTQAFFSSVLPGEHMCGHFTGQINFPGWLGKNSKSGKRARLAQELHDHTRVCTSGSRLSVRLDYAPFLLDNIVRPLAKDGQEGVPAALDVMKDYHLLREDLDSLVELTSWPGKKSPLDAVDGRVKAALTRSYNKEVMAYSYSAQAGIKKKKSEAAGADDDYLDEGPGEEDGAGGHLSSEEDEDKDNLELDSLIKAKKRTTTSKASGGSKKATSSTASKSKAKAKK

SEQ ID NO: 223 - DNA, 6534 bp, DROSOPHILA
tgcgacgctggaaattcgtataccaattttgaacgacggagaagggcacaaaggtctcgctcgagatgggcgggatgtctctggctgccactccgaagctggaggcgtagttgaagaagttctccagcattcgctgaccaaattgcttgttgtcgttggcagtggactgaaaattggaaatggggttagatttgaatcgcaattattgcgccaatcaaatcggttggcaactactgatcttcagaacttaccacggctggcgtctgttgggccaccgttagctccggttcgagggaaactccaatctgtgcgatgtgtgagatctcctggctgccgaagaccatcccgtgagcctgggcctccagctcgtgactcttcttcagctgggcgattttgaagatggcggagggcttggtgttgtttatgtgacccagatactgccatgtgggtgctgcgttcgcgtccggccagctgaaatatatcgcagcggaggtgccgacgggcaggggtgatacgccggtgaggaatactaccaggtagttgacggattctatgtcgggcacattcacgagcaacttggtggcgtccacggccacaaaatccgattggggcaggcgtccggagactatcagaccgaatagcgacattttcgagcggtggactattccagaattcgatatgcccgctttgttgggggaggagatgttatggagatgagcaaaaaggaactaccttatcgatgctttctttcctaatggtgtacagcccactacgtttctaacaaaaaaatatattgaagtatattggaatttgttgcttgcatatgttctgacagttgatgcatattccaaaatcctaaaaaaagatttttttttaaattttaaatggaactagttcaggcgactgctacttggcttgccattcacagcgatacggcaactccaaacagctgacgctgccatgcgaatgctgatatcgtagcaaaaacacagggacggtgcgaaagaagagggattttattttgttttcgcctggcaattgagtaatggccggactccttcacctgaccaagcagtgcagcatccacctacccgcccacttgggacgcgcgaaatgctacacactcgctaagggaccgggaacacacgtgcaggcaagagtggtgagtgctcggcctctagacccatttcaaggccacctgccagactatctagactagattacggtttcgtaattacgcgtaaatacgcaataaattggcggtttgattgagtggggacagccggcgatcggcggggaaaacagtctgcgtgtgcgttgttttggtccttctccacttccatccgatcaatcttgaattaatgctccacgctatggcttatttcgttgcagcaagcatagagttagaccaaaacagcgcgcacgcacacagacttggaggatcgatcgggtattggggacaatgggtcgcacgcagcgtcgccggcatcagagggccaagaagtctgacgagaattcgggctccctgcacgacctctacgttcatctacactccgttggctggcagaaccacactcacttgtcggcccaatactacgaacagacaggtcgaggactatgctctaaacagaagaccttttctccggaggatgagctcattcgcctgcccattggctgtctcataagcatagcgactctggaatctgatgggccattcaaaagtcttttcgacgaagagttatttgacaaggactccagaatttcctttcaggcactgatagcctgttatattttgtaccacaagcacttgcaggagtgtacgctagggactcactcctctacttacgctgcatatttggacaccctgcccaggtgctactccactccgtatttctgctccatacccgagctacagtgtctgccagaatccctgctagagcggaccgtggcccagaaccgtcagataagaggttactttgaaattattaagaacattgtacacaaatgcgattgctgtgggaagagctacggccaggagatttggacactcgcagactttaagtgggcctacttcagcgtgaacactaggagcgtccacctcagttcccgctttctgaaaaagcagagcaactactttcagccgcttatcagtggcgacaccaacctggcattggctccgtttctggatctttttaaccactcagatcaagtggaaatcacagcagggattgagggtcccgattacgttcttacattgaaatctctgccattttccgagaccaaaccatatgatcaattgttcatcagctacggtgctttgcccaactttaagctattgacggaatatggcttttggctaagagaaaataagcacgattactttgaagtctccctactggacattgagcacatgattaagcaaaacaaggagctatcaacgcaaacctttcaccggaacatctttaaattcatcagggagcacaatctgaacgatcaaatgttcgtgcacatcgacgatggatgctctcacaatctaagggttgtgctgcacctgatcttcaagcagcaggcctactttcccaacatcctcaaccagattgcctttggagacgccgagcagtttcaggacgtgcagccagagctgtcgtacctcgtagaatataaaataaaggaatacgagatctttggaggagagctggataagcttcctaaattgacagaaagtggtgcagtggcacggtcttacctccaagagtgtatccgttacctcgttgactttcaatcggtgcatctagctgcatagaagctgtctaggctgagcttagaatttaaaacaaggcgtttaatattgaaatgaatagtaatagatgttaaagaaaaactacttaagtttatattatttgaggcatttaaattttttttaataaatcacagaaaactgtaaactttattttgtaaatgacccctttcagctgtactcttcgctgactaaggttgatgataagaacagcagcgatgccaagcggaagaagattaccccgtttacgcccacgccgggtagcaagctcctgggtggagtattcggcaagaaggccaaaggtaggtgccgtggggcagcatcagttacccagtaaataaccaatgctcgagtatcctgattaatacagcacccctgcagatatccgcaggctttttatttagtactagcctctcacgctttttttttattgactaaccaacccaaaattgattttgttttgtggaccgagtacgtgcgtccgtttgtttctttgtttgtttgtgcgcttgttgtgttgagcgcctgtctgaatttggctgcatccaagtgaattcaatgcaggtggagccccagcagcagcagcagcaaaaacaacaacgctacagcggcagcgaccttaccgcccacaacaacagcaatcacgactatgtcatgttcatatagggggcggcagcgatggtggctcgggattgggcaagctagacgcgccggaggtcacctccaaggatatgctgcgtgccatgatggcctacatctggccaaaggaggatccactggtgcgaaagcggtaagttcatctgactatgactgagaatactttaatatctattgttttccaaattgacagggtgggtatttccctgggtctgttggctggctccaagctgctgaccgtctgtgtccccttcttgttcaaaggagctgtggacacgatgacaacgctgaacatggacactgccccggatgcggtcctctccgcagccaccgcactgatgttgggatgtaggtttcttagcctgagttccctatcataaaagatcttaactgtctaattcacgcagatggcattgctagagccagtgcggcgggctttaatgagttgcggaatgcagtgtttgccaaggtggcccaccactcgatccgaaagatcgccagcaatgtgttcctgcatctgcacaacctggatctggccttccacctgaacaaacaaactggagcactgtcaaagaccatcgatcgaggatcgaggggcattaactttgtgctctccgccatggtcttcaacattgtgcccactatctttgagctggccctcgtgtccagtatcctgggagtgaagtgtggcctggccttcgctggtgtcagcatgggctgcgttggcatatacgctgcctacactctgagtgtgacccagtggcgcacccagttccgtgtatttatgaaccaggcggagaacgaggccggcaacaaggccgtagactcgctgatcaactacgagacggtgaagtacttcaacaacgaaaagtacgaggcgggttgctacaacgaggtgctgaagaagtatgaggcggccagcttgaagactagctccagtctcgctctgctcaactttggccagaacgccattttcagcagcgcactgagtctgattatggtattggccgccaaggagattgcccaaggcaacatgacggttggagatttggtgatggtcaacgccctgctcttccagctctcgatccccctcggttttctgggcagtgtttatcgtgaggtgcgacaggctttgctggacatgcgggccatgttcacgttgatgaacgtggacagtagcattcagacagccgccaatgcccagcccctgttcgtggacaccactaactcatccattgagttccgcaacgtgagcttcgagtacgaacctggcaagcccattttccgggacctcagtttcaccatacccgccggtaaaaacgtcgccattgtgggcggctctggctcaggaaaatcgtcgatggtgcgccttctcttccgcttctttgagccaaactctggtaaagtgttgatcggtggccaggatatcagcgccgtggatttggagagcctgcgcaaggttattgcagtggtgccgcaggattcggtgctattccacaacaccatcgagcacaatatccactatggcaacctgtccaagtcccacgcagaagtgcagaatgctgcccgcatggctgatttgcatgactccatcatgagctggccaggacagtactccactcaggtaggcgaacgtggattaaagttatccggtggcgagaagcagcgcgttgccatcgctagggccatactgaagaacacccccattctgatctttgacgaggctacaagcagtctggactcgatcaccgagcatgtgagtgttgaaagcgactaagtgaacttctataaactgacggaatcggacttcttccctttgtagaacattctgcaggctctgacccgcgctacctcaggacgcactagcatttgcattgcccaccgtctctcgacagtcaaggatgcggacgagattctggtgctcgagaacggacgtgtaggtgaacgtggcacccattcggagctgctgaggcagaatggactgtatgcccgcctctgggagacgcagacgcagcagttcgacccgagccgggagatcaatgaggaggtggcagcgaagaagacgcggggcgtggcgtagacgaggctcctagcctatttatgtgtttgttataatgttataaccatccccttcgtttggcaatccctagccactaaattcaccgtagaatcctcctggaccggagattcgctattcataggcttaaagtatcattgtgacgtttgtaaatacagctgtagatatgcgataagagaaattgaacgggatgtggtacaatatggaacatttattatcagttttatcacccatacattcggttatatcgctctggtttccaaggttttgtttcgagatttaattgatttgagcgtatcgttatgtaaatgcaaaataatgtgatattattaaatgcatttcattgatatatagacaaaaccaagaggatttgtgtatatccttcaaatcggaccttcatttcttcaatataaattgttatcctctgatttataggcaatataggttttgaatttgcttaaccagatttaatatcgaatctagatacggctaaaaccgaaatagtgccgatggttagccttctccttcaatctcccccctttacggcctgcggaatgggcacatcgtagagcaagtacattaggcagttgccaatgtggcccaaaaactgctggtagttggtaacccgatgctggaactcctgccacagcggcaggacagaccgctcctcggtatcaggctgttctatcgtgatgccctgctccagcatcgttttgttggtgtatgtgaacagatacgaagctggcttctggccaatggtggtgaccaagtgggtgatgttgctctccagaccgatgctcttgccggctgtcaggaaataggcctccggatcccgctcgttccggtaccgaacatttccctcaagaatggtcagcgtgcagttgataaggtccggcgagatgaagttggtcagagttagtcccgggaaatccgccacgaaaatgacatcggagtagttgttccaggccagcacctcagtctcaatggtgcgcaatttgggccg

SEQ ID NO: 224 - DNA, 2539 bp, DROSOPHILA
cgaaagaagagggattttattttgttttcgcctggcaattgagtaatggccggactccttcacctgaccaagcagtgcagcatccacctacccgcccacttgggacgcgcgaaatgctacacactcgctaagggaccgggaacacacgtgcaggcaagagtgctgtactcttcgctgactaaggttgatgataagaacagcagcgatgccaagcggaagaagattaccccgtttacgcccacgccgggtagcaagctcctgggtggagtattcggcaagaaggccaaaggtaggtgccgtggggcagcatcagttacccagtaaataaccaatgctcgagtatcctgattaatacagcacccctgcagatatccgcaggctttttatttagtactagcctctcacgctttttttttattgactaaccaacccaaaattgattttgttttgtggaccgagtacgtgcgtccgtttgtttctttgtttgtttgtgcgcttgttgtgttgagcgcctgtctgaatttggctgcatccaagtgaattcaatgcaggtggagccccagcagcagcagcagcaaaaacaacaacgctacagcggcagcgaccttaccgcccacaacaacagcaatcacgactatgtcatgttcatatagggggcggcagcgatggtggctcgggattgggcaagctagacgcgccggaggtcacctccaaggatatgctgcgtgccatgatggcctacatctggccaaaggaggatccactggtgcgaaagcgggtgggtatttccctgggtctgttggctggctccaagctgctgaccgtctgtgtccccttcttgttcaaaggagctgtggacacgatgacaacgctgaacatggacactgccccggatgcggtcctctccgcagccaccgcactgatgttgggatatggcattgctagagccagtgcggcgggctttaatgagttgcggaatgcagtgtttgccaaggtggcccaccactcgatccgaaagatcgccagcaatgtgttcctgcatctgcacaacctggatctggccttccacctgaacaaacaaactggagcactgtcaaagaccatcgatcgaggatcgaggggcattaactttgtgctctccgccatggtcttcaacattgtgcccactatctttgagctggccctcgtgtccagtatcctgggagtgaagtgtggcctggccttcgctggtgtcagcatgggctgcgttggcatatacgctgcctacactctgagtgtgacccagtggcgcacccagttccgtgtatttatgaaccaggcggagaacgaggccggcaacaaggccgtagactcgctgatcaactacgagacggtgaagtacttcaacaacgaaaagtacgaggcgggttgctacaacgaggtgctgaagaagtatgaggcggccagcttgaagactagctccagtctcgctctgctcaactttggccagaacgccattttcagcagcgcactgagtctgattatggtattggccgccaaggagattgcccaaggcaacatgacggttggagatttggtgatggtcaacgccctgctcttccagctctcgatccccctcggttttctgggcagtgtttatcgtgaggtgcgacaggctttgctggacatgcgggccatgttcacgttgatgaacgtggacagtagcattcagacagccgccaatgcccagcccctgttcgtggacaccactaactcatccattgagttccgcaacgtgagcttcgagtacgaacctggcaagcccattttccgggacctcagtttcaccatacccgccggtaaaaacgtcgccattgtgggcggctctggctcaggaaaatcgtcgatggtgcgccttctcttccgcttctttgagccaaactctggtaaagtgttgatcggtggccaggatatcagcgccgtggatttggagagcctgcgcaaggttattgcagtggtgccgcaggattcggtgctattccacaacaccatcgagcacaatatccactatggcaacctgtccaagtcccacgcagaagtgcagaatgctgcccgcatggctgatttgcatgactccatcatgagctggccaggacagtactccactcaggtaggcgaacgtggattaaagttatccggtggcgagaagcagcgcgttgccatcgctagggccatactgaagaacacccccattctgatctttgacgaggctacaagcagtctggactcgatcaccgagcataacattctgcaggctctgacccgcgctacctcaggacgcactagcatttgcattgcccaccgtctctcgacagtcaaggatgcggacgagattctggtgctcgagaacggacgtgtaggtgaacgtggcacccattcggagctgctgaggcagaatggactgtatgcccgcctctgggagacgcagacgcagcagttcgacccgagccgggagatcaatgaggaggtggcagcgaagaagacgcggggcgtggcgtag

SEQ ID NO: 225 - protein, 606 aa, DROSOPHILA
MLRAMMAYIWPKEDPLVRKRVGISLGLLAGSKLLTVCVPFLFKGAVDTMTTLNMDTAPDAVLSAATALMLGYGIARASAAGFNELRNAVFAKVAHHSIRKIASNVFLHLHNLDLAFHLNKQTGALSKTIDRGSRGINFVLSAMVFNIVPTIFELALVSSILGVKCGLAFAGVSMGCVGIYAAYTLSVTQWRTQFRVFMNQAENEAGNKAVDSLINYETVKYFNNEKYEAGCYNEVLKKYEAASLKTSSSLALLNFGQNAIFSSALSLIMVLAAKEIAQGNMTVGDLVMVNALLFQLSIPLGFLGSVYREVRQALLDMRAMFTLMNVDSSIQTAANAQPLFVDTTNSSIEFRNVSFEYEPGKPIFRDLSFTIPAGKNVAIVGGSGSGKSSMVRLLFRFFEPNSGKVLIGGQDISAVDLESLRKVIAVVPQDSVLFHNTIEHNIHYGNLSKSHAEVQNAARMADLHDSIMSWPGQYSTQVGERGLKLSGGEKQRVAIARAILKNTPILIFDEATSSLDSITEHNILQALTRATSGRTSICIAHRLSTVKDADEILVLENGRVGERGTHSELLRQNGLYARLWETQTQQFDPSREINEEVAAKKTRGVA

SEQ ID NO: 226 - DNA, 6541 bp, DROSOPHILA
tgttccatgcgacgctggaaattcgtataccaattttgaacgacggagaagggcacaaaggtctcgctcgagatgggcgggatgtctctggctgccactccgaagctggaggcgtagttgaagaagttctccagcattcgctgaccaaattgcttgttgtcgttggcagtggactgaaaattggaaatggggttagatttgaatcgcaattattgcgccaatcaaatcggttggcaactactgatcttcagaacttaccacggctggcgtctgttgggccaccgttagctccggttcgagggaaactccaatctgtgcgatgtgtgagatctcctggctgccgaagaccatcccgtgagcctgggcctccagctcgtgactcttcttcagctgggcgattttgaagatggcggagggcttggtgttgtttatgtgacccagatactgccatgtgggtgctgcgttcgcgtccggccagctgaaatatatcgcagcggaggtgccgacgggcaggggtgatacgccggtgaggaatactaccaggtagttgacggattctatgtcgggcacattcacgagcaacttggtggcgtccacggccacaaaatccgattggggcaggcgtccggagactatcagaccgaatagcgacattttcgagcggtggactattccagaattcgatatgcccgctttgttgggggaggagatgttatggagatgagcaaaaaggaactaccttatcgatgctttctttcctaatggtgtacagcccactacgtttctaacaaaaaaatatattgaagtatattggaatttgttgcttgcatatgttctgacagttgatgcatattccaaaatcctaaaaaaagatttttttttaaattttaaatggaactagttcaggcgactgctacttggcttgccattcacagcgatacggcaactccaaacagctgacgctgccatgcgaatgctgatatcgtagcaaaaacacagggacggtgcgaaagaagagggattttattttgttttcgcctggcaattgagtaatggccggactccttcacctgaccaagcagtgcagcatccacctacccgcccacttgggacgcgcgaaatgctacacactcgctaagggaccgggaacacacgtgcaggcaagagtggtgagtgctcggcctctagacccatttcaaggccacctgccagactatctagactagattacggtttcgtaattacgcgtaaatacgcaataaattggcggtttgattgagtggggacagccggcgatcggcggggaaaacagtctgcgtgtgcgttgttttggtccttctccacttccatccgatcaatcttgaattaatgctccacgctatggcttatttcgttgcagcaagcatagagttagaccaaaacagcgcgcacgcacacagacttggaggatcgatcgggtattggggacaatgggtcgcacgcagcgtcgccggcatcagagggccaagaagtctgacgagaattcgggctccctgcacgacctctacgttcatctacactccgttggctggcagaaccacactcacttgtcggcccaatactacgaacagacaggtcgaggactatgctctaaacagaagaccttttctccggaggatgagctcattcgcctgcccattggctgtctcataagcatagcgactctggaatctgatgggccattcaaaagtcttttcgacgaagagttatttgacaaggactccagaatttcctttcaggcactgatagcctgttatattttgtaccacaagcacttgcaggagtgtacgctagggactcactcctctacttacgctgcatatttggacaccctgcccaggtgctactccactccgtatttctgctccatacccgagctacagtgtctgccagaatccctgctagagcggaccgtggcccagaaccgtcagataagaggttactttgaaattattaagaacattgtacacaaatgcgattgctgtgggaagagctacggccaggagatttggacactcgcagactttaagtgggcctacttcagcgtgaacactaggagcgtccacctcagttcccgctttctgaaaaagcagagcaactactttcagccgcttatcagtggcgacaccaacctggcattggctccgtttctggatctttttaaccactcagatcaagtggaaatcacagcagggattgagggtcccgattacgttcttacattgaaatctctgccattttccgagaccaaaccatatgatcaattgttcatcagctacggtgctttgcccaactttaagctattgacggaatatggcttttggctaagagaaaataagcacgattactttgaagtctccctactggacattgagcacatgattaagcaaaacaaggagctatcaacgcaaacctttcaccggaacatctttaaattcatcagggagcacaatctgaacgatcaaatgttcgtgcacatcgacgatggatgctctcacaatctaagggttgtgctgcacctgatcttcaagcagcaggcctactttcccaacatcctcaaccagattgcctttggagacgccgagcagtttcaggacgtgcagccagagctgtcgtacctcgtagaatataaaataaaggaatacgagatctttggaggagagctggataagcttcctaaattgacagaaagtggtgcagtggcacggtcttacctccaagagtgtatccgttacctcgttgactttcaatcggtgcatctagctgcatagaagctgtctaggctgagcttagaatttaaaacaaggcgtttaatattgaaatgaatagtaatagatgttaaagaaaaactacttaagtttatattatttgaggcatttaaattttttttaataaatcacagaaaactgtaaactttattttgtaaatgacccctttcagctgtactcttcgctgactaaggttgatgataagaacagcagcgatgccaagcggaagaagattaccccgtttacgcccacgccgggtagcaagctcctgggtggagtattcggcaagaaggccaaaggtaggtgccgtggggcagcatcagttacccagtaaataaccaatgctcgagtatcctgattaatacagcacccctgcagatatccgcaggctttttatttagtactagcctctcacgctttttttttattgactaaccaacccaaaattgattttgttttgtggaccgagtacgtgcgtccgtttgtttctttgtttgtttgtgcgcttgttgtgttgagcgcctgtctgaatttggctgcatccaagtgaattcaatgcaggtggagccccagcagcagcagcagcaaaaacaacaacgctacagcggcagcgaccttaccgcccacaacaacagcaatcacgactatgtcatgttcatatagggggcggcagcgatggtggctcgggattgggcaagctagacgcgccggaggtcacctccaaggatatgctgcgtgccatgatggcctacatctggccaaaggaggatccactggtgcgaaagcggtaagttcatctgactatgactgagaatactttaatatctattgttttccaaattgacagggtgggtatttccctgggtctgttggctggctccaagctgctgaccgtctgtgtccccttcttgttcaaaggagctgtggacacgatgacaacgctgaacatggacactgccccggatgcggtcctctccgcagccaccgcactgatgttgggatgtaggtttcttagcctgagttccctatcataaaagatcttaactgtctaattcacgcagatggcattgctagagccagtgcggcgggctttaatgagttgcggaatgcagtgtttgccaaggtggcccaccactcgatccgaaagatcgccagcaatgtgttcctgcatctgcacaacctggatctggccttccacctgaacaaacaaactggagcactgtcaaagaccatcgatcgaggatcgaggggcattaactttgtgctctccgccatggtcttcaacattgtgcccactatctttgagctggccctcgtgtccagtatcctgggagtgaagtgtggcctggccttcgctggtgtcagcatgggctgcgttggcatatacgctgcctacactctgagtgtgacccagtggcgcacccagttccgtgtatttatgaaccaggcggagaacgaggccggcaacaaggccgtagactcgctgatcaactacgagacggtgaagtacttcaacaacgaaaagtacgaggcgggttgctacaacgaggtgctgaagaagtatgaggcggccagcttgaagactagctccagtctcgctctgctcaactttggccagaacgccattttcagcagcgcactgagtctgattatggtattggccgccaaggagattgcccaaggcaacatgacggttggagatttggtgatggtcaacgccctgctcttccagctctcgatccccctcggttttctgggcagtgtttatcgtgaggtgcgacaggctttgctggacatgcgggccatgttcacgttgatgaacgtggacagtagcattcagacagccgccaatgcccagcccctgttcgtggacaccactaactcatccattgagttccgcaacgtgagcttcgagtacgaacctggcaagcccattttccgggacctcagtttcaccatacccgccggtaaaaacgtcgccattgtgggcggctctggctcaggaaaatcgtcgatggtgcgccttctcttccgcttctttgagccaaactctggtaaagtgttgatcggtggccaggatatcagcgccgtggatttggagagcctgcgcaaggttattgcagtggtgccgcaggattcggtgctattccacaacaccatcgagcacaatatccactatggcaacctgtccaagtcccacgcagaagtgcagaatgctgcccgcatggctgatttgcatgactccatcatgagctggccaggacagtactccactcaggtaggcgaacgtggattaaagttatccggtggcgagaagcagcgcgttgccatcgctagggccatactgaagaacacccccattctgatctttgacgaggctacaagcagtctggactcgatcaccgagcatgtgagtgttgaaagcgactaagtgaacttctataaactgacggaatcggacttcttccctttgtagaacattctgcaggctctgacccgcgctacctcaggacgcactagcatttgcattgcccaccgtctctcgacagtcaaggatgcggacgagattctggtgctcgagaacggacgtgtaggtgaacgtggcacccattcggagctgctgaggcagaatggactgtatgcccgcctctgggagacgcagacgcagcagttcgacccgagccgggagatcaatgaggaggtggcagcgaagaagacgcggggcgtggcgtagacgaggctcctagcctatttatgtgtttgttataatgttataaccatccccttcgtttggcaatccctagccactaaattcaccgtagaatcctcctggaccggagattcgctattcataggcttaaagtatcattgtgacgtttgtaaatacagctgtagatatgcgataagagaaattgaacgggatgtggtacaatatggaacatttattatcagttttatcacccatacattcggttatatcgctctggtttccaaggttttgtttcgagatttaattgatttgagcgtatcgttatgtaaatgcaaaataatgtgatattattaaatgcatttcattgatatatagacaaaaccaagaggatttgtgtatatccttcaaatcggaccttcatttcttcaatataaattgttatcctctgatttataggcaatataggttttgaatttgcttaaccagatttaatatcgaatctagatacggctaaaaccgaaatagtgccgatggttagccttctccttcaatctcccccctttacggcctgcggaatgggcacatcgtagagcaagtacattaggcagttgccaatgtggcccaaaaactgctggtagttggtaacccgatgctggaactcctgccacagcggcaggacagaccgctcctcggtatcaggctgttctatcgtgatgccctgctccagcatcgttttgttggtgtatgtgaacagatacgaagctggcttctggccaatggtggtgaccaagtgggtgatgttgctctccagaccgatgctcttgccggctgtcaggaaataggcctccggatcccgctcgttccggtaccgaacatttccctcaagaatggtcagcgtgcagttgataaggtccggcgagatgaagttggtcagagttagtcccgggaaatccgccacgaaaatgacatcggagtagttgttccaggccagcacctcagtctcaatggtgcgcaatttgggccg

SEQ ID NO: 227 - DNA, 2182 bp, DROSOPHILA
gacggtgcgaaagaagagggattttattttgttttcgcctggcaattgagtaatggccggactccttcacctgaccaagcagtgcagcatccacctacccgcccacttgggacgcgcgaaatgctacacactcgctaagggaccgggaacacacgtgcaggcaagagtgctgtactcttcgctgactaaggttgatgataagaacagcagcgatgccaagcggaagaagattaccccgtttacgcccacgccgggtagcaagctcctgggtggagtattcggcaagaaggccaaagggggcggcagcgatggtggctcgggattgggcaagctagacgcgccggaggtcacctccaaggatatgctgcgtgccatgatggcctacatctggccaaaggaggatccactggtgcgaaagcgggtgggtatttccctgggtctgttggctggctccaagctgctgaccgtctgtgtccccttcttgttcaaaggagctgtggacacgatgacaacgctgaacatggacactgccccggatgcggtcctctccgcagccaccgcactgatgttgggatatggcattgctagagccagtgcggcgggctttaatgagttgcggaatgcagtgtttgccaaggtggcccaccactcgatccgaaagatcgccagcaatgtgttcctgcatctgcacaacctggatctggccttccacctgaacaaacaaactggagcactgtcaaagaccatcgatcgaggatcgaggggcattaactttgtgctctccgccatggtcttcaacattgtgcccactatctttgagctggccctcgtgtccagtatcctgggagtgaagtgtggcctggccttcgctggtgtcagcatgggctgcgttggcatatacgctgcctacactctgagtgtgacccagtggcgcacccagttccgtgtatttatgaaccaggcggagaacgaggccggcaacaaggccgtagactcgctgatcaactacgagacggtgaagtacttcaacaacgaaaagtacgaggcgggttgctacaacgaggtgctgaagaagtatgaggcggccagcttgaagactagctccagtctcgctctgctcaactttggccagaacgccattttcagcagcgcactgagtctgattatggtattggccgccaaggagattgcccaaggcaacatgacggttggagatttggtgatggtcaacgccctgctcttccagctctcgatccccctcggttttctgggcagtgtttatcgtgaggtgcgacaggctttgctggacatgcgggccatgttcacgttgatgaacgtggacagtagcattcagacagccgccaatgcccagcccctgttcgtggacaccactaactcatccattgagttccgcaacgtgagcttcgagtacgaacctggcaagcccattttccgggacctcagtttcaccatacccgccggtaaaaacgtcgccattgtgggcggctctggctcaggaaaatcgtcgatggtgcgccttctcttccgcttctttgagccaaactctggtaaagtgttgatcggtggccaggatatcagcgccgtggatttggagagcctgcgcaaggttattgcagtggtgccgcaggattcggtgctattccacaacaccatcgagcacaatatccactatggcaacctgtccaagtcccacgcagaagtgcagaatgctgcccgcatggctgatttgcatgactccatcatgagctggccaggacagtactccactcaggtaggcgaacgtggattaaagttatccggtggcgagaagcagcgcgttgccatcgctagggccatactgaagaacacccccattctgatctttgacgaggctacaagcagtctggactcgatcaccgagcataacattctgcaggctctgacccgcgctacctcaggacgcactagcatttgcattgcccaccgtctctcgacagtcaaggatgcggacgagattctggtgctcgagaacggacgtgtaggtgaacgtggcacccattcggagctgctgaggcagaatggactgtatgcccgcctctgggagacgcagacgcagcagttcgacccgagccgggagatcaatgaggaggtggcagcgaagaagacgcggggcgtggcgtag

SEQ ID NO: 228 - protein, 606 aa, DROSOPHILA; identical to SEQ ID NO: 225

SEQ ID NO: 229 - DNA, 4198 bp, DROSOPHILA
ggcattcaatttttaatatttgccttgcaaattttgtataaaatgcatttgttgtctacaagcctccaggccgccatcccctggaattaccaggcccccgccccttaaaattggtgggcggaagaagaccggagaccgatgactggcggagggcacactatcgcccaataacacccggaacggggaagctccaaaagctggaaaactggcaactggcaacaggaagcagccagcgccgggccaaagtgggaaagtgaatggagcacggcaatgtcaacacatggaaattgcaaggacagcggcaaaaaaaaagagggaaaacagggaaaaccgaaaaggaaaacgaatagcagcagccacagtaactataaactggaatgatattgccaacgaacatactagaacggcactgaaaacaatttactcctttgaaataaacccatataattccaaactatcttcgtatctggtgcaaaagtatctaaaactccatcgggttaaagtacgcgagatgcagtgaaagctttcttgttaataaaatgttgttttcagtgcaggcaaatggcaaaagcgcagctagtgaacccagtaggacccaagatagctcctagaacgaagttaggctgggccgggcggaagcaataaattggttaggtaaaaagcttgtcgcaaacgcagacaccggtaaaaagcggcacgcgaggccgagacaggcccgtaatttttgcccaccaaaaaggcagaggaggaggaggagacggagtgaaatagaggtgcccaaggatggtttatttcccatgaggttgcaaattaatactaaatgtctgccatgcaaacacataattgactttaaatttgttttgacaagaagaagtggaaaactttgcaactttgatgggggtgggagaaactgcaagttttgtttccgacttagaaccaccaaaaggtttataattgttttaaaatagcccagaattccagaacgtaaaaacataattttaaatattctaaaataatttatttctattttctgcttatacggatataaggtgtataattctaatcctatgtcttcaaattgtccataaaagaactagttatgaaccttcttgatggacacgctggttatatcggcctccttgagctcctcatctgtagtgccattgtagatgtgcttcagatacagattgaagtagtctgtgtagttcatcggtgtggatatttgatgctttcgaactggaagccgtggcgaaagggacaacatgctggcccactggccgtcgcagaggtcatcataacgcagtagtcccacctcgtgacctcccaaatcgccaggaccacggcacatgggctgctgtccgtcccagagtttcagcacaaactctcgtatccacctggccaaatatagagctcggcaatcgcagtgccagggattcttgtccagtttgacggccaccaaatttttcaggccatgaagagctccatgcggcagaaacatcagcttgttggagtcaatgcggctaataaaaaatatttgagtttaaataaacggaaccaaagaaaatatttctattagaacttacagtttttccaattgtgaaagcggctcgaaagcgcgggcatcgaaatttttaagtatgttattgttaagcaacaaaatctttaggttatttaacccttggaagtcatcggcttccaaggtggttaggttattggaaaatagggtcaagcgtgtgagggcactaacattcaggaatagatcagctggaatgctggacatggagttctggcccaaaaataattcatttagattgttcagctccacaaaggcattgccatctatctgtttgagcaaagggttagataaaatgtaattaaattttttgggtatgcctacatgacttatccgattcgtggtcaaatcaagggtgaccaaattggccaaattattgaatatggttcccgacagcgatgagatgcgattgttatgcagcgaaagagttcgtagactccttagtcccgcaaagaagtcatcatcaatcttagctaaaaaggataaaggataaaaagcatatgtttccagatccctttaaacgtaaatcgtttcttacctatttgattccatccaaagtccagggtcttcagcttggtcagatatctaatgctgcccgaactaagctcgctgattttgtttctagacatatccagctcctctagcatcagctgatctcgcaggaggttgggtggaaagttctgaatctgattgtcgcacatattaatcacggtgagcctttgggcatggtaaaatattgattcgggcagcattcctatctcgtttttactcagatccagaatattcaggtttcgtagcttccagaaggtacgatgatcaatatcctccagttgattgttttgaatgcgcaaaaccaagagactatccagatcctgaaacaaatcgaagggcagaaaatccaaaacattgtgcgatatatccaactctttaagcacggttagtcctcgaaaggtatccttgtgcagggtggaaaggatgttccgcgaaagatctctaagagattattagaaacttatatacttttgtgtaaccaagagactagcaaactcacatgttgaccatattcatgggtatcacctgagtgacaggcactgatttaagattggtattccagcaggtgaagctcttggtgtccggattgcagcgacacacgcctgaggtgcagtgattccactcgatttggctgccagtggccaagtgccagacgggctgctccacggatcgtagtcgactctcgatctgtcgcacccgcttcaccagatcaaagttggccaaatgggacatggcattaatctcaccgccattgacatctccatcattatgtccattcgccttggacttaggtggttttttatcgttcgcagcggactgggttccatttggcattgagttgataagcatcaatagctgggatacaatacccagtgattcacatgcattcagactgcagtttcttgtgtccgaggaaatgagagggagcaggtacctctgccggaactcatccagactctggatgggcggctcctttgcctgtgaaggtcctgtgatcacctcggccggatccatcagcaagactaagctgactagttgccatactccaagcgacatgtcttcagcgtatttcacacacgttctgagaagtctacactgatttgcagtcccatttatagtccgtctgattccgatttaattcgtaattctaataatttacgaaaatttgcatttactgcaattacgcttaagtagctcacagcgccacatgggactgcagcgcatcttgtggtcgcccaggcctcaccagatggaacatctctgctctccggaatacaaaggccggctagaaaccgaaagtctcagtttggacgcgttatgatcaacaaagtgtctagtcgtcatgtctgaacaatcagctgaagagctcggttggggaaccccccagaacgcgactcgaatgcctggtaattcgcaattctattgcatcgtataatccatacatttccgtttaaaaccctggttaagcaaagtatattgtgtgacgcttagtattattgttttgggttaaataattctgaacagattcatggggtgcagcagaaatgttacacaaaacaatctaaagctaatgaaaagtgttctcactgttaaaattcgaccttcatccttcgaactcgcttcttgtaccattgaaccttcgaaatcactaaattagatggcactaagacctagatggcacattaacagggggaaattatagagaacttttctaaagtttctgcagaacaaagttttttccgaaactggaatacaaagagtagtttttgagccgtgctcgtagatggcgccacataatggtttgggaatttgcttagaatgtctgtcaaaattttagttgcatcaaaagttgtccttataccattcctgcataggagtagctatttatacttcacttaataagcttaacatttttctattaactataatattttttgtgaactacatttacagtatttatagtatgagactaaaagctcttcctggactgacacctatcaaaagccagctcgatgggttttacgcacagcctttccgccacttctttgtacttggtcaaaagactattcggat

SEQ ID NO: 230 - DNA, 2012 bp, DROSOPHILA
tgaaatacgctgaagacatgtcgcttggagtatggcaactagtcagcttagtcttgctgatggatccggccgaggtgatcacaggaccttcacaggcaaaggagccgcccatccagagtctggatgagttccggcagaggtacctgctccctctcatttcctcggacacaagaaactgcagtctgaatgcatgtgaatcactgggtattgtatcccagctattgatgcttatcaactcaatgccaaatggaacccagtccgctgcgaacgataaaaaaccacctaagtccaaggcgaatggacataatgatggagatgtcaatggcggtgagattaatgccatgtcccatttggccaactttgatctggtgaagcgggtgcgacagatcgagagtcgactacgatccgtggagcagcccgtctggcacttggccactggcagccaaatcgagtggaatcactgcacctcaggcgtgtgtcgctgcaatccggacaccaagagcttcacctgctggaataccaatcttaaatcagtgcctgtcactcaggtgatacccatgaatatggtcaacatagatctttcgcggaacatcctttccaccctgcacaaggatacctttcgaggactaaccgtgcttaaagagttggatatatcgcacaatgttttggattttctgcccttcgatttgtttcaggatctggatagtctcttggttttgcgcattcaaaacaatcaactggaggatattgatcatcgtaccttctggaagctacgaaacctgaatattctggatctgagtaaaaacgagataggaatgctgcccgaatcaatattttaccatgcccaaaggctcaccgtgattaatatgtgcgacaatcagattcagaactttccacccaacctcctgcgagatcagctgatgctagaggagctggatatgtctagaaacaaaatcagcgagcttagttcgggcagcattagatatctgaccaagctgaagaccctggactttggatggaatcaaatagctaagattgatgatgacttctttgcgggactaaggagtctacgaactctttcgctgcataacaatcgcatctcatcgctgtcgggaaccatattcaataatttggccaatttggtcacccttgatttgaccacgaatcggataagtcatgtaggcatacccaaaaaatttaattacattttatctaaccctttgctcaaacagatagatggcaatgcctttgtggagctgaacaatctaaatgaattatttttgggccagaactccatgtccagcattccagctgatctattcctgaatgttagtgccctcacacgcttgaccctattttccaataacctaaccaccttggaagccgatgacttccaagggttaaataacctaaagattttgttgcttaacaataacatacttaaaaatttcgatgcccgcgctttcgagccgctttcacaattggaaaaactccgcattgactccaacaagctgatgtttctgccgcatggagctcttcatggcctgaaaaatttggtggccgtcaaactggacaagaatccctggcactgcgattgccgagctctatatttggccaggtggatacgagagtttgtgctgaaactctgggacggacagcagcccatgtgccgtggtcctggcgatttgggaggtcacgaggtgggactactgcgttatgatgacctctgcgacggccagtgggccagcatgttgtccctttcgccacggcttccagttcgaaagcatcaaatatccacaccgatgaactacacagactacttcaatctgtatctgaagcacatctacaatggcactacagatgaggagctcaaggaggccgatataaccagcgtgtccatcaagaaggttcataactagttcttttatggacaatttgaagacataggattagaattatacaccttatatccgtataagcagaaaatagaaataaattattttagaatattt

SEQ ID NO: 231 - protein, 633 aa, DROSOPHILA
MSLGVWQLVSLVLLMDPAEVITGPSQAKEPPIQSLDEFRQRYLLPLISSDTRNCSLNACESLGIVSQLLMLINSMPNGTQSAANDKKPPKSKANGHNDGDVNGGEINAMSHLANFDLVKRVRQIESRLRSVEQPVWHLATGSQIEWNHCTSGVCRCNPDTKSFTCWNTNLKSVPVTQVIPMNMVNIDLSRNILSTLHKDTFRGLTVLKELDISHNVLDFLPFDLFQDLDSLLVLRIQNNQLEDIDHRTFWKLRNLNILDLSKNEIGMLPESIFYHAQRLTVINMCDNQIQNFPPNLLRDQLMLEELDMSRNKISELSSGSIRYLTKLKTLDFGWNQIAKIDDDFFAGLRSLRTLSLHNNRISSLSGTIFNNLANLVTLDLTTNRISHVGIPKKFNYILSNPLLKQIDGNAFVELNNLNELFLGQNSMSSIPADLFLNVSALTRLTLFSNNLTTLEADDFQGLNNLKILLLNNNILKNFDARAFEPLSQLEKLRIDSNKLMFLPHGALHGLKNLVAVKLDKNPWHCDCRALYLARWIREFVLKLWDGQQPMCRGPGDLGGHEVGLLRYDDLCDGQWASMLSLSPRLPVRKHQISTPMNYTDYFNLYLKHIYNGTTDEELKEADITSVSIKKVHN

SEQ ID NO: 232 - DNA, 7225 bp, DROSOPHILA
tgatttgttaaatagactaaatgtaactagcatagaatgattcgaacagtataacgtggccctctataatatccgactatcaatccaatcgggtggaaagaactatgtgtggattttgtacatacttagtttttacatgcaaacaaatgtaacattatcaatgagacaatacacgtaaaattaatacagttatggcagttcagataagcgcttaacttagtcaataaatcaagtacgttattgttaagttaaactgaaattagccattacaaatatatttcccgttttttcattaaacttgatgtctttataaagatataagtaaatggtcatcatgcttaatatttagttaacaataatgtatactcccacttttggttttaatactttcagtatatacaattacattcggatattattggaaaacacagaaaaccatcgttatagatactatttgcgtatttgtggtagcatttggggaaaaaactgctgaatattctggatttgatcgataaacacatctacatttaacaaaatttcaagtgtcatttgatatccttatatatattgtagtttccatatgcagattattatataaaccctttaaaatgtgacttactaaaattcggttgtatctttcgtttgatttgttacgaacgtgagagcagtgtttgattctataaatgatttcacatgatatctgcctaattctatcaagttaagggaattttacaccgaataggataaacattatgcataaactttcaggttcaacaatgaatttagccaacttataggctttctagaatactgtacgaattcccgttaggtaattactgaggatattgatgctgctgctgatgctgatcttaagctaacccaactcccaaaggatcatgtagattatctatcggattttctgtatgcaagtgcctgatgccgcttagaggccaaacccgaaggctcgttatacgtttcctgttggcaattaagatcgaaattggatttaattcttttaatttatgtacaataagtgaaatacaaaatataattatgccgactaaataaatacataaatgaaataacactagaaattagctaagcgaaaatagagaggtcgctagtgataagcttaggagtaaatctaaaaactaaataatcacaattaacaattagatacatcttggaaatattgcaacaaataaacactaaagtgggggtttcaatagcgagaataggcgagaacttattggaatcgataatggataattcgaaaataatagtaaacataacaatatgtgtacggaatgtggtaactagagagctaagctggatcggtatgtgagattcacttcttggtggtgccatttgcttttgctggcttaccggacgtcacgaagggccccacatagttgctagggaagagaccggaaaggccattcagctcgccacgccaccactccggctcatcccgacccagaacgctaatgatatcgtccttatcaaacgacagctcgtcgtcattttgtgctttgtacggatagagagcaatgaccttgtctgcatgggaaaaacgatatagataaaataatttatttaaatcatactacgaatattcaaaaaccaacccaagatctgttcagtcatctcgattcgactaccggaaaccggagtattccgtccgctgttgcgcccgccttggagaaccttcacgtaagtggccgggaaccatccgatctgccgccgtcgaccctttgcctgcagctcaccctcccaccagccggagtccgtctttttacggatcattattaattggcctctcgtcagcgaaagctgttccgtgctggttgcctcatagggcgcgattacttgagcaatctcagaccgcttggcacgcattccctgcaaaatgatgacgaaaaagatgttggttcattaaatgaaacaataaatgaagtggtaacgggctgtgtcaactatttacgggtgtcatggaagaggtgcgtgacatgggtcggctgtagctctcggcaggctcgctgctctgtgttttggactgtgtatttatctgggaaacttcagtgtcgaggtcttcgtgcgcctcctcggcgccaacgcctgggctagatatcggctgctcgctgggctcctgaacaggcagcggctggtaaacctgctcctgtgcctccacgggagcagcggtgtaggcagcgttgccgtttagcgtcgtctcctgggtcagtgcaagtgtaacacggtagcaaaaagcacagcacatgaaaagcattggattagtagatggacgtgagggcaacggttagacacgactctagacttcgggattgtaaactctttacaagtaagataaagtgttggcctgtatatttagcgtttatattctcttatatgggaactaaattcacttctctcttatataaataatgtcgcttacttttttttaatatgaaattgtacacgattttgtatacataataatattataattcttgattctagttccaatcaatttaaaacgcaaatggccccacacattacttaattatgtactatctatccacttacctgatcaagagattctaccggttcggcagcggctgtgctcgctgtgcccacatcagccttttggacatagttcgaaggaaacatgcccgtgcggctaccaatggtacctgtccaccactcaccctccttcttgatgaccatgaccatctcaccggcactgaagctcaaatcgccttcctcggcggactcataaggatatgcggctatataatactcgacatcgccggcggcagtcagatctgcggaagctgccggaatcgagctggtattgatattgtcattgtaggtgtcagccacggtggccacttgagcatcaaccggggcttcgacagcggcgacaggagcaacttcaccgacttctagtttctccacataggattcagggaaccagccggtgtggccatttatttcgccagccaaccatcccggctcggcgttctgctccaatggcaccaggataatgtcaccaggcacaaaggtaatctcctccgcgttgcgtgcgttgaactcgtatactgcttgatatttcacgaatccttctggggccggtccccctaagtccacagctggagcggccagtgcggagatatcattgctcgcaactgcgtagggatcggtgacagtcgtacccgtctcctcccaagcactggaagagcctgtgtcccaggccgacgatacactagtttcgttctttcgattgtacttcaattccagcaccgaggtgcgctgcacatcgtattccttgtacagatcctcgcactttgtgattagagcggagagctcggccttgagctcagacatctgtacatcattagtgttgatgtcctccttctttgactcaatctctttactgatattctcgactttatcctttatttggttaataattaactgttgaaaaaggtaaatagtattttagagaatccgttgaatactaaaactttacgtatatgccaaagctcacctgcttgtgggcgaatgcggcattcagttgctcctgctgcgcattctcccctcccaaggcagccccgctggccttgctcttggcctcccacttggccctctcttgggtgagctgaagcagtttagcgttctgttccttaatccgcgctttcagctgcgacatttcggacatggaagtgtcgcgctgggtgcgcattccgtcgataacggtctttacgtttgtcacgccggcacgagtgtcgcaaatcctctgcgaaagctccttgatctgtaattaagccgagttagttagataggccagccatatagattagttgtactttaagaacattactttttcattcagtgtgctgagctccacattaagctgggtgttgtgtgccttctgctttagaacacgttcttgttccctctccttctgtgcgttcatttcggcaattctagcctgctcccattcctgctggcgctgcttctcaagctccctgatacaatagaaattgtatacattgttttgtcgctcaaagcaagataaaagtccttactttctggccgcctccttagcctccagttccctcttgcgctgctcctccttctccatctcaatctctcgctggcgttggagctgtcgctctagttcctcctgctgcttacgctcggcctccaaacgagccttttcacgcttatcagcctcttcacgctcctttcgctctctctcttcccgctccttgcgctgctggtcctccataattttgcgcctacgatccagctctgcttgacccttaacataattctcctttcgcttgtcttcgaaggaagctggtgaacgcgaaatcacaagtgttaatatatggaatatattcacatgtttggcaacggagttaattaagcacttactttgtccaggtagtccggctgttgggtcagcatccacgactcccactccgctttgggatgaaacagatgcgtgtcgggaggccggctgtgagccaggacgggataccacccctgagaccgatcccggtcgcgattttattttgcgcaagttgggcggtacccattcctggggcaaggtaaccggaattttctcaccagccatggccttctcgcataggaacatggcaagaataaactcgtcgcagttcagccgtccatcgccgtcgatgtcggacagcgtccagatttgggccagcgtgacctggggtaacttgctctgtacgagaacgccgcgtgcctgggatccagttaagtaaccagatcgggtgcgatcattagcattgaacacctgcgtgtatttacgcttttgggcagcttgaacggcccattctccttggttgctaaaaggatagaagttgattgaggagttaagaacagatacgatattatatatatgtttttgctaatatttcaataactaagaatatttgaaatttaattaattaaattatctcttctttgctacattaataatattaaatcattaattcgattctaagtgatgcttacacagactcgatcgatggcgctcgctctgagatagacgtgtggcgactaggtggattgctggtggggggtgtggggccagacggcactgagactccaggcggtgaaatgacagtagccacagccaccggtggagccacaacgggaacaactggagctactgccggaactattcccttgagtggatccaaagggctcaaggagcttgtggagccacgtggcgtcatcgaggggacatcgccggtaagagacgacagcaggctgggaggaagaaccttgggaacgtccatgccgcgcaacttgaggttgataagcttgcaggctatgctgaactcattgatgttcatcttgccgtcggaatcagtgtccgccagagccctggagataagaaaatgagtaagaattaacactcttatcggtggatgattcatgggggcgtaatatacataccatatttggcccaggatcaggggcggcagctgggactgcaggaagaaccctttggcctgggcgccggtaacgaatcctgcctgcggctggagtgccctaaactgttcctggtacttcaaacgctccctcggggtcacagcccacgcatccaccgccgagttcattttgggcaaacactttatcctagtttccacggaaagctcttcctctttatcgtcctttttccgtatgcgtgtgtattagtgcgctctcttcggctacttttgagtacacatcaaatacaaactctttcgctccgcactcttttcgccgctctctttactacgtctatcgcctattcagtatccaccacccccacaaattttcacaatggatttttatggtttacctataaagcatttccaaaaatattaagcgatctcaatggacaggttgtaaagatagattgccccctttactcgctttctgaaggttttagtttctctttagtaggcgttttcacttgtcaaccgcatagccacgaattaactgataagtaatgatgtggtatggtccccgccaacgcacacgttattctcttatatatccctcttaactgtaattttgttgcttacttttcatcggaacaagaaaattttgtatttgcgtaaattttaatcaatattttatatgataggatcctatatcgacgaacgataggctccgataggtacggactaataatcgaaggagggtgaccgtcgcttgtttctgtgattatagcaagcaagtgttgaaaagtacggtgaccttaagttggatgtgactattctgcaacgtttttgtttttagccgctaacggatttttaaataaatgaaacaactactgactatgagtaatatattaattatattacttctacagtgaacctcataaaaattatgtcggcagtatgatgcatttaacacaatacgaaaatgtatacctaaccaaaacatcaacagatcgcaataaacaaaatcgaagattaaaattcgaatatccaaaattataagaaaatgttaagtacaagtcagttaaattatttcaactatttttttcttttattgtctttaatatttctatacaattaaaaatgacaattattcagaaatcttttgttccggatttaacggaattgttaataatagcatcaataacatttgtgtatgaaaatgtcaaacagtttttattcgttgacagttcatgacagacaaccctctaattggcgtttcattaatttaaaattgcgcgatggaaaaagatgtataccaaatttgtattcaccatctattttcaaacattgttatattaactgaaatgacaaaatcacaatattaaacaattttctaacaaattacgattttatacaaatgtgaatatatttccgaaacaaactatttgcactataactaagtcctgtaattaagatcatggttcagtatgaatgagttacaaattttattaagtgtgcatgtgatatatcgcacattagctatcgaaagttatcatgaatctgcactgttttaaagacgcaactatatcgataatatcgcaaatagttctatttctattttaccgcctctaattcttttatttcgaccacgtgctgctattggtaatgtccgtaccgtgaaatttttctgaaactcatgtaacaaaatgtcggaaacttcagaggacgaacagacgcagctacaaacgagtgac

SEQ ID NO: 233 - DNA, 3981 bp, DROSOPHILA
cttcgattattagtccgtacctatcggagcctatcgttcgtcgatataggatcctatcatataaaatattgattaaaatttacgcaaatacaaaattttcttgttccgatgaaaagtaaaccataaaaatccattgtgaaaatttgtgggggtggtggatactgaataggcgatagacgtagtaaagagagcggcgaaaagagtgcggagcgaaagagtttgtatttgatgtgtactcaaaagtagccgaagagagcgcactaatacacacgcatacggaaaaaggacgataaagaggaagagctttccgtggaaactaggataaagtgtttgcccaaaatgaactcggcggtggatgcgtgggctgtgaccccgagggagcgtttgaagtaccaggaacagtttagggcactccagccgcaggcaggattcgttaccggcgcccaggccaaagggttcttcctgcagtcccagctgccgcccctgatcctgggccaaatatgggctctggcggacactgattccgacggcaagatgaacatcaatgagttcagcatagcctgcaagcttatcaacctcaagttgcgcggcatggacgttcccaaggttcttcctcccagcctgctgtcgtctcttaccggcgatgtcccctcgatgacgccacgtggctccacaagctccttgagccctttggatccactcaagggaatagttccggcagtagctccagttgttcccgttgtggctccaccggtggctgtggctactgtcatttcaccgcctggagtctcagtgccgtctggccccacaccccccaccagcaatccacctagtcgccacacgtctatctcagagcgagcgccatcgatcgagtctgtcaaccaaggagaatgggccgttcaagctgcccaaaagcgtaaatacacgcaggtgttcaatgctaatgatcgcacccgatctggttacttaactggatcccaggcacgcggcgttctcgtacagagcaagttaccccaggtcacgctggcccaaatctggacgctgtccgacatcgacggcgatggacggctgaactgcgacgagtttattcttgccatgttcctatgcgagaaggccatggctggtgagaaaattccggttaccttgccccaggaatgggtaccgcccaacttgcgcaaaataaaatcgcgaccgggatcggtctcaggggtggtatcccgtcctggctcacagccggcctcccgacacgcatctgtttcatcccaaagcggagtgggagtcgtggatgctgacccaacagccggactacctggacaaacttccttcgaagacaagcgaaaggagaattatgttaagggtcaagcagagctggatcgtaggcgcaaaattatggaggaccagcagcgcaaggagcgggaagagagagagcgaaaggagcgtgaagaggctgataagcgtgaaaaggctcgtttggaggccgagcgtaagcagcaggaggaactagagcgacagctccaacgccagcgagagattgagatggagaaggaggagcagcgcaagagggaactggaggctaaggaggcggccagaaaggagcttgagaagcagcgccagcaggaatgggagcaggctagaattgccgaaatgaacgcacagaaggagagggaacaagaacgtgttctaaagcagaaggcacacaacacccagcttaatgtggagctcagcacactgaatgaaaaaatcaaggagctttcgcagaggatttgcgacactcgtgccggcgtgacaaacgtaaagaccgttatcgacggaatgcgcacccagcgcgacacttccatgtccgaaatgtcgcagctgaaagcgcggattaaggaacagaacgctaaactgcttcagctcacccaagagagggccaagtgggaggccaagagcaaggccagcggggctgccttgggaggggagaatgcgcagcaggagcaactgaatgccgcattcgcccacaagcagttaattattaaccaaataaaggataaagtcgagaatatcagtaaagagattgagtcaaagaaggaggacatcaacactaatgatgtacagatgtctgagctcaaggccgagctctccgctctaatcacaaagtgcgaggatctgtacaaggaatacgatgtgcagcgcacctcggtgctggaattgaagtacaatcgaaagaacgaaactagtgtatcgtcggcctgggacacaggctcttccagtgcttgggaggagacgggtacgactgtcaccgatccctacgcagttgcgagcaatgatatctccgcactggccgctccagctgtggacttagggggaccggccccagaaggattcgtgaaatatcaagcagtatacgagttcaacgcacgcaacgcggaggagattacctttgtgcctggtgacattatcctggtgccattggagcagaacgccgagccgggatggttggctggcgaaataaatggccacaccggctggttccctgaatcctatgtggagaaactagaagtcggtgaagttgctcctgtcgccgctgtcgaagccccggttgatgctcaagtggccaccgtggctgacacctacaatgacaatatcaataccagctcgattccggcagcttccgcagatctgactgccgccggcgatgtcgagtattatatagccgcatatccttatgagtccgccgaggaaggcgatttgagcttcagtgccggtgagatggtcatggtcatcaagaaggagggtgagtggtggacaggtaccattggtagccgcacgggcatgtttccttcgaactatgtccaaaaggctgatgtgggcacagcgagcacagccgctgccgaaccggtagaatctcttgatcaggagacgacgctaaacggcaacgctgcctacaccgctgctcccgtggaggcacaggagcaggtttaccagccgctgcctgttcaggagcccagcgagcagccgatatctagcccaggcgttggcgccgaggaggcgcacgaagacctcgacactgaagtttcccagataaatacacagtccaaaacacagagcagcgagcctgccgagagctacagccgacccatgtcacgcacctcttccatgacacccggaatgcgtgccaagcggtctgagattgctcaagtaatcgcgccctatgaggcaaccagcacggaacagctttcgctgacgagaggccaattaataatgatccgtaaaaagacggactccggctggtgggagggtgagctgcaggcaaagggtcgacggcggcagatcggatggttcccggccacttacgtgaaggttctccaaggcgggcgcaacagcggacggaatactccggtttccggtagtcgaatcgagatgactgaacagatcttggacaaggtcattgctctctatccgtacaaagcacaaaatgacgacgagctgtcgtttgataaggacgatatcattagcgttctgggtcgggatgagccggagtggtggcgtggcgagctgaatggcctttccggtctcttccctagcaactatgtggggcccttcgtgacgtccggtaagccagcaaaagcaaatggcaccaccaagaagtgaatctcacataccgatccagcttagctctctagttaccacattccgtacacatattgttatgtttactattattttcgaattatccattatcgattccaataagttctcgcctattctcgctattgaaacccccactttagtgtttatttgttgcaatatttccaagatgtatctaattgttaattgtgattatttagtttttagatttactcctaagcttatcactagcgacctctctattttcgcttagctaatttctagtgttatttcatttatgtatttatttagtcggcataattatattttgtatttcacttattgtacataaattaaaagaattaaatccaa

SEQ ID NO: 234 - protein, 1097 aa, DROSOPHILA
MNSAVDAWAVTPRERLKYQEQFRALQPQAGFVTGAQAKGFFLQSQLPPLILGQIWALADTDSDGKMNINEFSIACKLINLKLRGMDVPKVLPPSLLSSLTGDVPSMTPRGSTSSLSPLDPLKGIVPAVAPVVPVVAPPVAVATVISPPGVSVPSGPTPPTSNPPSRHTSISERAPSIESVNQGEWAVQAAQKRKYTQVFNANDRTRSGYLTGSQARGVLVQSKLPQVTLAQIWTLSDIDGDGRLNCDEFILAMFLCEKAMAGEKIPVTLPQEWVPPNLRKIKSRPGSVSGVVSRPGSQPASRHASVSSQSGVGVVDADPTAGLPGQTSFEDKRKENYVKGQAELDRRRKIMEDQQRKEREERERKEREEADKREKARLEAERKQQEELERQLQRQREIEMEKEEQRKRELEAKEAARKELEKQRQQEWEQARIAEMNAQKEREQERVLKQKAHNTQLNVELSTLNEKIKELSQRICDTRAGVTNVKTVIDGMRTQRDTSMSEMSQLKARIKEQNAKLLQLTQERAKWEAKSKASGAALGGENAQQEQLNAAFAHKQLIINQIKDKVENISKEIESKKEDINTNDVQMSELKAELSALITKCEDLYKEYDVQRTSVLELKYNRKNETSVSSAWDTGSSSAWEETGTTVTDPYAVASNDISALAAPAVDLGGPAPEGFVKYQAVYEFNARNAEEITFVPGDIILVPLEQNAEPGWLAGEINGHTGWFPESYVEKLEVGEVAPVAAVEAPVDAQVATVADTYNDNINTSSIPAASADLTAAGDVEYYIAAYPYESAEEGDLSFSAGEMVMVIKKEGEWWTGTIGSRTGMFPSNYVQKADVGTASTAAAEPVESLDQETTLNGNAAYTAAPVEAQEQVYQPLPVQEPSEQPISSPGVGAEEAHEDLDTEVSQINTQSKTQSSEPAESYSRPMSRTSSMTPGMRAKRSEIAQVIAPYEATSTEQLSLTRGQLIMIRKKTDSGWWEGELQAKGRRRQIGWFPATYVKVLQGGRNSGRNTPVSGSRIEMTEQILDKVIALYPYKAQNDDELSFDKDDIISVLGRDEPEWWRGELNGLSGLFPSNYVGPFVTSGKPAKANGTTKK

SEQ ID NO: 235 - DNA, 18610 bp, DROSOPHILA
tttgttcactttttaacatattctcttgtccagtattacgtaaaacgaaccgttgataaaaaaaaagtaacaaagtcgtgaagcattttccataggtatgaagtaattttggcagtcgacagataagctcgcagaaccactatcgctgggcagcgactgttttgatttcgatacgctagctgggggtatatctactgggttggaaagttggtcacagcttggtttgtttatagttggtagagttgaaattatcttacacttgttagcaaaagaaatttaaagataccttactctttcatgaggtaaagttacttgaaataaagcaacagattgctaatttctacatcttaaaaatctttcactatattttaaaattcactatcaagcttactcaaaaaggtgttcacaattttgttcagctaagatctaaatgtgaaacgccaatcgacacatggcttatcttaacgggtctagaaaacaaaagtacgtgatgaggcgttcgaataaaaagtgattgttggttcttcgtttgaaatacccgttggtaatctttgacattatgggaacccactgatggaatgatttaaaattaggaattacgtttgacataatcgaaagactacaaataaactgccttggaatgtggttctaactttagccagggatttttttatagaggcaattatgttggcgataactcgttatctctaaatcaataggttcgtacgtcacggtcgtgctttccctatctctgccacatacctttcgtatttttcctctattttccctatgcccattattgattttggtctgttgtcaggtggtttgcccatttctctttcctggaaaaaaatacaaaaaaaatgaaaaaaaatcaaaacaaacactaagcctaaacgtttcgcgttgcatttatatgacttcgaactaatccgagatttttgttcctcctcccttccccccacttagcatcacaatatgagccgggaggctactccgcgctgcagacaccgacgccttccaatcgcaactccgccaacatgacccagcgggacggcatcatcaagttcgagaacgagcggatcaaaacgctgcaggaggagcgcttgcacatccagaagaagacattcacaaaatggatgaactcgtttctgatcaaggtgtgtaaactacttgagtcactcatcactcccaatacttgtaatttaattactataaagtacaaatgaaagaaatgctttgttttgctaagcacataaagttttcattgtttaaatactataatttctcgatcaaagtgatgtattcaaatgaaagcgccatatgtatatgacattcgaaattatacattcacttgaaattttgattggaagaaacttttatggccccaccaatttatgaatgcaactcacatttgggcttatcgtcttctttgtaggccaaaatggaggtcgaagacctattcacagacctggccgatggcatcaagctgctgaagctgctggagatcatatcgtcggagaaactgggcaagccgaacagcggacgcatgcgcgtccataaaatcgaaaatgtcaacaagagtctggcattcttgcacaccaaggtgagatatgccacataaatggcggcgagtgaagggagtgaaggcgttgcagttgctggaagaccaaagaccgaagactgaagactggagagtgtaaagctctctacgcatttgtagaaagtgcaagtcgcgcctgcgcagctgcgcgtggccattgcgtgctttgtttgccatatgaggtgcacggatctggctgttggagtcgggatttcggatctcggggaagcgggaagtgtgaggcgacgtcaagacatggcgaaaaagtatatatttaattacctagcctgggcaccgcgttttcttggcaatatctgaaatatttgcatactttctaatgcattttttccttgacttcacttcactttgttgcgcttggcacattttccactgccgcgctcatactatacatgtgtactttctttgcacctctcgtgcgcatttgattttaattgagcaaagtgggagcttagcgtgcgacatagtttcgaatcttctggctagtcaggtgcctctggtctaatctaattagaagcaattaaaacgcatcaaattgtcccactgtccaactaattcactttgtttcttaagcggcgaagcagtgaaagttttcggttttacttttcaccatttcatttcattccatttcgtatttcatttgtttttcgggcttgtcttttgtgtgtgacacgggtattgagtgcattttaattggtgtttaggcttgaaagaagcccgagcgaaagatttacgcacaagcgagcattcgatggaggatcccttggggactcattgaagcgtttagcggagcacgactcttggaatttccagtcgccattaggagaaccaaaaggcgtagctccctactaaacattaatgtaccagaataactcggaacgagtctattaaagcaaacggtttgtcggggaataggaataaagttagcttactgccttcttatgaactattaaaaacgataatctgccatacataaattataaatgtatatataatttatgattttgacaatactatttaaattcctataaatatgcacaaaatcgatcataaatctatgattaacccacctccagattcccctttatctgctatgaatttaaaaagaagccgtaattggttcttaaaattctaattcgtaaactagtttttagtaaatgctaaatggtctgcagacgagagctctccatctcaattttccacctggacataaatcagcagccaaccgctggccactttgtagctatgataatgcgatttagatcggtatcagctagtaacttatgctttcctcgctgggattatcgtgcgcgttacctgtccgcgccctgacccactataaatgcaaatggcaggcgagcgacccacatgaacccaccgggggtcaagcacctccacctgataaagcgtgtcttgctggacaggcgcagacccagttcgaatgtatcggcatctgtgggatgtggaactcttggtaacccaatacgcagcttacccactccattcaccaaacgggaactgaaagaaatgcagaagagatagtgtggagtggagaatggaaataatgcatgatggtttctttcgtcttaggtccgtctggagtccattggtgctgaggacatcgtcgatggcaacccccgtctcattctcggtcttatctggaccatcattctgcggtttcagattcaggaaattgaaatcgatgtggtaagttgtcccttcgcaagtcacatagcaaaagtgcttaatttataattccaattcgtttcacttaggatgaggagaacgagtccagcgagaagcgttccgccaaagatgcactgctcctgtggtgccagcgcaagacgcatggctatccgggcgtcaacatcaccgacttcaccaactcctggcgctccggcttgggcttcaatgcgctcatccactcgcaccgtcccgatctgtttgagtacagtacgattgtcaattcgaagaactccaacctggacaaccttaaccatgcctttgacacggccgccaacgaattgggcattcccaggtcagaattttgtaaattataaaaaatatgtcaataaaattaattgtaatttgttcgccccccttttagcctgctcgatgcggaagacattgactcggcccgtcccgatgagaagtcgatcttgacctatgtggcctcctactatcacacctttgcacgcatgaagaacgagcagaagagcggcaagcgcatagcaaatgtaagtaaaccagggtcggacccggcttcagctatgaacctgcctataaaggtagatgcggatgccattggcagaggcccatcgtctctagaagtcgctgcagcgtaacggtgtcccacagttaacgctctacttcacaatggattggccaccgattggattcggattccgattcggaatcagattcgggtggggtccagacctacacctagaaagtcgctcaaccagctctctttttctacccctccgcagattgttgggcagctaatggacgcagatcgcaagaagatgcagtacgagggtctgaccacaaacctgctgagctggatccgccagaagacgctggagctggagcaacgcgacctgcccaactcgctggagggcatccagcgagaactgctggccttcaaggagtaccgcaccattgagaagccacccaagtgagtagaggttcatgaccagccggaaacgatacattgtatttcagtcggatcactgctcggatacgcagagtacacctacacccgtagtacatctattaatgatggtcctcccctccaacagatacaaggagcgcagtgagatcgaggccctgtacttcactatcaacactctgctgaaggctttgaatcagccaccgtataatccgcaggacggccagctcgtgaatgacatcgagaaagcctggcagatcctggagtatgccgaacatcatcgcgaggtggctttgcgtgacgaactccttcgccaggagaaactggagcagctgaactacaagttcgagaagaagtcggttctgcgtgagggttatctcaaggagatgatccaagtgctgtccgatccacgatacctgcgccaagtggatgccacgctgaagaagcatgaagctatctctgcagatatcctggcgcgtgtggaacgattcaatgacttgaccgccatggccgaggagttggacagggaaaactaccatggcaaagaacgagtgcgtcgccgagagcaggaggtaatggcaaagtggcgccagttgctggaactgctggaaaaccaacgcctcaacctctcccagatgagcaacctgatgaacctgctccgcgaaattgccagcaccacagaagcagtgcgagaactgcagcaacagttcgcctccgaggatgtgggtccccatctcttgggagtggaagaactactgcaggcgcattcgctgcaggaactccaggttaacacctatggagagactctcaagcgcttcaatcgccaagccttgccctacaagagctccgagcacaaggacgcagctctgctggctcaacgccttgcggatttggaagaggcgtactcggaactgttgcgacgctcggcggcgagaagagcccgcctggaggaggctcgaaacttccaccacttcatggaggattacgacaacgaggagtcctggctggtcgacaagcagcgtatctgcaaaactggcatcaccgccaaggatctgcgagcagttctttccctacagcaaaaacacaaggctttggaggatgaaatcaagtcacgaaaaccgaaatcaggtcagatgtcgacggcaggcaagaggctgattggcgagcagcacccaaggtcctcggaaatccagagcaggattgattccctggcggaacactggcaggccttagaggcactagtggagctgcgccgtcgccagttggaagatgctgcagaggcctaccaattttacaccgatgccaatgaagccgaatcatggctgaacgagaagatagctttggtcaactcccgggactatggtaacgatgagccttctgctcaggccttgcttcagcgtcaccgcgatctccagggtgaacttaatgcctattccggagatatccttaatctaaaccagcaggcggataagctaatcaaggcgggcatttgcaccctagaactttccgccgcagagccagaactgcccgaagtggaacaggaggagtgggtgaacgagactcgcctggtgcccaaggaagtttgggaggacgagtgggtggagaagctggagcacaagaaggtgacggagacaaagatgttgccacatgtcaaatctctgtttcccttcgaaggacagggaatgaaaatggacaagggcgaggtgatgctattgaagtccaagaccaacgacgactggtggtgtgtgcgcaaggataatggagtggagggattcgtgcccgccaactatgttcgtgaggttgagccgcgcccagtggcctgtattgtaccgaaagctgaaaaggtcaagtccctccagaaggtcaagaaaaccatactggtccgacaggtggtacccgtgaagagaattaaacctgtgagcgtagctcccaagcctctggtccagaggagaacctctacccaaagcatcaacgagaacgcagatagcgtggagaaacggcagcagagaataaaccagacatacgacgagctacaggaaatggcccagaaacgacatgccctcctggaggattccattcacctgtttggcttttatcgggagtgcgacgactttgagaagtggatgaaggagaaggaacgcatgatcaagtcggacgagggcgagggtgtggacaatgccaagcgtaagttcgagaagttcatcacagatctctcggcagcatcgaaaagggttgaggagatcgatggcgctgtggacaccttccgccgacagggtcactcgcagctagacaagatcatcgcccgccaacgccagatccaccagatttggcagcgtctcaataatgccaaggcccagcgtgaaaagagtttagaaggagcctctagtgtggaactctttaaccgcacctgcgacgaagccaaggtttggatgagcgagaagatgttgcagctggacaccgctgttatcactcccgatctccgcactgttcaagccttgcaaaggcgccatcagaacctggaaagggagttggctcccgtggaggacaaggttaatcgggtgacctacttgggcaactcggtaaagaacgcctatcctgctgagaaagacaatgtgaatgcccgccaacaggaggtgcaggatatgtggcagcaggtgcaacagcgtggtagtgatcttcgcaaccgcatcgaaagcgaggtgggtcagcaggtctttaacaacagtgccaaggtccttctagcctggatagactccgtcaaggatcaactgaatgccgatgagtccgctcgtgatgtggaaactgcaaacaacctgctgaagaagcacaacgatctgggcgatgatatccgtgcccatgacaccgaattcgtggaggtaattcaattgggcaaacagttgtccgatggcaaacccaacatggcagagacggtggctgtgatcgaacgcctgaaggccgaacaagatgccattcatcgcggctgggccgagaagcagaagtggctgctgcagtgtgtcgatctgcaaatgttcaaccgtgaggcagataagatcgatgccaccaccaagagccacgaggccttcctcgagtataataacctgggggtaagtagttttaggttgtggctaattttttctggaaactcatacatttttcttttcaggcctctttggatgaagtggaggccattcttaagcgtcatctggactttgagaagagcctaatggctcaggacaagatccttaaaggcttctcagataatgcagacaagctgatttctaacgatcattacgattccaaatagtaagttgtagaaacctaaaaacatggtcaaaccctaaccaatccattaactttcagtatcggagatcgccgaaatcaggtgctgggtaagcgcaaggcggttaaggatcgggcttttgagcgtaaacgccttctccaagcttcaaaggatttccacaagtttgccgccgaggctgatgacctcaaagtgtggctccaagataagacgaggattgcaggcgatgagaactaccgcgacctaagcaatctccctcgcaagttgcagaagcatcaggcttttgagcgggaactccgcgccaacgagggtcagctgaggaatgtgactaaggacggacaggccctggtccaagctggaaatcgagtacctgaggtggaatcccgggttgccgatcttaacaagcggtggaaggatctactcaccctgtccgaggataagggtcgcaagttggaacaggccgcatctcagcgagagcataaccgttccctcgaggatgccaagaagaaggttgatgaactggactctgctctgcgaagtggagatgtaggcaacgatttgcgcagctgcaaggacctgatcaacaagcagcaaatcctcgagtcggaaatcaccatctgggatcagaaggtagcggaactggtttcaactggcgacgacatggcacacgggggtcacttcaatgcccagaatatcgaggccggaaccaaggagctgcagcagcgattcaaggatctgcgtgatcctacccagcgtaggagagcaaagttggaagagagcctgaattaccacaagtttgttttcgaactggattcggagttccaatggatcaacgaacacctgccggcagcaaagtccaatgaattgggtcagaatctgcaccaagcccaatccctgcacaaaaagcacaagaagttggaggcggagatcaagggccatcagccaatgatcaataaggctctggttgcgggtcaatctctgatctcgcaacagcatccggagcgagagcaagtcgagagcctgtgccagcaattggagcaggcatggcaggatctggagcgccattgtggcgaacggtcccgtaaactcgacatgtccctcaaggctcagcagtatctgttcgacgctggcgagatcgagtcctggctaggtgagcgtaacaacgtcttgcggtccacggaatatggccgtgatcgcgattccgcggccaagttgctcaccaagcacaagaccatcgagctggagctggacacatactcaggaattgtaaccgaaatgggacacagctgcgctgcaatggtggcagccaatcatccggacagcaaggtgctggccgccaagcagcagctcattgagaagatgttgaaatccctgcacaaactggcctcccagcgacagggtcgcctgatggagagcctctacaagcacgaatacttcctggaatccgacgaagtagagcaatggatccgggagcaggagcaggccgcctcctcggaggactacggtcaggactttgagcacttgcagctgttacagaacaaattcgatgaccttaaacaccgcgtggaagtcggagcagatcgagtggatcagtgtgagctgttggccaagaagttaatcgattcagagagcccctatgccaatgaggttgagaagcgacaggaacaactcaggtgagtagtgtttaatttttacaatagggattataataatatttctctatctcttgcatatagaacttcctgggagaaccttctccagctccttaaccagcgtgagcagaagcttcatgccgctggcgaaattcaccgcttccatcgggacgttgcagaagccctgttccgcatccaagacaagaatgctgcgctatcccaagaactaggcagagatttgaactccgctctagcactgctacgcaagcatgagggctttgaaaacgaccttgtggctcttgaggcacagctacaagttctagtggaggattctgtccgcttgcaagccaagtacccatctaatgcttctgcaattgcccaacagcaagataaggtggtggccgcctggaatgaccttaaggagcggtccaccgctcgcggagatcgactggctgccagctcagacctgcagaccttccttacagatgtcagggatatagtttcttggtcttcaaacctgcgagctgcccttcaagcagaagaacatgtgagcgatgcagctggagcaacagccctgaagattcaacacgatgccatatatggagagattgaggccagagaggataagttccggtaccttaacgaattgagcgactccatggttcaaacaggccactatgccgccgctgatgtagaggagaagtgtgccgccatgttggatgagcgccagaaactccatgctgcttggaacaaaaagaagataatgctggagcaaaagatcgatctcttctgcttcctgcgcgatgccaagcagattgacaacctttctagctcccaacaggcggctctgagtagctcagacttcggccagacagtagaggatgtgcagaacaagatccggaagcacgacgagtttgagagattgattcaaacacaggaggagaaggtgtctctacttcaggagcacggtcgcaagctaatcgaacagcgtcactacgacagcgccaatatacaaacgatccttcagggagtcctagcccgccgccaaaaggtcaaggatctgtgtgccgtgcgtcgctacaaactggaagatgctctactctatgccaaattcgtacgagattgcgccgaagctaagtactggatcaatgagaagcaaaagaaactcgaagccgatgccgccagctatgcggaggtgaccaatctggacgagaaaatcaagaagctacagaagcaccaggccttccaggccgaggtggctgccaaccagggtcgcatccaagaaattcaagatacaggagtgattcttttgagcaaacagcacgagtcctcaccggaaatcaagagagccatcgaaatagtccttgaagcctggcagggattgctggcggagctggagcagcgtggtcgaggtctggaagaggcccaggacagccttgagtttaacagccagctggacaagatcgaggcttggatccgcgacaaggagatgatggtgcaggccagtgacactggacgggacttggaacattgcaatgccctgatgaggaaactagacgacgttgactcagatatgagggtagacgatcagcgcgtcaagcacatcaatcagctggccgacaaactgatcaaccaggcccaagtgccagcggatacacaaagtgtggataagaggcgaaaggactttaactacaactggcgacagctgcaaggagcactcaatgcttatcgcgctttgctgggcggagccaacgagattcatgtgttcaatcgcgatgtggatgacacggcagacagaatagctgagaagtccctggctatgagttccaccgatacaggccgagatctggctgccgtagaagctctgatccgcagggaagaggctcttgaaagagacatgtctgccgttaagcaaaagattgatcagcacgaaaccgctgccgagttcctgattaaaaagtatcctgaacgtggagcacaacatatcgagaggaaattggaggagctgcacaaatcatggggaaatctgcaggccttgtccgttaagaggcagagtatcctaaacgaagcctacctggctcacaagttcgtgtcggacgttaaagaactggaactctgggttaacgacatgatcaaaaagatgaacaacacacagtcaccatccactatcaacgattgcgagacccagttggagctgcaccaggaacgcaaagtagaaatcgagggcaggcaggaggccttcgctggactgaaacaacagggcgagcagttatccaagagaccccagcaacagcagccggataatgtgcgcaagtatctccttgtgctggaagaactccatcaaactttaaatgaagcctggagcgaaagggctagggatctaactgaggcccatcagctgcagttgttcaaggctcaagtggagcaggttgagatatggctcgccaacaaggaggccttccttaacaacgacgatttgggtgattcctacacggctgttgaaaggctgcttaagaagcacgatgaatttgagaagctgctccatgctgatcacgtggacaccttgcaaaagtttgccaatagcattctagagggtgagcccaaggatgcagatctgatccgggaaaaactggcatacatcctcagaaggaagcagaaactgcttgagctgtctgaggagagaaagcaaaggctgacacagtctcaccaattgcaggagttcctgcgcagtctctacgagattgatcgttggctggtgcaaaaactgcaggtcgccctggatgaaaactaccgggaaccgagtaatctgcaaagtaagatccagaaacacgctgccttcgatgccgagttgttaagcaactcccctcgcgtccagtcggtaatccacgaaggtgaacgcctgatccgaggcgatcactttgctaaggatgagattgcacaacaggtgcaactgctcgagggagattggctaaagctgaagggcgcttcccagaccaaaaaggataagctccagcaggcctacgatgcgttggccttcaatcgaagtgtggatgagttcaacaactggatggacgaggtagagctgcagttgagtagcgaagattacggcaaggatttggctgctgtcagcaatttacttaagaaacacgaacgcttggaagcggatgtggcccatcatggtgaactggctgaccagctgaagcagaaggatgaacagttcttccaagcggaacacttcctgcgtcatgaaatccacgaaagagccaccgttagtatccgtaggtacaacactttgcacgagcccttgggcattcgtagggaaaacctggaggactcattgagtctgcagcagttcttgagggacgccgaggatgaacttcaatggttagcggagaagcaattggtggctggttcccaggatctaggcaccagtcttttgtccgttcaagggctacaaaagaagcacaactctctggaggctgaactaacatcgcaggaacctttgattcaggcgctcctccaaagaggccagcagatgatccgggacaatcacttcgccagcgagcagttgcaatacaaatcggagttgctgcagaaacagcttgtccagttgagagacttagctgccattagacgtctgcgtcttttggacgccgtagagagccagctgttctacgttgaggccaatgaggcggatgcttggatgcgggagaagcgtccggttttgtcgagcagtgattacggccgggatgaggtctcagttcagggacaccaaaagaagttggaagtccttcaaagggaacttaccgcctttaagccgtcgatagaaaaggttgccaaactggccactggtttgattgaaagaaaccactttgacagctccaacatagcggaaaagaatgcccaggtgggtcaggagtatgaggatctactccgtttggctaaggagcgggagtcgagacttggtgagtgcaagaagctctttgagtacctgcgggaaacggaggaattgcacgagtgggtgggcgaccagatggccgtcaccgctagcgaggattacggtgaggacgtagagcatgtggaacagctcattctggcttttgaatccttcgtttccaacttaaatgccaacgaggcaagggttgaggcgtgcttggagcggggcgatcgcctcatccaggagaacaatccctataggagttccattaaatcgaagcgcgatgagacaaagcagttatgggaggagctcaaggatctggttcacgctcgccaagatgccttagctggagccaaacaagtccacgtctacgatcgcgtagcggacgaaaccattcagctaattaacgaaaaggacgcctcgctcatctctgaggactacggtcaggacttggaaagcattcaggccttgggtagaaagcaccaagtctttgagtccgagctggtgggcatccaaggacaggttgattcggttttggccgaggccgctaaactgggcgagatctacccagatgccaaggagcacattgaagtcaaacgtgatgagacagtggaggcatggacggatctgaaggagaaaaccgccgccaggaagaacaaactcagccaggcagagcagctgcagtcctactttgacgagtaccgagatctgattgcctggatcaacgagatgctggccaagatcactgcccctgaacttgccaacagtgtagcgggagcagagcttctcctggccagcaccaaggatcatgacacggagattcgcaccagagacgaaacctttgccaagttcgccgccaatggtcagcagttgatcaaggaaaagcacttccttgcccacgaagtggaggacaagatcaaggttctgcaagcgcgtcacgaacttctaaagcatactctcaacaagcggcgtgagatttacgaactcaacctggacacccaattgttcttgaaggacgccgaaatcctagagcaatggatcagcagtcgcgagccccaactcaaggataccaaactgggagattccattccacaggtggaggatctgcttcgccggcacgaggactttgagaagactgtggccgcccaggaggagaaattccaggccattaagagaataaccatgcttgagcagctattccgtcaccagctggagcaggagaaaatcagcaagttgcaggagaaggagcgtttggagaaggaacgcctggagcagcttaagcaacgagagctccagcgcctggcggatgagaggagacgagcggagaagcagcacgagcaccgccagaatgcggcgtcccaagagaagaccccaatcttctcttcgccgatggtcactccagctcagacaagtggtccacagtccccggccttgagtcaagtccagttgaggcctccatttggagatgataacgagcacctggctctacagaagagcagctccagcggcatgttcggtgaccgactccgtcgcggatctgcggatgccaatgtgaagcgggcggagagcatgaaggtacagcccaagcaggccaagcgtacaccatcgttcaccaccagaagacgtgctcagtccttcaggaagaaccagaagggtgaaggattcgacctgccacccgttgagattcagggcagtctggagcgtaagcatggtttgcaatctggcggcaagaaggctcctgtacgatcctggaagcagttccacactgtcctctgtggccagttggtgtgcttctttaaggacgaaaatgatttcctgcaacagaagacggccactgcacctgttaatatcctcggtgccaaatgcgaacgtgctgatgattacacgaagaagaagtacgtgttcaggctaaaactacccgacggatcggagttcctgttcgaggctccctcgctggacattctaaatgactgggtgcgcaagatatccttccacgccagtctgccgccgaacatgcaactgcttagctacgacgagtccatgaaggtaagattgtatatccatacgagaaataagaattaatcatatttgtaatgtcctaacagcaacagtcgagcagttcgccggacatcaaggttactagcagtgtggaatcaccagttagttctcgtaactcatctcccgactcccagcgacgtactagcggagcccaggtccttgacggaacagccactccccaaatggcattccttcaacgacaaatgcaacaacaacaacagcagcaacaatcccagcccagttcacccaccggcggattcgaccagaagccaccgatcccgcccagaggagctgccccagtggccagccatcgccaaagccaggagaatctagttgtgatgcgcaatcgccaaagttccaatggtaggagatctttaggctaatagctaattggatttattattaatttttaaacatgttattcgacatgttacagacctgcaacaatccgccactttacccgctggcttgactggagtccagcaaaatgggaacggcaaggatgataacgcgttgttgacgcgcaacagcgaggccagacaatcgggtaagttctccaaactaggtggtattcccatttccgagctatttgtgtctttgtccatacacctgctcctccacattgtttcacactcacattgtaaaattgtcctccaacaacgcaatgccgtatgtattagataatccgccgccattgccaacaacgatgccaccggtgggtggccagcatcagcatccccagaactcccattcccatcagaatcagcatcaggcgcaggttcagcaaaggattaatgcattcaatgcggcggcgagtcagcagcatcagccggattactttaacaacaatacagcgaggcagcagccgcagaggattccctccggcaggatcgactctacgaggaagtttatcgaaatggaggcgcataacaataacggcggcactagcagcagtcccaagagaagtaccatcaactattccagcagcggggccagcagcaatggcaacggtaatgtgaagataggcagtggaaattcgtctacgaccacgatcaccacctccaccaccacacaccaagtgacctcgagcagtcgcacggtgtggcatctaacctcatcgcccacctcatcgaccaaatcatcatcaaccggcggctccggggagcctagccatgccatcagtaatccaagctacatgggtctgcatctgaataacaataacgattcaattggaattggactcggtggttagacgatcctcattaatcctaacaatctgtatataagtagtcttaagtgcatggtccttggttacggttgatttgaactctttggacataaacgttaatttttctctctatcttgaatgcatgcatatgtgtggaaaaggttcttcagctttcaaaccagtgaagataacccgccgatcctatctgcgaacgagtttgcaaagtatttccatgggtcttatattctttacatatttaacctatccctacacgactatataaacgatcgttttatccaattgaaaaaaggcgaaaccagctgtagttagaaccattgaaatatgaatgactatgtacactttagagctcttcctcacatatattttaaatttaagctaattaatgatattctgttgcctctacacctataataatattatgctatacatcgaacactctcatttgcatgatgtctttgtactttcaagatttccaaccactcataattgatattttgtacaggttggggaaatacacgctttgagagcaaccggcccgtatccctgcagcccgactccatcagcttctcccgtgtttcagcggagagttccagcgaaagcgaggcccagtcgatatcatccgtgtccggagtgaagggcagcaagggaaccaaggaggagcgccgcagcggcatgttccgaatcttcggccgcaagggcgacaaggagaaggaaaaggacaaggacaagcgccgctcgagtcaagtcccgccacagtgagaacatatataaattccggataatgagaaggagcgccaccgttacaacagatgaaccaggccgaattgttttttgtattttttataaacaccatgattatgtcatttgtattcgccaagggcaatcaaatttaaaaacaaaaccaactactaaacgagacaagatatgaaaaagttgaaacattaacgtgtcgatttaaagctaaagcggcaaatgaaagtataaaagaaatattatatatatataaagtcaatgtgttaattgcattataaaatgtatctgtaagtttgttcgttgtatgattaaatttaatattcgtaaaacaaaatacttaaacaataaataccatacattgtgaaatcaaactcagcttaatgttaattctaaccttgtgggagatttaggacaattctgcaagtaagcttatacgatgggatggtaatacaagttggttatatattatattatattatacactttctacctaaggcaatcttagcaacaacgatagataatattataggaacatatgatgatatagaaaagaaaataagaaaatcagcttagtatttttatttaacaaaaacactaaaataaaaacttcaaaaattatgtagctgatttttgttataatcgcacgaagcccaaaagaatgctgcaaaaatgaacaagggaaaatgtagctattaaaagcgcagcatgtagaaatcttgtatttatacagttgctttaaataatcatcaatgcttatctaatattttgcaaaagtaaattttatattgttcatagaaattcaacaatataaaagtaaacaaaaacgctattaggccggatgtttatattttcacgacgaacttcaataacataatatttgatcttcattgagtaacgcattaatcaaattttttactttttcggtcgtttcgaattttgtttaccgttttatcagtctattattatgatgggctagatgttgtttattagatgtttatttaagaacattatcaatacaaaaacatcaatgaaagtgataatacgaattgaccatgtagcaatttgttttgtgtctatagactgaattttttcccctacattaatcaaaattatatttttatattttattttgagtttacttgggtttttcatgaaattaaagattaacctggggtttttacaatccattacgataggctttctgttcattgcatctatagcctctgtacttttccgtgcattcttaaagcaaaagcatacatgtatatcttcaattcaagtatatctgcaatttagtttgcttatctggagtcgctgtatcccgacctatccaaactcgcgtcccagtcaaaggtaaaccatttttattta

SEQ ID NO: 236 - DNA, 12699 bp, DROSOPHILA
gctgcagacaccgacgccttccaatcgcaactccgccaacatgacccagcgggacggcatcatcaagttcgagaacgagcggatcaaaacgctgcaggaggagcgcttgcacatccagaagaagacattcacaaaatggatgaactcgtttctgatcaaggccaaaatggaggtcgaagacctattcacagacctggccgatggcatcaagctgctgaagctgctggagatcatatcgtcggagaaactgggcaagccgaacagcggacgcatgcgcgtccataaaatcgaaaatgtcaacaagagtctggcattcttgcacaccaaggtccgtctggagtccattggtgctgaggacatcgtcgatggcaacccccgtctcattctcggtcttatctggaccatcattctgcggtttcagattcaggaaattgaaatcgatgtggatgaggagaacgagtccagcgagaagcgttccgccaaagatgcactgctcctgtggtgccagcgcaagacgcatggctatccgggcgtcaacatcaccgacttcaccaactcctggcgctccggcttgggcttcaatgcgctcatccactcgcaccgtcccgatctgtttgagtacagtacgattgtcaattcgaagaactccaacctggacaaccttaaccatgcctttgacacggccgccaacgaattgggcattcccagcctgctcgatgcggaagacattgactcggcccgtcccgatgagaagtcgatcttgacctatgtggcctcctactatcacacctttgcacgcatgaagaacgagcagaagagcggcaagcgcatagcaaatattgttgggcagctaatggacgcagatcgcaagaagatgcagtacgagggtctgaccacaaacctgctgagctggatccgccagaagacgctggagctggagcaacgcgacctgcccaactcgctggagggcatccagcgagaactgctggccttcaaggagtaccgcaccattgagaagccacccaaatacaaggagcgcagtgagatcgaggccctgtacttcactatcaacactctgctgaaggctttgaatcagccaccgtataatccgcaggacggccagctcgtgaatgacatcgagaaagcctggcagatcctggagtatgccgaacatcatcgcgaggtggctttgcgtgacgaactccttcgccaggagaaactggagcagctgaactacaagttcgagaagaagtcggttctgcgtgagggttatctcaaggagatgatccaagtgctgtccgatccacgatacctgcgccaagtggatgccacgctgaagaagcatgaagctatctctgcagatatcctggcgcgtgtggaacgattcaatgacttgaccgccatggccgaggagttggacagggaaaactaccatggcaaagaacgagtgcgtcgccgagagcaggaggtaatggcaaagtggcgccagttgctggaactgctggaaaaccaacgcctcaacctctcccagatgagcaacctgatgaacctgctccgcgaaattgccagcaccacagaagcagtgcgagaactgcagcaacagttcgcctccgaggatgtgggtccccatctcttgggagtggaagaactactgcaggcgcattcgctgcaggaactccaggttaacacctatggagagactctcaagcgcttcaatcgccaagccttgccctacaagagctccgagcacaaggacgcagctctgctggctcaacgccttgcggatttggaagaggcgtactcggaactgttgcgacgctcggcggcgagaagagcccgcctggaggaggctcgaaacttccaccacttcatggaggattacgacaacgaggagtcctggctggtcgacaagcagcgtatctgcaaaactggcatcaccgccaaggatctgcgagcagttctttccctacagcaaaaacacaaggctttggaggatgaaatcaagtcacgaaaaccgaaatcaggtcagatgtcgacggcaggcaagaggctgattggcgagcagcacccaaggtcctcggaaatccagagcaggattgattccctggcggaacactggcaggccttagaggcactagtggagctgcgccgtcgccagttggaagatgctgcagaggcctaccaattttacaccgatgccaatgaagccgaatcatggctgaacgagaagatagctttggtcaactcccgggactatggtaacgatgagccttctgctcaggccttgcttcagcgtcaccgcgatctccagggtgaacttaatgcctattccggagatatccttaatctaaaccagcaggcggataagctaatcaaggcgggcatttgcaccctagaactttccgccgcagagccagaactgcccgaagtggaacaggaggagtgggtgaacgagactcgcctggtgcccaaggaagtttgggaggacgagtgggtggagaagctggagcacaagaaggtgacggagacaaagatgttgccacatgtcaaatctctgtttcccttcgaaggacagggaatgaaaatggacaagggcgaggtgatgctattgaagtccaagaccaacgacgactggtggtgtgtgcgcaaggataatggagtggagggattcgtgcccgccaactatgttcgtgaggttgagccgcgcccagtggcctgtattgtaccgaaagctgaaaaggtcaagtccctccagaaggtcaagaaaaccatactggtccgacaggtggtacccgtgaagagaattaaacctgtgagcgtagctcccaagcctctggtccagaggagaacctctacccaaagcatcaacgagaacgcagatagcgtggagaaacggcagcagagaataaaccagacatacgacgagctacaggaaatggcccagaaacgacatgccctcctggaggattccattcacctgtttggcttttatcgggagtgcgacgactttgagaagtggatgaaggagaaggaacgcatgatcaagtcggacgagggcgagggtgtggacaatgccaagcgtaagttcgagaagttcatcacagatctctcggcagcatcgaaaagggttgaggagatcgatggcgctgtggacaccttccgccgacagggtcactcgcagctagacaagatcatcgcccgccaacgccagatccaccagatttggcagcgtctcaataatgccaaggcccagcgtgaaaagagtttagaaggagcctctagtgtggaactctttaaccgcacctgcgacgaagccaaggtttggatgagcgagaagatgttgcagctggacaccgctgttatcactcccgatctccgcactgttcaagccttgcaaaggcgccatcagaacctggaaagggagttggctcccgtggaggacaaggttaatcgggtgacctacttgggcaactcggtaaagaacgcctatcctgctgagaaagacaatgtgaatgcccgccaacaggaggtgcaggatatgtggcagcaggtgcaacagcgtggtagtgatcttcgcaaccgcatcgaaagcgaggtgggtcagcaggtctttaacaacagtgccaaggtccttctagcctggatagactccgtcaaggatcaactgaatgccgatgagtccgctcgtgatgtggaaactgcaaacaacctgctgaagaagcacaacgatctgggcgatgatatccgtgcccatgacaccgaattcgtggaggtaattcaattgggcaaacagttgtccgatggcaaacccaacatggcagagacggtggctgtgatcgaacgcctgaaggccgaacaagatgccattcatcgcggctgggccgagaagcagaagtggctgctgcagtgtgtcgatctgcaaatgttcaaccgtgaggcagataagatcgatgccaccaccaagagccacgaggccttcctcgagtataataacctgggggcctctttggatgaagtggaggccattcttaagcgtcatctggactttgagaagagcctaatggctcaggacaagatccttaaaggcttctcagataatgcagacaagctgatttctaacgatcattacgattccaaatatatcggagatcgccgaaatcaggtgctgggtaagcgcaaggcggttaaggatcgggcttttgagcgtaaacgccttctccaagcttcaaaggatttccacaagtttgccgccgaggctgatgacctcaaagtgtggctccaagataagacgaggattgcaggcgatgagaactaccgcgacctaagcaatctccctcgcaagttgcagaagcatcaggcttttgagcgggaactccgcgccaacgagggtcagctgaggaatgtgactaaggacggacaggccctggtccaagctggaaatcgagtacctgaggtggaatcccgggttgccgatcttaacaagcggtggaaggatctactcaccctgtccgaggataagggtcgcaagttggaacaggccgcatctcagcgagagcataaccgttccctcgaggatgccaagaagaaggttgatgaactggactctgctctgcgaagtggagatgtaggcaacgatttgcgcagctgcaaggacctgatcaacaagcagcaaatcctcgagtcggaaatcaccatctgggatcagaaggtagcggaactggtttcaactggcgacgacatggcacacgggggtcacttcaatgcccagaatatcgaggccggaaccaaggagctgcagcagcgattcaaggatctgcgtgatcctacccagcgtaggagagcaaagttggaagagagcctgaattaccacaagtttgttttcgaactggattcggagttccaatggatcaacgaacacctgccggcagcaaagtccaatgaattgggtcagaatctgcaccaagcccaatccctgcacaaaaagcacaagaagttggaggcggagatcaagggccatcagccaatgatcaataaggctctggttgcgggtcaatctctgatctcgcaacagcatccggagcgagagcaagtcgagagcctgtgccagcaattggagcaggcatggcaggatctggagcgccattgtggcgaacggtcccgtaaactcgacatgtccctcaaggctcagcagtatctgttcgacgctggcgagatcgagtcctggctaggtgagcgtaacaacgtcttgcggtccacggaatatggccgtgatcgcgattccgcggccaagttgctcaccaagcacaagaccatcgagctggagctggacacatactcaggaattgtaaccgaaatgggacacagctgcgctgcaatggtggcagccaatcatccggacagcaaggtgctggccgccaagcagcagctcattgagaagatgttgaaatccctgcacaaactggcctcccagcgacagggtcgcctgatggagagcctctacaagcacgaatacttcctggaatccgacgaagtagagcaatggatccgggagcaggagcaggccgcctcctcggaggactacggtcaggactttgagcacttgcagctgttacagaacaaattcgatgaccttaaacaccgcgtggaagtcggagcagatcgagtggatcagtgtgagctgttggccaagaagttaatcgattcagagagcccctatgccaatgaggttgagaagcgacaggaacaactcagaacttcctgggagaaccttctccagctccttaaccagcgtgagcagaagcttcatgccgctggcgaaattcaccgcttccatcgggacgttgcagaagccctgttccgcatccaagacaagaatgctgcgctatcccaagaactaggcagagatttgaactccgctctagcactgctacgcaagcatgagggctttgaaaacgaccttgtggctcttgaggcacagctacaagttctagtggaggattctgtccgcttgcaagccaagtacccatctaatgcttctgcaattgcccaacagcaagataaggtggtggccgcctggaatgaccttaaggagcggtccaccgctcgcggagatcgactggctgccagctcagacctgcagaccttccttacagatgtcagggatatagtttcttggtcttcaaacctgcgagctgcccttcaagcagaagaacatgtgagcgatgcagctggagcaacagccctgaagattcaacacgatgccatatatggagagattgaggccagagaggataagttccggtaccttaacgaattgagcgactccatggttcaaacaggccactatgccgccgctgatgtagaggagaagtgtgccgccatgttggatgagcgccagaaactccatgctgcttggaacaaaaagaagataatgctggagcaaaagatcgatctcttctgcttcctgcgcgatgccaagcagattgacaacctttctagctcccaacaggcggctctgagtagctcagacttcggccagacagtagaggatgtgcagaacaagatccggaagcacgacgagtttgagagattgattcaaacacaggaggagaaggtgtctctacttcaggagcacggtcgcaagctaatcgaacagcgtcactacgacagcgccaatatacaaacgatccttcagggagtcctagcccgccgccaaaaggtcaaggatctgtgtgccgtgcgtcgctacaaactggaagatgctctactctatgccaaattcgtacgagattgcgccgaagctaagtactggatcaatgagaagcaaaagaaactcgaagccgatgccgccagctatgcggaggtgaccaatctggacgagaaaatcaagaagctacagaagcaccaggccttccaggccgaggtggctgccaaccagggtcgcatccaagaaattcaagatacaggagtgattcttttgagcaaacagcacgagtcctcaccggaaatcaagagagccatcgaaatagtccttgaagcctggcagggattgctggcggagctggagcagcgtggtcgaggtctggaagaggcccaggacagccttgagtttaacagccagctggacaagatcgaggcttggatccgcgacaaggagatgatggtgcaggccagtgacactggacgggacttggaacattgcaatgccctgatgaggaaactagacgacgttgactcagatatgagggtagacgatcagcgcgtcaagcacatcaatcagctggccgacaaactgatcaaccaggcccaagtgccagcggatacacaaagtgtggataagaggcgaaaggactttaactacaactggcgacagctgcaaggagcactcaatgcttatcgcgctttgctgggcggagccaacgagattcatgtgttcaatcgcgatgtggatgacacggcagacagaatagctgagaagtccctggctatgagttccaccgatacaggccgagatctggctgccgtagaagctctgatccgcagggaagaggctcttgaaagagacatgtctgccgttaagcaaaagattgatcagcacgaaaccgctgccgagttcctgattaaaaagtatcctgaacgtggagcacaacatatcgagaggaaattggaggagctgcacaaatcatggggaaatctgcaggccttgtccgttaagaggcagagtatcctaaacgaagcctacctggctcacaagttcgtgtcggacgttaaagaactggaactctgggttaacgacatgatcaaaaagatgaacaacacacagtcaccatccactatcaacgattgcgagacccagttggagctgcaccaggaacgcaaagtagaaatcgagggcaggcaggaggccttcgctggactgaaacaacagggcgagcagttatccaagagaccccagcaacagcagccggataatgtgcgcaagtatctccttgtgctggaagaactccatcaaactttaaatgaagcctggagcgaaagggctagggatctaactgaggcccatcagctgcagttgttcaaggctcaagtggagcaggttgagatatggctcgccaacaaggaggccttccttaacaacgacgatttgggtgattcctacacggctgttgaaaggctgcttaagaagcacgatgaatttgagaagctgctccatgctgatcacgtggacaccttgcaaaagtttgccaatagcattctagagggtgagcccaaggatgcagatctgatccgggaaaaactggcatacatcctcagaaggaagcagaaactgcttgagctgtctgaggagagaaagcaaaggctgacacagtctcaccaattgcaggagttcctgcgcagtctctacgagattgatcgttggctggtgcaaaaactgcaggtcgccctggatgaaaactaccgggaaccgagtaatctgcaaagtaagatccagaaacacgctgccttcgatgccgagttgttaagcaactcccctcgcgtccagtcggtaatccacgaaggtgaacgcctgatccgaggcgatcactttgctaaggatgagattgcacaacaggtgcaactgctcgagggagattggctaaagctgaagggcgcttcccagaccaaaaaggataagctccagcaggcctacgatgcgttggccttcaatcgaagtgtggatgagttcaacaactggatggacgaggtagagctgcagttgagtagcgaagattacggcaaggatttggctgctgtcagcaatttacttaagaaacacgaacgcttggaagcggatgtggcccatcatggtgaactggctgaccagctgaagcagaaggatgaacagttcttccaagcggaacacttcctgcgtcatgaaatccacgaaagagccaccgttagtatccgtaggtacaacactttgcacgagcccttgggcattcgtagggaaaacctggaggactcattgagtctgcagcagttcttgagggacgccgaggatgaacttcaatggttagcggagaagcaattggtggctggttcccaggatctaggcaccagtcttttgtccgttcaagggctacaaaagaagcacaactctctggaggctgaactaacatcgcaggaacctttgattcaggcgctcctccaaagaggccagcagatgatccgggacaatcacttcgccagcgagcagttgcaatacaaatcggagttgctgcagaaacagcttgtccagttgagagacttagctgccattagacgtctgcgtcttttggacgccgtagagagccagctgttctacgttgaggccaatgaggcggatgcttggatgcgggagaagcgtccggttttgtcgagcagtgattacggccgggatgaggtctcagttcagggacaccaaaagaagttggaagtccttcaaagggaacttaccgcctttaagccgtcgatagaaaaggttgccaaactggccactggtttgattgaaagaaaccactttgacagctccaacatagcggaaaagaatgcccaggtgggtcaggagtatgaggatctactccgtttggctaaggagcgggagtcgagacttggtgagtgcaagaagctctttgagtacctgcgggaaacggaggaattgcacgagtgggtgggcgaccagatggccgtcaccgctagcgaggattacggtgaggacgtagagcatgtggaacagctcattctggcttttgaatccttcgtttccaacttaaatgccaacgaggcaagggttgaggcgtgcttggagcggggcgatcgcctcatccaggagaacaatccctataggagttccattaaatcgaagcgcgatgagacaaagcagttatgggaggagctcaaggatctggttcacgctcgccaagatgccttagctggagccaaacaagtccacgtctacgatcgcgtagcggacgaaaccattcagctaattaacgaaaaggacgcctcgctcatctctgaggactacggtcaggacttggaaagcattcaggccttgggtagaaagcaccaagtctttgagtccgagctggtgggcatccaaggacaggttgattcggttttggccgaggccgctaaactgggcgagatctacccagatgccaaggagcacattgaagtcaaacgtgatgagacagtggaggcatggacggatctgaaggagaaaaccgccgccaggaagaacaaactcagccaggcagagcagctgcagtcctactttgacgagtaccgagatctgattgcctggatcaacgagatgctggccaagatcactgcccctgaacttgccaacagtgtagcgggagcagagcttctcctggccagcaccaaggatcatgacacggagattcgcaccagagacgaaacctttgccaagttcgccgccaatggtcagcagttgatcaaggaaaagcacttccttgcccacgaagtggaggacaagatcaaggttctgcaagcgcgtcacgaacttctaaagcatactctcaacaagcggcgtgagatttacgaactcaacctggacacccaattgttcttgaaggacgccgaaatcctagagcaatggatcagcagtcgcgagccccaactcaaggataccaaactgggagattccattccacaggtggaggatctgcttcgccggcacgaggactttgagaagactgtggccgcccaggaggagaaattccaggccattaagagaataaccatgcttgagcagctattccgtcaccagctggagcaggagaaaatcagcaagttgcaggagaaggagcgtttggagaaggaacgcctggagcagcttaagcaacgagagctccagcgcctggcggatgagaggagacgagcggagaagcagcacgagcaccgccagaatgcggcgtcccaagagaagaccccaatcttctcttcgccgatggtcactccagctcagacaagtggtccacagtccccggccttgagtcaagtccagttgaggcctccatttggagatgataacgagcacctggctctacagaagagcagctccagcggcatgttcggtgaccgactccgtcgcggatctgcggatgccaatgtgaagcgggcggagagcatgaaggtacagcccaagcaggccaagcgtacaccatcgttcaccaccagaagacgtgctcagtccttcaggaagaaccagaagggtgaaggattcgacctgccacccgttgagattcagggcagtctggagcgtaagcatggtttgcaatctggcggcaagaaggctcctgtacgatcctggaagcagttccacactgtcctctgtggccagttggtgtgcttctttaaggacgaaaatgatttcctgcaacagaagacggccactgcacctgttaatatcctcggtgccaaatgcgaacgtgctgatgattacacgaagaagaagtacgtgttcaggctaaaactacccgacggatcggagttcctgttcgaggctccctcgctggacattctaaatgactgggtgcgcaagatatccttccacgccagtctgccgccgaacatgcaactgcttagctacgacgagtccatgaagcaacagtcgagcagttcgccggacatcaaggttactagcagtgtggaatcaccagttagttctcgtaactcatctcccgactcccagcgacgtactagcggagcccaggtccttgacggaacagccactccccaaatggcattccttcaacgacaaatgcaacaacaacaacagcagcaacaatcccagcccagttcacccaccggcggattcgaccagaagccaccgatcccgcccagaggagctgccccagtggccagccatcgccaaagccaggagaatctagttgtgatgcgcaatcgccaaagttccaatgacctgcaacaatccgccactttacccgctggcttgactggagtccagcaaaatgggaacggcaaggatgataacgcgttgttgacgcgcaacagcgaggccagacaatcgggttggggaaatacacgctttgagagcaaccggcccgtatccctgcagcccgactccatcagcttctcccgtgtttcagcggagagttccagcgaaagcgaggcccagtcgatatcatccgtgtccggagtgaagggcagcaagggaaccaaggaggagcgccgcagcggcatgttccgaatcttcggccgcaagggcgacaaggagaaggaaaaggacaaggacaagcgccgctcgagtcaagtcccgccacagtgagaacatatataaattccggataatgagaaggagcgccaccgttacaacagatgaaccaggccgaattgttttttgtattttttataaacaccatgattatgtcatttgtattcgccaagggcaatcaaatttaaaaacaaaaccaactactaaacgagacaagatatgaaaaagttgaaacattaacgtgtcgatttaaagctaaagcggcaaatgaaagtataaaagaaatattatatatatataaagtcaatgtgttaattgcattataaaatgtatctgtaagtttgttcgttgtatgattaaatttaatattcgtaaaacaaaatacttaaacaataaataccatacattgtgaaatcaaa

SEQ ID NO: 237 - protein, 4097 aa, DROSOPHILA
MTQRDGIIKFENERIKTLQEERLHIQKKTFTKWMNSFLIKAKMEVEDLFTDLADGIKLLKLLEIISSEKLGKPNSGRMRVHKIENVNKSLAFLHTKVRLESIGAEDIVDGNPRLILGLIWTIILRFQIQEIEIDVDEENESSEKRSAKDALLLWCQRKTHGYPGVNITDFTNSWRSGLGFNALIHSHRPDLFEYSTIVNSKNSNLDNLNHAFDTAANELGIPSLLDAEDIDSARPDEKSILTYVASYYHTFARMKNEQKSGKRIANIVGQLMDADRKKMQYEGLTTNLLSWIRQKTLELEQRDLPNSLEGIQRELLAFKEYRTIEKPPKYKERSEIEALYFTINTLLKALNQPPYNPQDGQLVNDIEKAWQILEYAEHHREVALRDELLRQEKLEQLNYKFEKKSVLREGYLKEMIQVLSDPRYLRQVDATLKKHEAISADILARVERFNDLTAMAEELDRENYHGKERVRRREQEVMAKWRQLLELLENQRLNLSQMSNLMNLLREIASTTEAVRELQQQFASEDVGPHLLGVEELLQAHSLQELQVNTYGETLKRFNRQALPYKSSEHKDAALLAQRLADLEEAYSELLRRSAARRARLEEARNFHHFMEDYDNEESWLVDKQRICKTGITAKDLRAVLSLQQKHKALEDEIKSRKPKSGQMSTAGKRLIGEQHPRSSEIQSRIDSLAEHWQALEALVELRRRQLEDAAEAYQFYTDANEAESWLNEKIALVNSRDYGNDEPSAQALLQRHRDLQGELNAYSGDILNLNQQADKLIKAGICTLELSAAEPELPEVEQEEWVNETRLVPKEVWEDEWVEKLEHKKVTETKMLPHVKSLFPFEGQGMKMDKGEVMLLKSKTNDDWWCVRKDNGVEGFVPANYVREVEPRPVACIVPKAEKVKSLQKVKKTILVRQVVPVKRIKPVSVAPKPLVQRRTSTQSINENADSVEKRQQRINQTYDELQEMAQKRHALLEDSIHLFGFYRECDDFEKWMKEKERMIKSDEGEGVDNAKRKFEKFITDLSAASKRVEEIDGAVDTFRRQGHSQLDKIIARQRQIHQIWQRLNNAKAQREKSLEGASSVELFNRTCDEAKVWMSEKMLQLDTAVITPDLRTVQALQRRHQNLERELAPVEDKVNRVTYLGNSVKNAYPAEKDNVNARQQEVQDMWQQVQQRGSDLRNRIESEVGQQVFNNSAKVLLAWIDSVKDQLNADESARDVETANNLLKKHNDLGDDIRAHDTEFVEVIQLGKQLSDGKPNMAETVAVIERLKAEQDAIHRGWAEKQKWLLQCVDLQMFNREADKIDATTKSHEAFLEYNNLGASLDEVEAILKRHLDFEKSLMAQDKILKGFSDNADKLISNDHYDSKYIGDRRNQVLGKRKAVKDRAFERKRLLQASKDFHKFAAEADDLKVWLQDKTRIAGDENYRDLSNLPRKLQKHQAFERELRANEGQLRNVTKDGQALVQAGNRVPEVESRVADLNKRWKDLLTLSEDKGRKLEQAASQREHNRSLEDAKKKVDELDSALRSGDVGNDLRSCKDLINKQQILESEITIWDQKVAELVSTGDDMAHGGHFNAQNIEAGTKELQQRFKDLRDPTQRRRAKLEESLNYHKFVFELDSEFQWINEHLPAAKSNELGQNLHQAQSLHKKHKKLEAEIKGHQPMINKALVAGQSLISQQHPEREQVESLCQQLEQAWQDLERHCGERSRKLDMSLKAQQYLFDAGEIESWLGERNNVLRSTEYGRDRDSAAKLLTKHKTIELELDTYSGIVTEMGHSCAAMVAANHPDSKVLAAKQQLIEKMLKSLHKLASQRQGRLMESLYKHEYFLESDEVEQWIREQEQAASSEDYGQDFEHLQLLQNKFDDLKHRVEVGADRVDQCELLAKKLIDSESPYANEVEKRQEQLRTSWENLLQLLNQREQKLHAAGEIHRFHRDVAEALFRIQDKNAALSQELGRDLNSALALLRKHEGFENDLVALEAQLQVLVEDSVRLQAKYPSNASAIAQQQDKVVAAWNDLKERSTARGDRLAASSDLQTFLTDVRDIVSWSSNLRAALQAEEHVSDAAGATALKIQHDAIYGEIEAREDKFRYLNELSDSMVQTGHYAAADVEEKCAAMLDERQKLHAAWNKKKIMLEQKIDLFCFLRDAKQIDNLSSSQQAALSSSDFGQTVEDVQNKIRKHDEFERLIQTQEEKVSLLQEHGRKLIEQRHYDSANIQTILQGVLARRQKVKDLCAVRRYKLEDALLYAKFVRDCAEAKYWINEKQKKLEADAASYAEVTNLDEKIKKLQKHQAFQAEVAANQGRIQEIQDTGVILLSKQHESSPEIKRAIEIVLEAWQGLLAELEQRGRGLEEAQDSLEFNSQLDKIEAWIRDKEMMVQASDTGRDLEHCNALMRKLDDVDSDMRVDDQRVKHINQLADKLINQAQVPADTQSVDKRRKDFNYNWRQLQGALNAYRALLGGANEIHVFNRDVDDTADRIAEKSLAMSSTDTGRDLAAVEALIRREEALERDMSAVKQKIDQHETAAEFLIKKYPERGAQHIERKLEELHKSWGNLQALSVKRQSILNEAYLAHKFVSDVKELELWVNDMIKKMNNTQSPSTINDCETQLELHQERKVEIEGRQEAFAGLKQQGEQLSKRPQQQQPDNVRKYLLVLEELHQTLNEAWSERARDLTEAHQLQLFKAQVEQVEIWLANKEAFLNNDDLGDSYTAVERLLKKHDEFEKLLHADHVDTLQKFANSILEGEPKDADLIREKLAYILRRKQKLLELSEERKQRLTQSHQLQEFLRSLYEIDRWLVQKLQVALDENYREPSNLQSKIQKHAAFDAELLSNSPRVQSVIHEGERLIRGDHFAKDEIAQQVQLLEGDWLKLKGASQTKKDKLQQAYDALAFNRSVDEFNNWMDEVELQLSSEDYGKDLAAVSNLLKKHERLEADVAHHGELADQLKQKDEQFFQAEHFLRHEIHERATVSIRRYNTLHEPLGIRRENLEDSLSLQQFLRDAEDELQWLAEKQLVAGSQDLGTSLLSVQGLQKKHNSLEAELTSQEPLIQALLQRGQQMIRDNHFASEQLQYKSELLQKQLVQLRDLAAIRRLRLLDAVESQLFYVEANEADAWMREKRPVLSSSDYGRDEVSVQGHQKKLEVLQRELTAFKPSIEKVAKLATGLIERNHFDSSNIAEKNAQVGQEYEDLLRLAKERESRLGECKKLFEYLRETEELHEWVGDQMAVTASEDYGEDVEHVEQLILAFESFVSNLNANEARVEACLERGDRLIQENNPYRSSIKSKRDETKQLWEELKDLVHARQDALAGAKQVHVYDRVADETIQLINEKDASLISEDYGQDLESIQALGRKHQVFESELVGIQGQVDSVLAEAAKLGEIYPDAKEHIEVKRDETVEAWTDLKEKTAARKNKLSQAEQLQSYFDEYRDLIAWINEMLAKITAPELANSVAGAELLLASTKDHDTEIRTRDETFAKFAANGQQLIKEKHFLAHEVEDKIKVLQARHELLKHTLNKRREIYELNLDTQLFLKDAEILEQWISSREPQLKDTKLGDSIPQVEDLLRRHEDFEKTVAAQEEKFQAIKRITMLEQLFRHQLEQEKISKLQEKERLEKERLEQLKQRELQRLADERRRAEKQHEHRQNAASQEKTPIFSSPMVTPAQTSGPQSPALSQVQLRPPFGDDNEHLALQKSSSSGMFGDRLRRGSADANVKRAESMKVQPKQAKRTPSFTTRRRAQSFRKNQKGEGFDLPPVEIQGSLERKHGLQSGGKKAPVRSWKQFHTVLCGQLVCFFKDENDFLQQKTATAPVNILGAKCERADDYTKKKYVFRLKLPDGSEFLFEAPSLDILNDWVRKISFHASLPPNMQLLSYDESMKQQSSSSPDIKVTSSVESPVSSRNSSPDSQRRTSGAQVLDGTATPQMAFLQRQMQQQQQQQQSQPSSPTGGFDQKPPIPPRGAAPVASHRQSQENLVVMRNRQSSNDLQQSATLPAGLTGVQQNGNGKDDNALLTRNSEARQSGWGNTRFESNRPVSLQPDSISFSRVSAESSSESEAQSISSVSGVKGSKGTKEERRSGMFRIFGRKGDKEKEKDKDKRRSSQVPPQ

SEQ ID NO: 238 - DNA, 3777 bp, DROSOPHILA
gtcgttgagggtctctatgtatatgcggtactcgcggttcttgcgctctctcggaatatcgaagacgtggtcaaaggacataaggtaagtgatatagtccagtttctccaccgaccgcaagttgaggtacagctcgtagcactcgttgaggtccagatagcgaccgccgccctcctcgtcagtgaactccactagggcactcatgtcgtccggattgttgtacacccgaatcatctcgtcgaactcgacggacagcggcacgctgacctccgccggatgggacttgtagaactgcttgatttgcttgaggcgggcgtagaactcattgaactcgttgggccccgaaagagcggcaatctccgcctttcgttcattgtccttgtcctcgtagagatcgcgtagctgggacgtagagttgtgatgcagttccatgaggtatttaagccggtgctccgaatggatgcgctccttttcgcccggctttttggtcgcatgctcgtccaccatcagtttgaccaggcgctcgcgctcctcgtgtaggcgccgctgttgctccaggagcgtctccatggctcttgaatgcgaggatttaatgcggggaaatatcaaatggaggcctttcacttagcgaaatcccgaagaaaacacaacttttcgtcagcgtgtgtacattaaaaaatacacttacaataaagcagggatggcttatattgtcacatcatattattgtcaggttattatactccgatcacactggcaattaatgtggatttcgggaatgcagatgtatcaaattaacgctcgattattcgagtaatatagtaatgatatttaaagagccaaattgatttttcattatcatatatagattatatcgcatgatttttctacctagtcgattaaagtgaagcctctgttacaaatgcgataacaattacatcgtctatcggtggtctgacagcgacaacaaatacacatttttaccctcgcaatcgcagggtcacactttcgtgaaatcatatgatcgatttgcagtgaaaattttcagacgttgggcagaaggcaaaagtaacttatcgttttccactttcctcgtgttgggccgccgtttccaactcagttcggctgtgaatgtattagcttaattaaatttcaattatttccaggcacggttgttgtacgtgggcttctttaaaacacttgaatttcctttcggtttgtgcagtgaaaaaaatcagtcaaaatggcactgagcgatgctgatgtacaaaagcaggtaattgaaaacttggattgggaacgggcaggcgatcaaggtcgtagggaaacaagcaaaacgagaggcttcgtttgcctttttgcctttgcaatttgcctttgcaataaagatggcgaagtcatgggatctcccaggtcatgtgaacttttcaccgccagtagtccaattagactgacatccttccaaatcggcccggtcatttgggagttgccggagttttgacatatttgttggctaatgaagacacatcaatttatttgtccagatagtttgcgtaaaaagtgagtaaaaattcgtgctggtcatgtgacacggcccccgcattggagcaatgtgttggagcgagacgactagccctgcaccccacactcgtactctctgtcacacgaccagcggaccccttacgttatcaaaactttaacgaaaataaatagaggctagggtcttggacgtctcccttttccatttatcatgtccagttatcatgtgacacacaggcaactactaaacaggacgactgtttcagatcaagcacatgatggcgttcattgagcaggaggccaatgagaaagccgaggagatcgatgccaaggccgaggaggagttcaacattgagaagggacgcctggtccagcagcagcgtctcaagatcatggaatactacgagaagaaggagaagcaagttgagctgcagaagaagattcagtcctccaacatgctcaaccaggctcgtctgaaggtgcgtgtcgtccagttggtggccctaacatataccggaaaacaccttatttttaatcattcgtaatgtaccctgtaggtgctgaaagtgcgcgaggaccatgtgagcagcgtgctggatgatgcccgcaagcgtctcggcgaggtcaccaagaatcagtccgagtacgagactgtgctgaccaagctcatcgtccagggcctgttccagatcatggagcccaaggtgatcctgcgctgccgcgaggtggacgtccccctggtacgtaacgtcctgcctgccgctgtggagcaatacaaggcccagatcaatcagaacgtcgagctgttcatcgacgagaaagacttcctctctgctgatacctgcggtggtgttgagctgctggccctcaacggacgcatcaaggtgagtactgtcctttcggtggagagagagcaatcccaactgatctaacaaaccacttcaggtgcccaatacgctggagtccagattagacctcatttcgcagcagctggtgcccgagattcgtaacgcacttttcggccgcaacgtcaatcgcaaattcaccgactaaattctataagtgcaaaacaaaacataactaaccagaaagagaaccagcatcaacacctattcagcaggaacagttcaagttattacaacagaagctccacccactaaatattgaacccaagtaaacttatcctttggcagtcaggaggcaacagctaggattatatttgattgcaaaatacttttgccgttgtctttgtaaagtgaaattgaaacactcaagaacatttcggtccttgtgtacgcaacagttttaatagtaaccacactaaacgcgcatatatattctccgatatatatgtctgtatgccaatacttattatatagtttagaggacacgatcctaggagcatacgaaagcataatacgagtttgttaaagtttgttcgttttttttttacatatgcacatatttctgagcagtaggtctagatatgtgcttatattgtatacatacactttaaaattttgcatacattcctgtccaagaatttttatttcagttttcccctcgtttattgtacattattttctgtagtctttgttaactttttatatgtctatgtcgtttatgttcgtaattatcaagtgcagcgttcaggaggaacaacggcagtggatcgccccttttacagagccgctggcaggttgcgcatgcgaccacacagcattgttgctcagcgaagcaccgaaatggacctaaacccccgatttcgcttcttcgagggcaacggacgcttgtgcaactgccactggctcaacgaaagccccgaaaatcatcaatgtctgttgttgttgagataccgagagtagagaatacacactgcttagcacgcgacacttaatacccattcattacacatgcaccaacgacgatgaagttttgccaagtagctaagtttgttgacctgaccatcaagtgcagctttcacaccctcatataactacttaaagaaaatatagaaaaatggaaattagttttgcaatttaggggactgccgaactgccaccgtttccacctgacgctgcgccatcatatcaggctctaaaaatcaacacaccatgttcaaacacacgactagcatacaggagcaggagctacagtaaatttgaaccttgtattcgcatgttcgccaatgttcatagtgtattcttcaagctcattttctaaccaagttaccaagtt

SEQ ID NO: 239 - DNA, 1011 bp, DROSOPHILA
tcacactttcgtgaaatcatatgatcgatttgcagtgaaaattttcagacgttgggcagaaggcaaaagcacggttgttgtacgtgggcttctttaaaacacttgaatttcctttcggtttgtgcagtgaaaaaaatcagtcaaaatggcactgagcgatgctgatgtacaaaagcagatcaagcacatgatggcgttcattgagcaggaggccaatgagaaagccgaggagatcgatgccaaggccgaggaggagttcaacattgagaagggacgcctggtccagcagcagcgtctcaagatcatggaatactacgagaagaaggagaagcaagttgagctgcagaagaagattcagtcctccaacatgctcaaccaggctcgtctgaaggtgctgaaagtgcgcgaggaccatgtgagcagcgtgctggatgatgcccgcaagcgtctcggcgaggtcaccaagaatcagtccgagtacgagactgtgctgaccaagctcatcgtccagggcctgttccagatcatggagcccaaggtgatcctgcgctgccgcgaggtggacgtccccctggtacgtaacgtcctgcctgccgctgtggagcaatacaaggcccagatcaatcagaacgtcgagctgttcatcgacgagaaagacttcctctctgctgatacctgcggtggtgttgagctgctggccctcaacggacgcatcaaggtgcccaatacgctggagtccagattagacctcatttcgcagcagctggtgcccgagattcgtaacgcacttttcggccgcaacgtcaatcgcaaattcaccgactaaattctataagtgcaaaacaaaacataactaaccagaaagagaaccagcatcaacacctattcagcaggaacagttcaagttattacaacagaagctccacccactaaatattgaacccaagtaaacttatcctttggcagtcaggaggcaacagctaggattatatttgattgcaaaatactttt

SEQ ID NO: 240 - protein, 226 aa, DROSOPHILA
MALSDADVQKQIKHMMAFIEQEANEKAEEIDAKAEEEFNIEKGRLVQQQRLKIMEYYEKKEKQVELQKKIQSSNMLNQARLKVLKVREDHVSSVLDDARKRLGEVTKNQSEYETVLTKLIVQGLFQIMEPKVILRCREVDVPLVRNVLPAAVEQYKAQINQNVELFIDEKDFLSADTCGGVELLALNGRIKVPNTLESRLDLISQQLVPEIRNALFGRNVNRKFTD

SEQ ID NO: 241 - DNA, 4876 bp, DROSOPHILA
aatatcgaagacgtggtcaaaggacataaggtaagtgatatagtccagtttctccaccgaccgcaagttgaggtacagctcgtagcactcgttgaggtccagatagcgaccgccgccctcctcgtcagtgaactccactagggcactcatgtcgtccggattgttgtacacccgaatcatctcgtcgaactcgacggacagcggcacgctgacctccgccggatgggacttgtagaactgcttgatttgcttgaggcgggcgtagaactcattgaactcgttgggccccgaaagagcggcaatctccgcctttcgttcattgtccttgtcctcgtagagatcgcgtagctgggacgtagagttgtgatgcagttccatgaggtatttaagccggtgctccgaatggatgcgctccttttcgcccggctttttggtcgcatgctcgtccaccatcagtttgaccaggcgctcgcgctcctcgtgtaggcgccgctgttgctccaggagcgtctccatggctcttgaatgcgaggatttaatgcggggaaatatcaaatggaggcctttcacttagcgaaatcccgaagaaaacacaacttttcgtcagcgtgtgtacattaaaaaatacacttacaataaagcagggatggcttatattgtcacatcatattattgtcaggttattatactccgatcacactggcaattaatgtggatttcgggaatgcagatgtatcaaattaacgctcgattattcgagtaatatagtaatgatatttaaagagccaaattgatttttcattatcatatatagattatatcgcatgatttttctacctagtcgattaaagtgaagcctctgttacaaatgcgataacaattacatcgtctatcggtggtctgacagcgacaacaaatacacatttttaccctcgcaatcgcagggtcacactttcgtgaaatcatatgatcgatttgcagtgaaaattttcagacgttgggcagaaggcaaaagtaacttatcgttttccactttcctcgtgttgggccgccgtttccaactcagttcggctgtgaatgtattagcttaattaaatttcaattatttccaggcacggttgttgtacgtgggcttctttaaaacacttgaatttcctttcggtttgtgcagtgaaaaaaatcagtcaaaatggcactgagcgatgctgatgtacaaaagcaggtaattgaaaacttggattgggaacgggcaggcgatcaaggtcgtagggaaacaagcaaaacgagaggcttcgtttgcctttttgcctttgcaatttgcctttgcaataaagatggcgaagtcatgggatctcccaggtcatgtgaacttttcaccgccagtagtccaattagactgacatccttccaaatcggcccggtcatttgggagttgccggagttttgacatatttgttggctaatgaagacacatcaatttatttgtccagatagtttgcgtaaaaagtgagtaaaaattcgtgctggtcatgtgacacggcccccgcattggagcaatgtgttggagcgagacgactagccctgcaccccacactcgtactctctgtcacacgaccagcggaccccttacgttatcaaaactttaacgaaaataaatagaggctagggtcttggacgtctcccttttccatttatcatgtccagttatcatgtgacacacaggcaactactaaacaggacgactgtttcagatcaagcacatgatggcgttcattgagcaggaggccaatgagaaagccgaggagatcgatgccaaggccgaggaggagttcaacattgagaagggacgcctggtccagcagcagcgtctcaagatcatggaatactacgagaagaaggagaagcaagttgagctgcagaagaagattcagtcctccaacatgctcaaccaggctcgtctgaaggtgcgtgtcgtccagttggtggccctaacatataccggaaaacaccttatttttaatcattcgtaatgtaccctgtaggtgctgaaagtgcgcgaggaccatgtgagcagcgtgctggatgatgcccgcaagcgtctcggcgaggtcaccaagaatcagtccgagtacgagactgtgctgaccaagctcatcgtccagggcctgttccagatcatggagcccaaggtgatcctgcgctgccgcgaggtggacgtccccctggtacgtaacgtcctgcctgccgctgtggagcaatacaaggcccagatcaatcagaacgtcgagctgttcatcgacgagaaagacttcctctctgctgatacctgcggtggtgttgagctgctggccctcaacggacgcatcaaggtgagtactgtcctttcggtggagagagagcaatcccaactgatctaacaaaccacttcaggtgcccaatacgctggagtccagattagacctcatttcgcagcagctggtgcccgagattcgtaacgcacttttcggccgcaacgtcaatcgcaaattcaccgactaaattctataagtgcaaaacaaaacataactaaccagaaagagaaccagcatcaacacctattcagcaggaacagttcaagttattacaacagaagctccacccactaaatattgaacccaagtaaacttatcctttggcagtcaggaggcaacagctaggattatatttgattgcaaaatacttttgccgttgtctttgtaaagtgaaattgaaacactcaagaacatttcggtccttgtgtacgcaacagttttaatagtaaccacactaaacgcgcatatatattctccgatatatatgtctgtatgccaatacttattatatagtttagaggacacgatcctaggagcatacgaaagcataatacgagtttgttaaagtttgttcgttttttttttacatatgcacatatttctgagcagtaggtctagatatgtgcttatattgtatacatacactttaaaattttgcatacattcctgtccaagaatttttatttcagttttcccctcgtttattgtacattattttctgtagtctttgttaactttttatatgtctatgtcgtttatgttcgtaattatcaagtgcagcgttcaggaggaacaacggcagtggatcgccccttttacagagccgctggcaggttgcgcatgcgaccacacagcattgttgctcagcgaagcaccgaaatggacctaaacccccgatttcgcttcttcgagggcaacggacgcttgtgcaactgccactggctcaacgaaagccccgaaaatcatcaatgtctgttgttgttgagataccgagagtagagaatacacactgcttagcacgcgacacttaatacccattcattacacatgcaccaacgacgatgaagttttgccaagtagctaagtttgttgacctgaccatcaagtgcagctttcacaccctcatataactacttaaagaaaatatagaaaaatggaaattagttttgcaatttaggggactgccgaactgccaccgtttccacctgacgctgcgccatcatatcaggctctaaaaatcaacacaccatgttcaaacacacgactagcatacaggagcaggagctacagtaaatttgaaccttgtattcgcatgttcgccaatgttcatagtgtattcttcaagctcattttctaaccaagttaccaagttcaatatgatgaataactacaagattagcaaacaaatacaagtagcatatgcgttattatataacatcgagtactatatacattacatgaaatacaaaatgcaagaaaaattacttttaaacaaaatttatgttgaataaaaaacagtatttccaaaaactaaacttaactgtataacaacttccttttgcaatgttctaatgatcctaaaaacaagacatggggtaaactattttaagaaattcaatctaggacttcaaataagtcttaattaagtacacccatattcttgatcagcagagtcaacttgctcatgtttgtatgaaaacctagaacataaaaaagccagaaggtctggactaaactcgcagattcctgtaacttggaagcaccacgagtttgctttagaagatgcctttccgttgaactaaaactagacgagtaaagcgtatctcaaacattgtatcttccgaaccaaaatagtgctgcatacttttcgggatatgtcttattcaatgtaagtaatacaaaaagaaaaaaggtaacttcttaaaacttgtaatatttgtcacaaatgaatgacgactagatttggccatgtctgtaacaataaacgtacaaaatattcgaagttgcagaaatggggatccagcattcggatttggttttttgtcaaacttttaaatatagaatcggaccacatctttttaagaccttaaaaaactgatttgaagttagacccctcataatgccaactaaatttgttaaacaaaaatatgcccctatatgccaatcaaatttaaatacaatgctttctcagcgtttcagttaaatactttgggttgtttaatggttttatacgtatacatgtgctaagtccatgtatcttatatttcgtaaatccatagattttgttcgacgaaactttgctaaatgatattgatctttcaaatataacttgttaatttcctttcatcgccgtggcaaatccttcgagagtgagtactacttgttaaacgcatatatgaggaaaatttattgatgaataatgcgaacatgcaaacggaacacatccccgaattcacacaaagcatctctgtggtatctcttttggttttttatttgttgcatcaactccgcggaactccagctac

SEQ ID NO: 242 - DNA, 2208 bp, DROSOPHILA
ggcagaaggcaaaagtaacttatcgttttccactttcctcgtgttgggccgccgtttccaactcagttcggctgtgaatgtattagcttaattaaatttcaattatttccaggcacggttgttgtacgtgggcttctttaaaacacttgaatttcctttcggtttgtgcagtgaaaaaaatcagtcaaaatggcactgagcgatgctgatgtacaaaagcagatcaagcacatgatggcgttcattgagcaggaggccaatgagaaagccgaggagatcgatgccaaggccgaggaggagttcaacattgagaagggacgcctggtccagcagcagcgtctcaagatcatggaatactacgagaagaaggagaagcaagttgagctgcagaagaagattcagtcctccaacatgctcaaccaggctcgtctgaaggtgctgaaagtgcgcgaggaccatgtgagcagcgtgctggatgatgcccgcaagcgtctcggcgaggtcaccaagaatcagtccgagtacgagactgtgctgaccaagctcatcgtccagggcctgttccagatcatggagcccaaggtgatcctgcgctgccgcgaggtggacgtccccctggtacgtaacgtcctgcctgccgctgtggagcaatacaaggcccagatcaatcagaacgtcgagctgttcatcgacgagaaagacttcctctctgctgatacctgcggtggtgttgagctgctggccctcaacggacgcatcaaggtgcccaatacgctggagtccagattagacctcatttcgcagcagctggtgcccgagattcgtaacgcacttttcggccgcaacgtcaatcgcaaattcaccgactaaattctataagtgcaaaacaaaacataactaaccagaaagagaaccagcatcaacacctattcagcaggaacagttcaagttattacaacagaagctccacccactaaatattgaacccaagtaaacttatcctttggcagtcaggaggcaacagctaggattatatttgattgcaaaatacttttgccgttgtctttgtaaagtgaaattgaaacactcaagaacatttcggtccttgtgtacgcaacagttttaatagtaaccacactaaacgcgcatatatattctccgatatatatgtctgtatgccaatacttattatatagtttagaggacacgatcctaggagcatacgaaagcataatacgagtttgttaaagtttgttcgttttttttttacatatgcacatatttctgagcagtaggtctagatatgtgcttatattgtatacatacactttaaaattttgcatacattcctgtccaagaatttttatttcagttttcccctcgtttattgtacattattttctgtagtctttgttaactttttatatgtctatgtcgtttatgttcgtaattatcaagtgcagcgttcaggaggaacaacggcagtggatcgccccttttacagagccgctggcaggttgcgcatgcgaccacacagcattgttgctcagcgaagcaccgaaatggacctaaacccccgatttcgcttcttcgagggcaacggacgcttgtgcaactgccactggctcaacgaaagccccgaaaatcatcaatgtctgttgttgttgagataccgagagtagagaatacacactgcttagcacgcgacacttaatacccattcattacacatgcaccaacgacgatgaagttttgccaagtagctaagtttgttgacctgaccatcaagtgcagctttcacaccctcatataactacttaaagaaaatatagaaaaatggaaattagttttgcaatttaggggactgccgaactgccaccgtttccacctgacgctgcgccatcatatcaggctctaaaaatcaacacaccatgttcaaacacacgactagcatacaggagcaggagctacagtaaatttgaaccttgtattcgcatgttcgccaatgttcatagtgtattcttcaagctcattttctaaccaagttaccaagttcaatatgatgaataactacaagattagcaaacaaatacaagtagcatatgcgttattatataacatcgagtactatatacattacatgaaatacaaaatgcaagaaaaattacttttaaacaaaatttatgttgaataaaaaacagtatttcc

SEQ ID NO: 243 - protein, 226 aa, DROSOPHILA; identical to SEQ ID NO: 240

SEQ ID NO: 244 - DNA, 5373 bp, DROSOPHILA
gtcgatgcttagctcaagcaccgtgtcctcttctacggacatggctttagagtcctcagtagagactgagtgatatttgggctcgccgcgggctccgtcgaactttgtgggagtgctattgttgagatcgtcgtcttcatcgcttacctccatgatcccattgtcgtctaggtccggctcagagcgggcatcgcaatcgctggacgaggaggatgccgaggatgagctgtcctggtccagctgctgttccagctcgtgaatcgtgtacatcagcaaagtgaagtcattgcgtcgtttctgaaacttgcgctccatctttagcttcttttgcaccaagtcgtcaatctccctcctaatggtctcaatatgtcgctgtgtttcactgcggtccggttggtcctggatgagcgaggccagcaggtcgtactccatcttgttcttgcgaatctgcttggcagtgattagctcttttttactggattcgatttccgctttagccaaaacaatactttcttcgtggtgttcaactagttgtgtgtagttgtcacgctcaccggcgatcatctgcagagtttgtacattctttaacgcagtgagcttgcactgggcgaattgggccatcagtcggtcgtacatgatgggactgtaattcggaaaagaggagatatgtacaccatgttttgaatacacacatatccaatttcttacttgctgtccagcgagtcactggcccacttcaagaactgtttcagcaacactactattctccgatcctctccagttccatccccgtcaatcagcaggcgctgctttatgatttcttctggaagatcagtttaaatatctattcccaaatgcgaaaataaacaaaaacaacttaccgtcattcatctccactaatttccgaactagcgtatcggagtgtggccgaagctgacactgctccgacataccacgcagtacggtcctactgtacttgtcctatcattttaatttggagaaagtattgaattatgccttaccctttatatcccgcccatagccaagtgtagtgccgtacactttcggacatcagcgaatcccattaactaagtgcacttcttgcagaatgtcggaaacgtcaagcgtcaacgtggatgcggaccgagattgcagaaggattgagggcctccgacagcgctcacaacgccttgctgcccgcctccagcagatgcagagggaaatggagtctaatgcatccagcaaagacctatcggccaacaatgccgttattccgctgcagccactaatgcgctgggcggaaccacggccacatcccaaccaatcccaaccatctgctcggagcaacagcaggcaggccattccttacggtgtgccagtatccacgccagcgccggtagctatgcaattgccctaccacgtagcattcgcctcctaccaggcgaccatgcagattccctgccttcagccactttcgcatttgcacgtcgtgtctagtcccagccatcggttaatagcgaaaaagaagtcgaagcgggctcttcgaaatgaggtggaagctcttcaggatatggtcaaacatctttcacacctctccccagatgttaacgcgtatgcctgccagctgatacgtaaaaacgagatcctttctcagctcgagtggagtcagaccaggtcagaagcacatccgcaacaggttggttaccaggggcggcatcgccacgattctgaggtctctgctacaaacaatggaagtcatgtacagcagcaaccgaaactaggacgaaggcaacgcaatagcaagaaaaacgatggatccggtagcaatgggacccaatcgcaaaaaaccgaactagaggccatgcggtcgtacataaacaagattgtccaacgtcacgtgggtatggatcaccagttgtcggaagacttgattttcaaaggtaacttctccgacctggaagcgcatgcgcagagactagttgcggcgggttatgggcgcattgtagaagaggaaatccgggttaaccgcaagaacaacagacaggcctttataatcatgtccactgatcgagaagcactcgaacgagatggcatcgtgctcttgccagtggctaggcgctatgccttcgatggtgacaaagtacgtgcattcgtgctaaaccctggtgctcagggtagttcaaagacagctgagccctcgtctggtgaaatctctggtgggaagccctcattatctcttggtaagtttatcggcaaacttataatactttcgactgatgataatatcctataaagcggatggtgaggagctttcggacgataccgagtcccagggctctgagtccgataccgacaacgtggtcgtgatatcgtcggacaactgccctaaagcgttcgtcatagcaataactaaacgaactgagctccgccagatcgtgggaaccatatcgtttacgaacccaaccaaactctgtgacgaccagctattctacaaattccgaccgtacgatttgcgtgtccccatggtctacgttccgaaggatgcctgtgccgcccacatcggaaacaagcagcaaatagacgtgtccggcctcttataccttgcccatatactcgagacagattgcaatgggcactgcatcgctgaactaatccagccggttggccgcgtgggtaatttggatgacgaacttaaggcaattctgtttcataacggtctccgggatataaagccatttgagcaacgatttatcgacatttactcccagccgccacctccgataagccaagaggatctgcgtcaacgaaaagacttaagaaagatgtgcatatttactatagatccgatgactgctcgcgatttggatgacgccgtttctatagagaagctaggcgacaacgaatatgagattggcgtccatatatccgatgtttcgcacttcctgatagaggacaatgaactggataacatagtgaaggaacgctctacgtctatttatttagccaacgaggtaatccacatgctgcctcagtctctatgcatgcgatgttccctgctccctgggcaagacaagtttgctttttccgtcttctggcggatgaacgggaagggagtcatgctgcaaaagaagccagaattttgccgcacagtcattaactcttgctcgcaatttgcttatgaacacgctcaaaagatcatcgacaaccctaatgaacggtttaccgagaacgactttccgaccatcctgaatggatttaatcccgatgatatcagaaatagggtgctatggctgcacgacattgcaagctccatccgtaagacacgtttagacaatggcgcactcacaattaacaatgccaagctacgcttcctgctcgatccaattactggcgagccgttgtcttttgaagtggagaaacagcgagaggctaaccggctgattgaagagtttatgctcctggccaaccaggcagtcgcccgctttatacacgactcctttccggatatcgctgtactgcgtaaccaccctccgccacttattaagtcccttaaggctttaagggaaaagctgcttgctctgggattcgaattggactatagctcgtctaaggcgctccaggagagcatggtgcggttgtgcaatgaggcgcccaatcctgtcgcaatgaatgcctgcctaagtcagcttttgatgaaaccaatggcccgtgcaacgtgagtgtctcagttttcaaataattactcttcccacaatttcccccctttagatatttttgtagcgagggtaaatcggaaccggctgacctgtggcactacgccttgtccatacccatatacactcactttactagcccaatccgtcggtatcctgatattttggtgcaccggtaactgtcacttaccttggaagttcgcctcccgtacttaaaatttcctccactctagacttttggcggccgcacttaaatattgtacaccgcctaaacgtaccccagatgatttgcacaccttaacgaaattagcgaatgagcgcaagtacaatgcgaaaaaggccggagaggactctggtaacttgtacttcaaacgatatgttcacaacaagcagggcatatacatgcgagctgtggtcattgaaatatttcagcatatgatgaacgtagttactctggagtcgggccacgttataagcattaactacaaaatgcaaaaggtcctcgtagacacacacggcgtacccaattacattcttattgccgagcgcaacttaaagcagtcacctaggaagttgcagctgctttccgtggtccccatatgtctgatcatttgggaccaaaaactaactggatttttaaagatggaagaacaaatttaggaaaaaaaggagcagacgagcagatgtaattcttcgcataggaacaacccaaagcaactgcaccgtattttttcaataagccaaaaaagtttataactacacacagagggaacatcaattttgtttaagagattccttctgtttcagtgtcgttaaatgaaaaatcaaaaaaatcgaaaaatacttgttagtccaaactcacttttttgaaccacattgtgggtccgagctttatgcttgacaaaaattgactctgtgatgcttcctttttcggtttgcatatcataataagcttgtaaaaatgtatgtacatatgtgctatgtaaaatcaaggcttaactgcttatcaataaaacaatcaagttaaccgaaaatgatttggatcatgctgacaaatgttaatcgaaaataaaggtcaattggggtcattggcgataatgttaacggcgaaagtttaaagcatgaggttttttaaattaaatttgcattgacgcagaagtatcgtctgaaatgtctagattcggaatatttgttaggctgtccaggtcgtataatcaccgattgcagctgacgatttttttaaggcattttcctgctgttagttggacttattcaaagccaccctcatccgataatataagaaaactacagtctaggctccaatgcacgcaatcctgcctaaccacccctgagtacaatcccgtctggagtagtgatatggtgagctacgacaataaaagcaaattgaactgcgcaatcaagtgcgggttaagtaagtacacacacaatatctgcacaagtctccagatcggatcgttctaaaactacatccacttgtatcgttgtaaaactacatccatgtctaatctaaaccggcccggacgagtacgctagttatcctgatttggaatatatgtatatatacaagccgtaaagaaagcacttgccttacttttagtaagttaaatttggagctgcacatatgtattctcctgaacat

SEQ ID NO: 245 - DNA, 2955 bp, DROSOPHILA
aaagtattgaattatgccttaccctttatatcccgcccatagccaagtatgtcggaaacgtcaagcgtcaacgtggatgcggaccgagattgcagaaggattgagggcctccgacagcgctcacaacgccttgctgcccgcctccagcagatgcagagggaaatggagtctaatgcatccagcaaagacctatcggccaacaatgccgttattccgctgcagccactaatgcgctgggcggaaccacggccacatcccaaccaatcccaaccatctgctcggagcaacagcaggcaggccattccttacggtgtgccagtatccacgccagcgccggtagctatgcaattgccctaccacgtagcattcgcctcctaccaggcgaccatgcagattccctgccttcagccactttcgcatttgcacgtcgtgtctagtcccagccatcggttaatagcgaaaaagaagtcgaagcgggctcttcgaaatgaggtggaagctcttcaggatatggtcaaacatctttcacacctctccccagatgttaacgcgtatgcctgccagctgatacgtaaaaacgagatcctttctcagctcgagtggagtcagaccaggtcagaagcacatccgcaacaggttggttaccaggggcggcatcgccacgattctgaggtctctgctacaaacaatggaagtcatgtacagcagcaaccgaaactaggacgaaggcaacgcaatagcaagaaaaacgatggatccggtagcaatgggacccaatcgcaaaaaaccgaactagaggccatgcggtcgtacataaacaagattgtccaacgtcacgtgggtatggatcaccagttgtcggaagacttgattttcaaaggtaacttctccgacctggaagcgcatgcgcagagactagttgcggcgggttatgggcgcattgtagaagaggaaatccgggttaaccgcaagaacaacagacaggcctttataatcatgtccactgatcgagaagcactcgaacgagatggcatcgtgctcttgccagtggctaggcgctatgccttcgatggtgacaaagtacgtgcattcgtgctaaaccctggtgctcagggtagttcaaagacagctgagccctcgtctggtgaaatctctggtgggaagccctcattatctcttatatcgtcggacaactgccctaaagcgttcgtcatagcaataactaaacgaactgagctccgccagatcgtgggaaccatatcgtttacgaacccaaccaaactctgtgacgaccagctattctacaaattccgaccgtacgatttgcgtgtccccatggtctacgttccgaaggatgcctgtgccgcccacatcggaaacaagcagcaaatagacgtgtccggcctcttataccttgcccatatactcgagacagattgcaatgggcactgcatcgctgaactaatccagccggttggccgcgtgggtaatttggatgacgaacttaaggcaattctgtttcataacggtctccgggatataaagccatttgagcaacgatttatcgacatttactcccagccgccacctccgataagccaagaggatctgcgtcaacgaaaagacttaagaaagatgtgcatatttactatagatccgatgactgctcgcgatttggatgacgccgtttctatagagaagctaggcgacaacgaatatgagattggcgtccatatatccgatgtttcgcacttcctgatagaggacaatgaactggataacatagtgaaggaacgctctacgtctatttatttagccaacgaggtaatccacatgctgcctcagtctctatgcatgcgatgttccctgctccctgggcaagacaagtttgctttttccgtcttctggcggatgaacgggaagggagtcatgctgcaaaagaagccagaattttgccgcacagtcattaactcttgctcgcaatttgcttatgaacacgctcaaaagatcatcgacaaccctaatgaacggtttaccgagaacgactttccgaccatcctgaatggatttaatcccgatgatatcagaaatagggtgctatggctgcacgacattgcaagctccatccgtaagacacgtttagacaatggcgcactcacaattaacaatgccaagctacgcttcctgctcgatccaattactggcgagccgttgtcttttgaagtggagaaacagcgagaggctaaccggctgattgaagagtttatgctcctggccaaccaggcagtcgcccgctttatacacgactcctttccggatatcgctgtactgcgtaaccaccctccgccacttattaagtcccttaaggctttaagggaaaagctgcttgctctgggattcgaattggactatagctcgtctaaggcgctccaggagagcatggtgcggttgtgcaatgaggcgcccaatcctgtcgcaatgaatgcctgcctaagtcagcttttgatgaaaccaatggcccgtgcaacacttttggcggccgcacttaaatattgtacaccgcctaaacgtaccccagatgatttgcacaccttaacgaaattagcgaatgagcgcaagtacaatgcgaaaaaggccggagaggactctggtaacttgtacttcaaacgatatgttcacaacaagcagggcatatacatgcgagctgtggtcattgaaatatttcagcatatgatgaacgtagttactctggagtcgggccacgttataagcattaactacaaaatgcaaaaggtcctcgtagacacacacggcgtacccaattacattcttattgccgagcgcaacttaaagcagtcacctaggaagttgcagctgctttccgtggtccccatatgtctgatcatttgggaccaaaaactaactggatttttaaagatggaagaacaaatttag

SEQ ID NO: 246 - protein, 968 aa, DROSOPHILA
MSETSSVNVDADRDCRRIEGLRQRSQRLAARLQQMQREMESNASSKDLSANNAVIPLQPLMRWAEPRPHPNQSQPSARSNSRQAIPYGVPVSTPAPVAMQLPYHVAFASYQATMQIPCLQPLSHLHVVSSPSHRLIAKKKSKRALRNEVEALQDMVKHLSHLSPDVNAYACQLIRKNEILSQLEWSQTRSEAHPQQVGYQGRHRHDSEVSATNNGSHVQQQPKLGRRQRNSKKNDGSGSNGTQSQKTELEAMRSYINKIVQRHVGMDHQLSEDLIFKGNFSDLEAHAQRLVAAGYGRIVEEEIRVNRKNNRQAFIIMSTDREALERDGIVLLPVARRYAFDGDKVRAFVLNPGAQGSSKTAEPSSGEISGGKPSLSLISSDNCPKAFVIAITKRTELRQIVGTISFTNPTKLCDDQLFYKFRPYDLRVPMVYVPKDACAAHIGNKQQIDVSGLLYLAHILETDCNGHCIAELIQPVGRVGNLDDELKAILFHNGLRDIKPFEQRFIDIYSQPPPPISQEDLRQRKDLRKMCIFTIDPMTARDLDDAVSIEKLGDNEYEIGVHISDVSHFLIEDNELDNIVKERSTSIYLANEVIHMLPQSLCMRCSLLPGQDKFAFSVFWRMNGKGVMLQKKPEFCRTVINSCSQFAYEHAQKIIDNPNERFTENDFPTILNGFNPDDIRNRVLWLHDIASSIRKTRLDNGALTINNAKLRFLLDPITGEPLSFEVEKQREANRLIEEFMLLANQAVARFIHDSFPDIAVLRNHPPPLIKSLKALREKLLALGFELDYSSSKALQESMVRLCNEAPNPVAMNACLSQLLMKPMARATLLAAALKYCTPPKRTPDDLHTLTKLANERKYNAKKAGEDSGNLYFKRYVHNKQGIYMRAVVIEIFQHMMNVVTLESGHVISINYKMQKVLVDTHGVPNYILIAERNLKQSPRKLQLLSVVPICLIIWDQKLTGFLKMEEQI

SEQ ID NO: 247 - DNA, 2745 bp, DROSOPHILA
tgggcttatcaactttgttcttagccctgtcagctttctcctggtctacatctgagaaatctcttagtgaaggaatgctgatttttacttttcccttgactggcggcggtggaggtttctctatttctacgggcagcgcctttttgtgcagaaactcatcgtctttctcctctacaatggcttttcctttcgctgctgttcgtggcatgggcaggttggcaaaggcggaagtaacctggttgtccacatcctcattttccagatccttagcgggagcagtgacttttggtttgggtaaggctaatagcagtcttccgttgggcggctttaactcctgaagggacacttcctggggaacgtagtcgtcatcttcatcactaatgtgaccactggttgattcccgagctagatacgcttcacttggtgtgctcggcttggcttggggttttattacttccacttgtggtacagaattttcctcttcgttctccgaatcttcatcagaactggcagcataagcaacaagcgacatgtttataaaattgctaaagttaaacaatacaatacacaacagctgtttaatgtgcccggactctagagttgtcacctgcttgggctgccatggttggcaactccctttgcttaagcgctgtgctaaccaacactgttaaaattaccgctaaaacgtaatttcgaatttaaacttaaaattatatagtgcgttcaattcgttcgttttatttatgatagcattatacctgcaatcctcaaagtataatattcggagctgtaaaaaccctacggattataaaacaaacctcaaataggatacttataagtgctatacctgatccttattgtgtccagatggtttccatccttgattaccaggcgacaattaggggattcgttaggtagcccaatcgctcccgattacctgttctacaactttttttttttgtttaaataaggcggtcaattttaacattgatcagtacaactatatctttcggagaatacagttataacattagacatgcatcatcaccagaatctcggagacgcggccgccatgaatggaatgatcccgccatacgaagccatggctatgtacgagcagcccaagcccagattcatcttcaagatgccccgcgtggtgcctgaccagaggtccaagttcgatagcgacgagctcttccgccgattgagtagggagagcgaggttcgctacacaggataccgggaacgtgcaatggaggagcgcaggatgcggtttgtcaacgactgccgcaagggctatgcggagatatcgatggtagcttcaggaactaatctgcagctctacttcaacgccaaccacaatccgtacgcccaggagcaggattgcgatttcgagcgggagcggggcaaagttcatttgcgttctagtttcatcatgaacggggtgtgcgtccgcttccggggctgggtggatctggaccgactggatggcgctgcctgcctggagttcgatgaacaacgagcccagcaggaggatgctcagctgcaggagcagattcaaagctacaaccagcgcatggctgagtccaggagaatctaccacacgccccagactccacccgaggatcaccatcacagaggtgggcctggtctgcctagaggaccaatgggatggtagtgctatatattaccctcatagctttaagtaacatctaagtaaatcaacaataaatatctgaaacccattgatcgtgctcttataatactgagattatgtttaatacactaatggtaatatctgctctcaattactaaaactctcatttcacaaggagtttccgagttttgtgtgtcattcatttggcgaaagccactcatgttcacctaatgattgtttatctgggcctccttaagggttgctagccggggtctttggcctcatttgcgccactttcggaacaaccaccacccgagccgactgcccgaggatggtgaagtgggtccagctgccgttccgccattccgccgtgctctccactctccggggtgggcctgtcgcggctgtggctgcggctgtcctctcttgactctcgatgcggccagagcaccggtcccgtgagcacgtattgattttccgccattccgtttgggatgctgccgaaataaactttgcaactgctctgaatgtgaatctgaatccgaatccgagtcagtctctttccgaactgaaagcggaaaggcgtcgagtgaaaatggaataggtgaagggaacgccgccgcggactaaaaattcataaacttatacataccgcagcgatttgaaaacttgaaaacattcggattgtgtgcctcaatttgctggtggtcgcgtatttttccgcatcgtccgaatcggcacgaaaagctaagagattcgtctaaaattagcgaccggtgtgttttggtagggtgttgtattggctaggggctcccagtgaactccgcccctccgagtatttacccataaccgggccaagatgcctcctgcatccaatacgatcgtgctgaagagcctctccgtgctgctgggcctcttcttcatcttcgtgggcaccctcaagctgacgccgcacattagcaaggatctctacaaggacctggtgagtggaaaatcgatagcgccagagttttaggccttttgtcctggggtacagcccatcgatttttcccacgccccttcgaatctggccttttgaaaactatgtg

SEQ ID NO: 248 - DNA, 745 bp, DROSOPHILA
ctatatctttcggagaatacagttataacattagacatgcatcatcaccagaatctcggagacgcggccgccatgaatggaatgatcccgccatacgaagccatggctatgtacgagcagcccaagcccagattcatcttcaagatgccccgcgtggtgcctgaccagaggtccaagttcgatagcgacgagctcttccgccgattgagtagggagagcgaggttcgctacacaggataccgggaacgtgcaatggaggagcgcaggatgcggtttgtcaacgactgccgcaagggctatgcggagatatcgatggtagcttcaggaactaatctgcagctctacttcaacgccaaccacaatccgtacgcccaggagcaggattgcgatttcgagcgggagcggggcaaagttcatttgcgttctagtttcatcatgaacggggtgtgcgtccgcttccggggctgggtggatctggaccgactggatggcgctgcctgcctggagttcgatgaacaacgagcccagcaggaggatgctcagctgcaggagcagattcaaagctacaaccagcgcatggctgagtccaggagaatctaccacacgccccagactccacccgaggatcaccatcacagaggtgggcctggtctgcctagaggaccaatgggatggtagtgctatatattaccctcatagctttaagtaacatctaagtaaatcaacaataaatatctgaaaccca

SEQ ID NO: 249 - protein, 189 aa, DROSOPHILA
MYEQPKPRFIFKMPRVVPDQRSKFDSDELFRRLSRESEVRYTGYRERAMEERRMRFVNDCRKGYAEISMVASGTNLQLYFNANHNPYAQEQDCDFERERGKVHLRSSFIMNGVCVRFRGWVDLDRLDGAACLEFDEQRAQQEDAQLQEQIQSYNQRMAESRRIYHTPQTPPEDHHHRGGPGLPRGPMGW

SEQ ID NO: 250 - DNA, 7993 bp, DROSOPHILA
tatttaaaccgaagatatttccaaataaaatcagtttcttacaaaaactcaacgagtaaagtcttcttatttgggattttacaataagtcacataactatttgattgtggtgtgggccatattgcgttgtcaattaaaacccttatctgcaatagctactttgtgttgttctttgtttttaattacatacatttgtcttcctatctacagttgtaatctcgctttacaattaattttcttttcttacatattcatgtgtaatttcctcaaaattgcgaatccattttaaaagttcggaaattttaaaactctttttatgtcgttgaagatgataacagtaatcatttacggattttgtccctcttcctttaattttttatgcgttattcatgagtttcataataaaacatcaaattaacttatatatatattttgcaatgataagaagacaatggaatggaagagaagagaagacgttggtgtttaaaagaattgtagcccacaaagacgtgctttgttttgaagttaacgatcttttgtttaatgtgatttcaatttaatggcgaagattgaaaaaatttatcaatgataaagaaattacaccattatttgttttcattttcctatgtgtccttaaaatacgtgttaataaatatagtatacatttacatttataatatttgtcttttggtttgtcattcttttggtgcaatgtaaaaatccatgtaaaacgggatttgagtattaaatttgtcatctaattaacgttaggtaaatattactcctaatttttcgttttctttacgttttccagtgtttttggtttgttttagctgcagcttaggacaactctacatgtacgtaaatgtaagtatggaattcgaaacttggtgcaggcaatgagaatgtagatccactgctgttatcgtcctgatcttagtaggtgcctgaaatgatactttccgattagaggaactcaagatcgcccctgtggtgcatactaactggggcactcgggtgggttcatgtagccgaagacatttaactcgtaaagcgacgccagtgtgatgaagaacaaataccagaccataagaattatgccgagtcgcttgtccagcttccatccgttcaagtgcgtcgacagaattaagaagacgacggtggagaagagcgacagcgtggagtaagccagtcctgaaaatcgaaattgtttggaaaacagacaggagagggaaatagcacctaaggattagacttgaacggtattacgagcgctgctacttggcctaggactctcatgccaaggacacacgacgatgactacaaggtagatagacacgcaagcaatacatacccttggatattacgttgacgtgcgagccgggcttaatgatggccgtctgtatgaaccagggaagacctaagcacactagtatatcaaagacattcgagcctatagcgttcgacacggccatgtcgccaaagccctctttgataacggctattgagcttagggcatccgggacagacacgccagcggccacaaacgtcaaacccattacggtgtccggaatggcaagcgtggacccaatcacggtgatcatccacaccataaagtaagagtagaacgatatccacaccatcgacattaggaaggtgaaggggtaccagttgcgatactgctcctgccggcagtccggcatcgtcttcttgcagagaaagtggatcgggtagaccacgtaccaggaaaccagagctggcagccctccttccatgggacgcagtagaggatcgcggcgcggttctcgctgcttgtccgtggacttgtagtagtcgttgcctccggccgaggtggcctgagtagacacaacctggccaccactcttgacggccgcaggtggaccatcgcctgttaccacagactcgggctggtcggcatggtagcccatgttttcctgaccactgtgacccattccccagtcgtcaacgggcggaggattggccactggattcggctggctctcatctccccatgcggcgttcgggtcccatgtcggattcggatcgctgtagtcctggtagtcgctttgcggcttcgcacttctggtctcgctatcatcggtggccttctgtccctgggtctggccgacactttcttgggtgtaggagccttctggaacatttttgtaggttaccagtgctgactgctcttccttactaggtagcttgaagggtaaattcagacccagtgcccagcgttccagctccgtattgaaatggagggccacgcagtatcctacgtagcagaggagcatcacgacggactcaaactaaaaaaaaaaggatatcagatgacgataacgatggtttctatttggtcgtaacttacgcatgatataacgtcattgaagatgattattaacattacaagaatagaaacacagtagaagaagcagtcccgcaccaggggccaccagttcagttggcagacggtacccgagcacagggcgcagacagagatcacgaacataatgttaaaaacggccgatccgatgaccccgctgatgccgatgtcgtccttagcaaagaacactcctatcaccacagtggccagttcaggagccgagcttccggcagccataaacgtggctcccgcaacatctggcgatagctttagctcttaaatggaataaacaaacgagtgacggatattataataatccttttgctgcaccaaatagttgaatatttaaaatatttcagtattcacacctcgccagaaaaaatgtgatcatataaccattatcacttcggtgcctgtcagtgatcgaaaaataaaatcgcctgtggctgggccggttataaagggttacccatcaatattttggcaaaatacataataaatacattacatacacgaagaaattaaagcttgcagtggttgatcataacgagtggtcatggcgaggtaaaaaacaagccacgacgcttcttcaaatgcaaaattgattgcctttctaaatacacaaccgaaaagttgatattcaattttgtatgctaaagtatcgatcgccactttttgtttggctgaggactcaccctcgcaaagccgatccagactggccacaaagtactcatcgcaaactattgccaacccgaagaaagtgaagactgccaccagtatgtggaggataaggccgccgtgctgtcgcgcccacttattcatcagcggctgtggaaactgctcgatagccgggggcgtgcagttgtcccgctttgggcgccaggtgggaaccgcgccatgaatgggagtcgattgtgtactcgcctgaggctatcggagaaggttttagtcctaagtggtcgtggatctttatgacacggtacctcaaacgccagtgttgtgtccagaacggaactctctgagtttctctctggagtatcctctccgttggcctcggcatcgccagcgtcctcggccagagcgcccacatccagaggcaggacctgtccgtccttggtgtctcctttggcggagtagatgctgacgcaatagtatattaagaacagcagccccatgttccacatgcgggcacggcgggatcgactgcgtacaatctgcaaaggaaatatttaggttagcgcggtttacatatgtatgatgttcgattccggccactaaaacgacatgtttctaaacaaaaacgtgataactctccattactttcaatatatcattaattctagaattcatttaataaatgtttttggtagcctttgggacataccctaggttttaaagagttaacagaccaagctggttcccatcaatgtgataaggtgaacatatgtactacttattaatggtatagacgtttctttaatgaaaacgatcaattttgagtatttgagcatgacttgtctatattaccaaagacgccagaatattattctattgtcttgatattaccaacatcacaatagtcttgtgtagcaaacttcagactgaaaatcattttacaccctgcaatggtataaatagagttaaaaagtttactgtccgattaaggcttattataagaacattctttgagttttatatatagaaaagcttcgcataatggaatgaccaaatacttaatctgtgatatcccttcaaaaacgatttcctttatcaatcagtgtttgttaatttgacacaaactaacaaactcatttgacagtgtacaaataacagcttggaaaggaaataatggagtactaagattttttatgctggggtatggtggttggcttattgcacaagccagctttgtctgccgctctttggtagaaatgtgacacctacatacaatagtttgaactacagtaaggccaaccacacaaaatattcatataagaacatacatatcttcttaccaaaactcaagtttacctaagctttaagcccttttgtctggaattttaccttgtatgtttatattacattttccgacaaaaacaataaagaatacaatagtcgacttctcgactatcagatcttcgaaatttcataattttctgggatatcgatagttattggtgataaaaattagaaaaaattaaaaattgtttaaaaaaaaatgaaaaaatatcaaaacattttcaaaagtatgggcttggcagttttgggcggtttgtgggcgttagagtgggcgtggaaacattgctctagaatctgtattcttaatatcaaccttctggcttttatagttcctgagatctcgacgttcatacggacatggctagatcgacttggctattgattctgatcaggaatatatgtacttcatatggtcggaaacgcttccttctgcctgttacatacttttcaattttcggtatgtagatccaatgcaggaggtgtgcatacatacataaatcttcccctgactgtccgatacgctttacccagttagtagaagtgaaaaaatgatatttcatatatgtatattcatatattttgtcagcatagcgattgaaaatgccgaaaataaattaaaatggtgtccatctcaacattgtatattttatagttcccgatatcactgcgtttatacgaacaagaccagacgactaggtggagcagatagtaaacctgctcacctatttatttaaagcactttataatcgaaaccaccgatgcaaatttttttccatttatttccccggtattccatggaaaccatataatatatatagtgtttcgattcgaatatatgtatatttaaaacctgcaatagaaagcagaaagttgaatgctttgtgcagaaaaaacgtttggtcagacggacatagacatataaactcggttgttaatactgatcaagaatatatactttatatgctcgcaaatatcttagttgctgcgttgcaagctactgactcaaattaaaatgccctctgcaatgttaaaaaaaagggttcgaaaaatttttattttgaggccagtttaacgcagctctttttcaacattaaagccacttttgtcttagactctaaacgtttggaaaagttacatacatttgtatgaacataaaaacatattagggagcacagaattatgaatgcttaagtaatttcattgtttaagagaaagtacagcacttattgtgcactagagtttctataccatctgacactatggaccttgtctcccaacttctagagttctgacaatgctgaatccactataatctataaacgcagatgtgattgaataattgaagttgatattgttattgttgttgctgctggtgtgataacagcgcacacttaaagcaaattcccgagcgtcgggactctcctctccctctctcttaagagagagcgagagcgcgagggagcagcgagagcaagtggggagttcaccattaaacacgaccggccctgggatacagagatagcatcgtgaggagtgtggggcgtgatgcgaaggtcttggcggcgtcagtatgactgagtgactaacgaaaccaaagccaccacaccattccgtgagctcagtgcccccctttcgggccactcggtcatgccgcaaaatatcgatttacagttacgctttcctctccccgtgaccctcctgcgctgacagcacccttactcccgcttgctgttgggtaaggttgcaagagtgccgcagtggttttcggttgacttttgccgttagttaccgttgttgttactggtgatgctgttgttgcctccacgggtctgctgagagatatgggaagagggggaaggaatccacgatgacggcgtcatcttataaaaataaatgactatgcttatttaatagactaggggacagtggcgtcggactgggaggaaagaaaagctgtggtagctgagcttacatcatacacgttcgtattttacttcagcggcgcaagacaatggggcatagaaaagcaaatgcgctgcttctgcttctgccccattctgctccttcaacaagagtcgaggggtgacaattgacttgcaatttgcattaaggcaaaggatgtgcataaacatggctcagcggattaggcctgcaccttgtggcccatttcataatcactttttaccattttcactgttgcctggtggcgctgctctaggttcactctccgcggacttttgggctcgttaattgcaggcggtagttaaatttttaacggaaaacagatacagaagaaacagttgccttggaaaacatgtgaggaatcaggcggagagttgagttcacttggccagctccactaatccataggcctttaacttaatctcggttcactgggggctttgaagtagggtttcgcctagcatatcattttacaatcgatgattttcgcccttttcctcgccgggcgaacgtggacgagtatatgcggttcgaatcgagtacctcacggactaaaacgagacgagacacggctagagtggatcgagctggcctggttttccaccgatgacgtctgagcgcgaactgatgcagcgtcgtcgtctaccgcacaacttcgcacggatggagcggacgtccaccagtggcaatccaccacagccgaacgcttcggccggaaatgtgaaataagaaagtgcgacgcctgggaaatggcttcggtgtgggtgggggtggtggttgtgggtgcgagtgagtggtccggtagcgccatctatagacagctttccaagtcgtggtccgtggaaattataagctggcaacaaattgaaacattttaactaacttttcgctgttggatggaaaaactttcgaatggagtaagaaatataaaataagaaaaactcagagatatcacaattgaattatgatatgtatgatatacgtcatacatacaatgatatgtatgtatatattcctccacttcaattttatatcgatagcaaagctcctcgtgcagggttgttatggagaaattctcaagcctaagaataacgagggatagcattgtagtacatatgtatttgtttgattattatttatttgcgcacagcctagccatcaaacgtcaattgcgatggcatagtcaaacagcaaacaagcaacctctgtcagcgcatcatttgaagtgccgctaaggacagcatttgtctggattttgccacattatcctttagatgtgcaacgtgacttgccgctttctcagatcttgccgctagctaagcatgcctctgcgaaaacacagttctttagaggacatgtctccgtcgtccttctgaatcgtcacctacaaaaaaaccgcttgaacaatgacaaatttacctgttgacacctacaaatagacaattcgtctaattaatgggagcgctccggagactactgagcccatccaagaaatatgacggcttacagttcctcaattgtaacaggttatggcttaattattagtcgatggatctttagggttcataaagatgccagactgtctgccaaactccagaaatatttgca

SEQ ID NO: 251 - DNA, 2359 bp, DROSOPHILA
atcggtggaaaaccaggccagctcgatccactctagccgtgtctcgtctcgttttagtccgtgaggtactcgattcgaaccgcatatactcgtccacgttcgcccggcgaggaaaagggcgaaaatcatcgattgtaaaatgatatgctaggcgaaaccctacttcaaagcccccagtgaaccgagattaagttaaaggcctatggattagtggagctggccaagtgaactcaactctccgcctgattcctcacatgttttccaaggcaactgtttcttctgtatctgttttccgttaaaaatttaactaccgcctgcaattaacgagcccaaaagtccgcggagagtgaacctagagcagcgccaccaggcaacagtgaaaatgattgtacgcagtcgatcccgccgtgcccgcatgtggaacatggggctgctgttcttaatatactattgcgtcagcatctactccgccaaaggagacaccaaggacggacaggtcctgcctctggatgtgggcgctctggccgaggacgctggcgatgccgaggccaacggagaggatactccagagagaaactcagagagttccgttctggacacaacactggcgtttgagcctcaggcgagtacacaatcgactcccattcatggcgcggttcccacctggcgcccaaagcgggacaactgcacgcccccggctatcgagcagtttccacagccgctgatgaataagtgggcgcgacagcacggcggccttatcctccacatactggtggcagtcttcactttcttcgggttggcaatagtttgcgatgagtactttgtggccagtctggatcggctttgcgaggagctaaagctatcgccagatgttgcgggagccacgtttatggctgccggaagctcggctcctgaactggccactgtggtgataggagtgttctttgctaaggacgacatcggcatcagcggggtcatcggatcggccgtttttaacattatgttcgtgatctctgtctgcgccctgtgctcgggtaccgtctgccaactgaactggtggcccctggtgcgggactgcttcttctactgtgtttctattcttgtaatgttaataatcatcttcaatgacgttatatcatgctttgagtccgtcgtgatgctcctctgctacgtaggatactgcgtggccctccatttcaatacggagctggaacgctgggcactgggtctgaatttacccttcaagctacctagtaaggaagagcagtcagcactggtaacctacaaaaatgttccagaaggctcctacacccaagaaagtgtcggccagacccagggacagaaggccaccgatgatagcgagaccagaagtgcgaagccgcaaagcgactaccaggactacagcgatccgaatccgacatgggacccgaacgccgcatggggagatgagagccagccgaatccagtggccaatcctccgcccgttgacgactggggaatgggtcacagtggtcaggaaaacatgggctaccatgccgaccagcccgagtctgtggtaacaggcgatggtccacctgcggccgtcaagagtggtggccaggttgtgtctactcaggccacctcggccggaggcaacgactactacaagtccacggacaagcagcgagaaccgcgccgcgatcctctactgcgtcccatggaaggagggctgccagctctggtttcctggtacgtggtctacccgatccactttctctgcaagaagacgatgccggactgccggcaggagcagtatcgcaactggtaccccttcaccttcctaatgtcgatggtgtggatatcgttctactcttactttatggtgtggatgatcaccgtgattgggtccacgcttgccattccggacaccgtaatgggtttgacgtttgtggccgctggcgtgtctgtcccggatgccctaagctcaatagccgttatcaaagagggctttggcgacatggccgtgtcgaacgctataggctcgaatgtctttgatatactagtgtgcttaggtcttccctggttcatacagacggccatcattaagcccggctcgcacgtcaacgtaatatccaagggtgctatttccctctcctgtctgttttccaaacaatttcgattttcaggactggcttactccacgctgtcgctcttctccaccgtcgtcttcttaattctgtcgacgcacttgaacggatggaagctggacaagcgactcggcataattcttatggtctggtatttgttcttcatcacactggcgtcgctttacgagttaaatgtcttcggctacatgaacccacccgagtgccccagttag

SEQ ID NO: 252 - protein, 658 aa, DROSOPHILA
MIVRSRSRRARMWNMGLLFLIYYCVSIYSAKGDTKDGQVLPLDVGALAEDAGDAEANGEDTPERNSESSVLDTTLAFEPQASTQSTPIHGAVPTWRPKRDNCTPPAIEQFPQPLMNKWARQHGGLILHILVAVFTFFGLAIVCDEYFVASLDRLCEELKLSPDVAGATFMAAGSSAPELATVVIGVFFAKDDIGISGVIGSAVFNIMFVISVCALCSGTVCQLNWWPLVRDCFFYCVSILVMLIIIFNDVISCFESVVMLLCYVGYCVALHFNTELERWALGLNLPFKLPSKEEQSALVTYKNVPEGSYTQESVGQTQGQKATDDSETRSAKPQSDYQDYSDPNPTWDPNAAWGDESQPNPVANPPPVDDWGMGHSGQENMGYHADQPESVVTGDGPPAAVKSGGQVVSTQATSAGGNDYYKSTDKQREPRRDPLLRPMEGGLPALVSWYVVYPIHFLCKKTMPDCRQEQYRNWYPFTFLMSMVWISFYSYFMVWMITVIGSTLAIPDTVMGLTFVAAGVSVPDALSSIAVIKEGFGDMAVSNAIGSNVFDILVCLGLPWFIQTAIIKPGSHVNVISKGAISLSCLFSKQFRFSGLAYSTLSLFSTVVFLILSTHLNGWKLDKRLGIILMVWYLFFITLASLYELNVFGYMNPPECPS

SEQ ID NO: 253 - DNA, 4814 bp, DROSOPHILA
tccaaaatctacagttatgcgtcgaagtatcatggtaaccgaatttagaatttttaagattaatgaagcgttccagcagcatagaaataatgaatattttttttatctagattttaagagccattcctcattgcgaacaaaaaaaaaaaacaggcatgacgtcatcacttttgaggaaaaaacgcaggccggccgccattttgagaaaaagccgcatcgcgtttttgcccattgaattttgcccacacaaatttcttttcagcattatttcactagatttttttttaaagtactcaccatattgagtttttattggaagtgtttcacacgcgacaaggaaaattcacagaattgtgtagagctacgatttcgaggtctgactcagagagcgtatacgttcgaactgccggctatgaggcttgacaaacgtaaaacgaatatgaaatgtggaaagcgggctgctttatataggcaccggagctagagacggcaagctgtcgacttaaacgccgcataaccgataactgaagtgggagaggtaatggcacttggtctctctaaaacttgctgcggtattttgcaggactagttgggactcgaaccagggcgtgaatctttgcttgcccaaccggtagacctaaccggttgctaaagtgggccaacattaataatatttttgttgaatgtttcataaaagctattttaatataaattcgcatcgttaccgattcaataaggtttagtaaatcattatatttctgactccatattgatttccaacagcaaattaattaactccataacttcccctctccctttggagcaaaggatgtagttaatatcttaacatctaaacttgttttgtttttttattcaaataggagttatattaaatagaaatgtaaaaaacaaagcaggttttaagaaaatgatgtcaggagattttgaactcctactcatggtcactctaatcgcagtctgcaatttacgtgtttccaacttaacgcccccaagttaatagccgtaatcatttgaaaagaaaggcacgcacgcacaacgccatgcggatcgaacctggggactccttttggacgaaaaaggcgatgttttccaacgcagaaaggcagtactttgagacggtccgtccgcggaagaccagtgtgagtaaaagttgaccgtcgatggcgatttcacaagtgacgtttaagtggcgggaacttctactcacaaatccctgagccctgtgatatgatttattttatggagccgtgatccggacgaaaaatgcacacacatttctacaaaaatatgtacatcgcggtgcgattgtgtcgcttaaagcacacgtacacccactgtcacactcacactcacatgcatacaccgccggcgaactttggtgtagttggccaccctacgaaattcaaccgcttcgattcgaattttcgaatcaacagttattggcagtcgaacaaaggcggcaaactttcgagttgcagaaaagttaacgcattcgattaacctttcagcttccgggctccaccgcgcccaacatagccgctccggtaacaaaggccacgaagaagaataagacgatggccgagatgatgccaaacaaactgctttacgtgagtacgagtttgtatcattcgaatttttagactaaagcccgctgatcgtgcagatgaatccgcttaccatggaggcacacttctttctgcagaccctaaactcagtgaaccagacgacgaatccgccgcagctagacccgcacctggccaacctgctggagcgcattatggtgggcatcgagagctacttggacaggaatcccacatacgttttgccgcaggagatggccgcaccgggtgagggcgtggccttcgtccagccccaggagctgcagacaataaagcgaacattcagctgtagttcctgcagcaaccgcatagtgggcaccaccatcgcaaaagctgtggcccacctttcggagcagcatccaaaacccaatcccaacaatcagccagtccagccgcatccgacgcatcagacgaaacaggagaaaaagcaggcccaggtgaaggctcgtcagcatataacagtacggctacccaagagtaggtcaccatttcatttcatttacttacgcagaagtgcagtctaaaaattgtggtctgactacttgtaaatgttagattgataaagcctcaatactttgattaatatgttttctttagagccagcgatattttataaatactttttacattgcagaggccagggcaatgattgtgggagagattacgaatgtgtttaaggacaaatacccaatagcggacaagttaaaggtgattcccgagtacgacgttatcgaacaggacctgtgcaagcttttgtcgccgggctttcccaaacaaccactgcgagtctacaagttcgggtcccgcatcacaggcattggaaatcgatcctcggacctggacctcttcgtcgacatcggtaagtcgggttagtactgcattgagctcctaccaatttcacctggcttctgaattggcaggcaacacatttcacacgttcgagcatcgagcttccaacgctaccgtcgccaagctgcgggctatgaggaagttcttctgcgacagcgaggactggcgtcttattaatgtgagctgtgtccctaagcaatacgttcgtttttaccattgcactttcttcaacagttcatcgaacaggctcgcgtgcccatcatcaagacgtgccacttaccaaccggtatcgagtgcgacatttgtctgaacagcatgggcttttgcaatacaaatctgctcaaatacatatttgagtcacagccactgagtaagcacatgctgccggatagagtccatgttatctttttgcattcgctcccttgcagctcaatatatgtgcatatatgtaaagaactggctggagcgctgcaagctaactgaacaaatatcgacgtacagcattacactgatggtgatttacttcctgcagctccaggccctgctgccccccattgccatgctgcagatagaggatgcagccaatcaggccgtgctcgtgggtcgtaagtacatcgtcggtttcttggggggattcaccaagtaagtcgtctctttacagcgtgggttgtcaactttgcacaaaaatcgtttagcgaactgggactgcagcaattaaaggcgaccgtccccgtcatcaagggcttccttcgaaacttctttgcgtatttcgccaaatttgactacgagcatttcttggtctgcccatatataggtcaggctaatgttgaaatcgcgaagattgagaggatgctgcatgctaggtgagaatattaattgcttaactttaagccctttaaatatgtaatgctatatagaaattacaaaaaaaaaaaaaaaaaaaaaaaaaactttccctgctactaggtattcagcatatgtgtcggacaaccctgaatgctcgatccagctgaaaaaaccgatggtggtacaggatcccatacaactaaaccacaatgtaacgaaagcggtgaccaaatatggactgcagacgttcgttgactactgccagcagacggcggagctgcttgaggaaccttccaccaattggcgtcagcgctatgcattttaaagaaatccccctcgattatctgtccctgcatccaatctcaaggcacttccgtttatggtctgttaggcttctaccttgtgagcgcgacaccaatgtaggtttgttcagactgttaattaaaggcgattgtcacgtttcggcaatatatttcactaacaagcttttaaattgtataattggtttggtatcatttgcattaacacataaagtgacctcgtatggcacgcacagacacggactacatctgccaggactcgggcagccggttgaacaccttcagcagcatatatattgtgaagcccacgattaggaacagccccaggaagctgatgcggttcagccagtgctgcttggagtcgcgcatcaggttgtaaatgctcatggccgagctctccgcctcctccacgctcccgttattgtcaatgacgaagtgagacttctcgcacttcttgtccagcggcatttgtgaatcgacgcgatgccgggcttccgattccgagagctcattgcgggctattaatcgctccagctgcttgtccgagtcgctgcaatatggggggatgcagttaaagccagctacactttgacacctagcattcaagagctattaacctaccaggttacacagacgatcttgtgtataaagtccatcagcacgccggtctcaaagagcagtggcaggtcgaggacgatccacgcgtgccccgtgaccagcagcttgcacacttgccaaaagatcttgcgatggatggtcggatgggtgatcttgttcagctttccgcgcagctccttgtcctcgaagatcatcttacccagaacagcgcggttgatctccttgctgggcaggaggacctcatctccgaagacttcccgaatctgccgccagcacggctgacctggttccacaactaggcgaaatgagtacagacaattagcggaaatagtcgttaattacgaagcacaaagcggatgtgctccactttttgaactcactctccctggcgattttgtcggcgtcgatgactggaataccctggcgttcgaacactttgctgatggtactttttcccgtggcgataccgccagttacagccacaataaacattattcaacggcagttaaaatactataattcgatggtaggaatgtttttt

SEQ ID NO: 254 - DNA, 1808 bp, DROSOPHILA
ttaacgcccccaagttaatagccgtaatcatttgaaaagaaaggcacgcacgcacaacgccatgcggatcgaacctggggactccttttggacgaaaaaggcgatgttttccaacgcagaaaggcagtactttgagacggtccgtccgcggaagaccagtcttccgggctccaccgcgcccaacatagccgctccggtaacaaaggccacgaagaagaataagacgatggccgagatgatgccaaacaaactgctttacatgaatccgcttaccatggaggcacacttctttctgcagaccctaaactcagtgaaccagacgacgaatccgccgcagctagacccgcacctggccaacctgctggagcgcattatggtgggcatcgagagctacttggacaggaatcccacatacgttttgccgcaggagatggccgcaccgggtgagggcgtggccttcgtccagccccaggagctgcagacaataaagcgaacattcagctgtagttcctgcagcaaccgcatagtgggcaccaccatcgcaaaagctgtggcccacctttcggagcagcatccaaaacccaatcccaacaatcagccagtccagccgcatccgacgcatcagacgaaacaggagaaaaagcaggcccaggtgaaggctcgtcagcatataacagtacggctacccaagaaggccagggcaatgattgtgggagagattacgaatgtgtttaaggacaaatacccaatagcggacaagttaaaggtgattcccgagtacgacgttatcgaacaggacctgtgcaagcttttgtcgccgggctttcccaaacaaccactgcgagtctacaagttcgggtcccgcatcacaggcattggaaatcgatcctcggacctggacctcttcgtcgacatcggcaacacatttcacacgttcgagcatcgagcttccaacgctaccgtcgccaagctgcgggctatgaggaagttcttctgcgacagcgaggactggcgtcttattaatttcatcgaacaggctcgcgtgcccatcatcaagacgtgccacttaccaaccggtatcgagtgcgacatttgtctgaacagcatgggcttttgcaatacaaatctgctcaaatacatatttgagtcacagccactgactcaatatatgtgcatatatgtaaagaactggctggagcgctgcaagctaactgaacaaatatcgacgtacagcattacactgatggtgatttacttcctgcagctccaggccctgctgccccccattgccatgctgcagatagaggatgcagccaatcaggccgtgctcgtgggtccgtgggttgtcaactttgcacaaaaatcgtttagcgaactgggactgcagcaattaaaggcgaccgtccccgtcatcaagggcttccttcgaaacttctttgcgtatttcgccaaatttgactacgagcatttcttggtctgcccatatataggtcaggctaatgttgaaatcgcgaagattgagaggatgctgcatgctaggtattcagcatatgtgtcggacaaccctgaatgctcgatccagctgaaaaaaccgatggtggtacaggatcccatacaactaaaccacaatgtaacgaaagcggtgaccaaatatggactgcagacgttcgttgactactgccagcagacggcggagctgcttgaggaaccttccaccaattggcgtcagcgctatgcattttaacaatgtaggtttgttcagactgttaattaaaggcgattgtcacgtttcggcaatatatttcact

SEQ ID NO: 255 - protein, 560 aa, DROSOPHILA
MRIEPGDSFWTKKAMFSNAERQYFETVRPRKTSLPGSTAPNIAAPVTKATKKNKTMAEMMPNKLLYMNPLTMEAHFFLQTLNSVNQTTNPPQLDPHLANLLERIMVGIESYLDRNPTYVLPQEMAAPGEGVAFVQPQELQTIKRTFSCSSCSNRIVGTTIAKAVAHLSEQHPKPNPNNQPVQPHPTHQTKQEKKQAQVKARQHITVRLPKKARAMIVGEITNVFKDKYPIADKLKVIPEYDVIEQDLCKLLSPGFPKQPLRVYKFGSRITGIGNRSSDLDLFVDIGNTFHTFEHRASNATVAKLRAMRKFFCDSEDWRLINFIEQARVPIIKTCHLPTGIECDICLNSMGFCNTNLLKYIFESQPLTQYMCIYVKNWLERCKLTEQISTYSITLMVIYFLQLQALLPPIAMLQIEDAANQAVLVGPWVVNFAQKSFSELGLQQLKATVPVIKGFLRNFFAYFAKFDYEHFLVCPYIGQANVEIAKIERMLHARYSAYVSDNPECSIQLKKPMVVQDPIQLNHNVTKAVTKYGLQTFVDYCQQTAELLEEPSTNWRQRYAF

SEQ ID NO: 256 - DNA, 11631 bp, DROSOPHILA
attcacagtgactaatttactaaatttggtttcttttatttacactttattcactttattttctcttcaagttccaattgcctgttatcacgtagggaacatttacccattcgcctaatcttatcactcactacttcacgcacacggggaattcagcaaaggtaaaataggtaaaagtcttattgactttttgacgaaaaatggaaataagtcttgagttaaactaaatgctgaaacgtgctcaatataattccgctgatttctgaattgattatgggggtagtcactttggaattaccgattttatgatggctttgtttctttgtacacctgtttcctcggccggtaaacgcgctactaacgaaatccccaatgatcgtggtcagtgatgccgctttagccatgaatattatcttcaaaaaagattttaaagttggatgtttctactaacaactcacttttgccctgaaaatatatatattctttttttttgccaaaatattttattttttagataatttccttataaaggcacgacatcactagtaagtcatttacctttcccatccaatacacaaaccaactttgagcttgagtgccatcgagctttttgttggttaaaaggggttaaacgcagttgttggtagttttgcgttaaacaaagagtttaagctacattatattgaaatgtaacgcctaaaaaaatagatttattgtaaagtagcccttcacaaaaatatttcgtattaaaagtgacaaaatgtatcaaaagcctgccagttttttatttcaattacattactggctcctattttggtttctactacatttactagttttcaaacttatttttgaaagaccgcttgtaacggtcgatagtcattattgttaacccgatagagctgcacaaatattatcgatatattattggtattttccaactgcccggatggattttcgatgactgtggctgcagtcacactgagtcgggaaaataattatttattaaaaattcgtggacccgcgctgtacatctgtgtctgtgctgttcgctccgctccaagtgcggcaaaaagcaaccaagaaggcaggcagcccaatcggtaatttacggcggagtagtgaggcgatatacggaaatcgcgaccagtgcacgtgcaattgtgaatcgttctcgattttcccgacccgcaccctttcttctctttcgaccattgtgactgtgcacaattaacttgcatacatacgtgtatgtatgtacacactctgtttgtatgtatgcgtgccacccccaattgaggcggaaaaaggagaagcaaaggaatttctgcaaaatccaagatgcccatgctattttcactattttattttgccaacttttcagtcgacactttgctcttgcagcaacaaagccaacaacggcgaaaattggaagttattttcttttctttctccactctttttatcgcaaaacaacagcaacactgcccgtgcaccgctctccccgctcccacttgcgtccttgttaatacagtgaatatcggctagccacaaacaggggaaatacaaagaatcttaatttgcatttgtatggttgataaaaagtcaacttatcaacttatctaaatcgtcaaaccaaagtgacttatacatttgtaaacatttttaagcgttttccctgttttaattgcgaaaatagtaaagatatcgtgttttatttttatcaacagtgcagcgaaagttttataaagtatacatatattcagtcaaataattattaaagtcctatactctccgtatacactggatttggttttttattaattttcaattatgtgtattttgaatttagcctcttcaattggagcttaggaaccttaacaaccaaagaaccgatttccagacttaaagctaaggtaagttaaatacacctattattcttagcctcattatcaatttttaatgaaacttcaaaaaatagattgtaagagtgttatatctcttttcttagttaaacataatctcggaaatgatatccattatcttacgtaggggatttgcctgcaggagacctgcatcagcatgtctgttattgttgcacgtgggtcaccgaactgggcgggtgtgggcgtggtcaggtagtagctgagcatatctgcatttcaacaatcgatcttaatctgcgcttgcttttgagttcctttcgtctaggacttgttatacttgatttatggccccttcccgcgatttcccatcctcgaaaaccggttgttttgacttaatcatcggttctcgctggttatttgatatgaaattctttctgactcacagcagttgtttaaattctggcgtggaaatcccgatctttttccttatcaagccaaataaatatgaaggctaatttgctatgtttgaattattttatttaaattacttttgaaaaacaaataggcagtacagctattaaatagcaggtttttatttgttaaagcgtaatatctttcagattttatagattctaaatcttcccatataggtttatttttcctcattaagtcttgcaaattatgttcgattttctttctgtatcggttctgagatattgtatgttgcagcgattttcactgttgcataaaactcttgtattccgggcctaattaaatcactttaaatgcctgctcggtgtggctgaaataattcgatttaaaggtcaggcactcacccaagtgactttccaactctttttgttctcggctcccagtcagtcatcagcgaaaattgagtgagatcgaggaggaggggaaaatcaatatgtgctaatataattttgtggcaaacaaattaaagcacacagaacagctcgtcgtcgctgctctgatttgtttagctatacgaatatgtaccatatttattcagttgatttggttcagtttcagtggtgaatatttgagcagcagcatttaatatttgatactggccaatttgatttgtgggtaagcacattgactaccgcccaaaactgaaatgcagccgaaaatggggccaaaagtgggttatgtttgctccgaccaccatgcaagctggctttgatttacgactgcaactaaagtaggttaacctaggtccagataactactacattctgcttctccaacgataccatattctaatctcaaagttgcctgagctgctggctttccaagagtagaatcatgtacatgtgaccttgacacggttttcacttgctatgcaggaaaaagggtttcccgcatccaccgtaccgtatccattgaaatttgattttgttatttgtttatcgacgccacttcatgcaaattggagaaattcaggtggatatatttttagctgacacatccatgcaatgtttgcaaatgcatatatagtattcacctttctgccagcctgatgaaattcttttgtatatttttcactctgttctccgttctcgtggaactcaaccaggttggaccacccaacgcccagctccgtctcttactttgcctttctctgcgccgccctttttccagagcacctccgtccgccttccgttcccggaggtcgggaaaaagaaccgggttaatcgtcgccacgttgtcgccgtggagaacaaatgactcttttcgtttgtgggtcaactgcaatttttgccattaatataattaattgattgccattttggttttaaatgtcgtaactttatgtgagtgaaacgcacctattaaatgggaatactcacataataaaattcaaaagcgttcacatcgcaaaatctataagaatgctaaaattgttttcagtgctgcacttcacacttacgtagcaaaaagatttacccaatcttaaaattactttaattcctgcttaataaatctttctacaaattgccgatcaataaatcaacagtgcgtctaatttggcttatcgaaatgcccactttcgagtactttgtacaacattctgtgcataagcgatcgatttgcgcttatcacccgaatttgttcttatcgctgggccaaattaaactatgctggccgcccagccgtctttgtttcaaagcaaccatagccaaactggcttagtaacccacataaacaccaccgaatccgagtcccagttgtccgggggcaattgggcggagaatacccgttcagtgcaactggagctggagaggccaattaaagcacctgacctagaatatttgtagcccagtttcgcccgccgagagtgaatatgttttacatgccaccgcactcacatttggatgctcagatccaaccaactcgtactttgaatcagtcaactgcgagctgcatgttaaatggtttgaattaattgcgtaggccacgcatgtcacgtgcgcctcacataggactatatctaactatatgtgcatatagtatgatatattccacccccctttccacccacaagtccttgagcaaagccaagccggaaatttaaagtaaacattccagatatccctgtttgtatatcgaagtttaatgttgttgtagagcacagcacgtactcacggagccaaggccaaaatgcaaggccttaatgtcgggttacgtttaatttcaattgcattaaaagagacttacttaaggtagctaaaaacaatgattgtcgttaaatgaaattgacgacgagacagcaagctctaagtatgtgttataaattacttgatattatgtccgtttttcatgacacctagttatgaaaaacatctcaataatctgagtgaggattagaaataaaatatataaactactactgtagtagaactccacaaacttcaccatatcattaggttttcaaccaagtgctttaaaacaaacgtacaagccacgttttaagttttaaacgttttcttgatggcctgtggcaacacacgccgccgccgtagatggccaaatatttggtcagccaacagccgcgaaagagactccgatatttcatcaatggcttgtccacagtctggtggtattcggctttgggaacctgtccgtccgtccgtctgtcccatttatgcggagcacgttcgcctatcgcgggctgcctggctgggattaagagctctccggggcgatggtagctatcgcatcgttggttattggctggtatccactatcagctgcaagtgacacattttaagccgcgccagttgaccaccacgttggccgggccaacagtgcctatctgcgatttggtacctgtattcaacaaatgccgctggaaacgggtaaaggccaggtagggccatttggcacaggcatttgggcagtgactattcgtgtgtgaacggacgaggtttcccgcacgctcctccgctatatatacatataaatatatatatatatttgccattattaagattttcttcggaacgcattcgccacatgtaagttgagattcagctcatttcctttcattcctctttgttgatttaagattaattcgcttggtgcgcactgcacttgttcaattgtatcgtttgcttgcagttcgttggcaagcgtttattgtatatctataatgcactcggaaaatgatcaaattcaattgaaagtattggcattttcgtttgaccattatgtttactcaatccgttggaacccaaactattattgtgctgcatcctattctaacgatctaaataaccatgttgatattgtattgagttcgtgtatctatagtacaaactagtgtagtgtacatctagtgttcttgaaaagtttgtgttccgattgagctattaatgtatatttttccaagcagaaccgtctagaccgtgaaggatacctgataatattgtgtttctaatgcaattcaatagtgcaattaagccacgaactttgtccaagtatcaagttgagtgcacctgagggaaacccgtaataatctcgaaatatttgcctttatccctcatccaaatatttggctggctcacaaagtaggcgcattgtaagcagcgatgactcctcgtctcgggtgctgctcatcccttcgatccggacccactcccactgcccatccggctctcagttcatccgataagcggcggattgtttgctttttgcgcacaggctgccaaataaaaccgcccgccgccggcttatcggcccagtttatctagttcgctcatatacatatagctaaggctatatctatagcatttcgcatatggagaagatgtaaaaaacgtggcccccgaagatcgggctgtgtgagtacgtgaatgggctacccatttattggcattactgcgcacggtaccatgcgatagaatcgcttgtggcgtagataaaaatcaaaatgcaaaagcgcttttgtttttggcgtctcgtgtgccgagtattctaaaagttgtcgtgtggttagaagggggggggggtacgtttcgagataacagcaacacgaggagattgtgtaatcgctttggcgattgctgggcgggaatatgctggtcgcgatgcggtttcccatacaatgagttctgtccaatcgcagagtgtagtgcatcataggttcagggagaaggtcaacaagatacacttaaaatatgtggcttcttttaaagatccccatcgtataagcatacttatctttattattttatataatttattttgtcataaatgtaagctatattcaaagtgaatgactaaatagtgatgaattttttttaagcagtgaatcacactgctaagaagcatctggaatggggaaatactatccatagtatagtatggcattgtttcaagtggatgtcagtttcccattttggttgcttggcaatatttgttgggcttttggccgaaaatgcaaattgttttctttggcgtcaccgtcgccacagtagctgtattggagaatgcgcaacgtcacccttttgtttttaccaccccgtagacccaggcattaccatatattcctcgatttcacctggcaaccggggacttctcgaccgatgccgatacactttcattcgctgtcgattcagttgaaacaatttctgttattgtttacacaacgcgctcgatggctggcaagtcgttctcgatctgaaatagagccagccatataagttacttcaacgccggaggagccagtcagtcctgcagagtcttccaagccgaaatgcagttttttgcgtgagtccgatatggaaatcccagatctagtcaaccgagacaccatttaaacgtcgccaagcccccttttcagaccctataaaccgggcacatattcttcttatagccggtttcaattaaatgcctacccgatggggtactaaaacttttccctaaacaaagggctaaatgaaactaaatggaaaactgttcgagcagcaacaatggaaaacaattgaaaaactcaatttgttggtaatttgtttgggcgtgcgtgtctcagtatcttttttttttgtgcaataacaatttcagagcttggcaggctatttgttgactgcataaaaaaagcagttgaatgaactgagaacgagctttgattgatatttcgaaagccatattgatggaaaatgtataagatgggggcataacatcacagccaaacttctccaagtccaataatggctttctttggtaaataaattgggggaagtctgtttcgccgactactgtttccatgactccaatttttgtattgtaagaaaatcaaatggttctagagatcaagagattcaattaattgttaatccgtgcaccttcttccctcttgcagtttctccaaaatggccaagtactcgggcaaaaaatgccggctgctctcgatgatgtggcttacggcgttcttcttcttcgtggagatcatagtgggctatgtgaccaattcgatggctctggtggcggatagtttccacatgctgggcgacattgcggccctggtcatatcattcctgtctgtgaaggtaagttactggcttttaccgaaaaatacaacgtgtatcactcagctaactccttatctcgacagatgtcaccgaaaaagtggtcaaagaacacttttggctgggccagggcagaagtcttgggtgctttggtcaacgccgttttcctggtggccttgtgcttcagcatcaccatcgaggcttgcaaaaggtgagtgcgttgtgatcaatcaaataacattgtttgcagaatgtacactactaagataagctgcaatagaatcaattttgaaacatctgctcgccaagcgaaaatctctactcatttatatgagtcattacatgcttaaataacaagcaaagtaccaatcgaatgattaagcggcttggagattggttttgtttatattcctgagaaaaaaaaaaccaaaaaatatgttacaatggtgtcagcatactattaaattctgtataaattcgattaaagttttataacgaggcttttaaaactcattgcttattaaacgtggctctgaaactaattaacttggattactactcgcttactctttactccttggccgcaacgcaaatggttttaatatttcgactcattacggatcgttgatccgcacccaaaaaccacttatttaatgatctgacaattgtaagccaagccgtattatgagcaaaaggcttgccttggcatcgacatgtgctaacgtgatttgtttaaattttcttgacttactccgtctgtgagttaatttgttgtgatacattcacgttatatcgtcacatttcggtttgtatttgtgcattgggttgtgtgaattatacgctttgttcatttacattccggtcacattgtgtgcatatttatcgaacgctttgcgaggtgattattctgccaatagctacagattccctgcagaagccagctacactgtcgaaaataataaactaacataggatttgatgagtgctttcgttatgttatcttaatacagtttaaataaaacaatacatttccatttatcacagattcattgaggaggagccgattcacgagcctgaactgcttgtcatcgtgggagccttgggtcttctggtgaatgttattggactttgtctgctttacggtaagaccaagtaatacagataagagtaggccgttctttaacttcatctgcattgcagagcacggcggtcaccatggacactcacatggcggcggactcacccgtaaccacagccgcctcactgagttggccaacatggacgagggcgaggatgagcaaaacgactttgcctacgagaagcagaaggaaaaggcaccggtcaagaaatccagccatggacacagccatgatcccggccagatgaatatgcgcggcgccttcttgcacgttttgagcgatgcccttggcagcatcattgtcgtaatcagtgctgtggtggtgtggaagacggagtggaagtaccggtactacatggatcccgctctgtccatcgttttggttgttttgatcctgcactccgtgtggccgctgctgcgcgagtccgctttaattctgctccaaacggtgcccacccacatccaggtggatgccattcagaagaggcttctggagaaagttgatggcgtgctggctgtgcacgagttccatgtgtggcaactggccggcgaccgcatcatcgcctctgcccatattaggtgagatttacttgttaaaagagtaactgcctgtttaaaaagaaaaattaattctataaccatttataaatcaaattaatgcaatctaatccatctctcgtaaaccttgtaggtgccgtaacctttcggagtacatgaagattgccgaaaaggtgaaggagttcttccacaacgagggtatccactctaccaccattcagccagagttcagcgagatcgaaggctgcaacatgtccgatggcacctccagcatcaacatcagcggctccgactgctgcgcgttggattgtcctaccacggaagaaggatgtgtcaaggccacgtgctgccaaaacaacaacaaattggtgagttcatctagtctaatgggaacatgtagaattgtataatgaagtataaaccttaattacagaaccaactgccctcacccaccaactcgccgtatctgtgccgccagcggaatgccgcccgacaggccggcgatgtggaggcgggttccctgctggaggccacgtccagtggcaaccagggagccactggtggggccagcacaggagcgcccgtggctgcgataggggccacgtcaacgccgaagagcgatttggtttgacgacagccacatcaggcgcaacaacatgtacactttgccacgaccaaaacggaaaccgcaaccgcaacaacaaaggccgccacaacagcagcagcaacatcaatacgtgatataatgtacgagccacgcgccaacaacctagtggtctccagcgcacaggtggacgtcaatctcggcctgacggtgaccgcccagcggcgacgggagcttcagttgcaggccgaacagcagtatcaggagcaggtgtcaccactgagtaccaggaatggcgacgaggtggcactctaattaggagcctagtttaacgttaattgtgcaaaccgctgcaatggagactggtctgccatggtgcagctttcgtgtttttttgtatcattatttgttcttagtggaatttaggcgtaaatgagagtgggacaagttcggtcgattgaccattgagctagtttaattaaagtgaaatcaaaaatgaaaatgaaaatgaagaacacgattatctattagtgcgggagacacaaagtttaaaggaacatgctgttcaggatgtcattcatatactatatagtatgttaaacctattcgattgtagttaattgcattagtttagatcgataagtgagcccaaacagcagagaatacatatgtactacgttttttacattttgagaaagtttatacatacgtgaaataaattattgtattcaatagttacccacggattagcaaatgactaaagacagtttacaaaatacataggtatacacgcatttgtgtttgtgtatggttagacatagtccctaaatcttagtagttgtaatgctatatgtaaatgtttttaccacaaccgagaacctagtttctatttaattttaatcgtatcgaactttataatgactatacatttaatgcaaacatcatgtattattttatgatctgcattaattttcagatgtatatgtttgtaaataaacgccaaacataattagaccaagcgaactaactgtatacaatttgataaaatgcctctttggagtcgaaattttcgatacaatcaggggtcactggtacttcctgattccctgattcattttatcgattgcagcaatgggcaagattgcgagctctgcctcgagtttcttggaagcttatcgaattcagataggagcacatgtgtgacatcaaagttgaggcacctagccactgagcaaatgcatcacaaaagattttgaaacgtgctaaaaaagattattggaaatgcatggaggtggtgtagtcctatataagcgtccccacaagctgtcgataccaaacgtcttcgagaactcaagtaaagtaccagactcgttcggaacatcagttgcaatggtg

SEQ ID NO: 257 - DNA, 1831 bp, DROSOPHILA
atttattaaaaattcgtggacccgcgctgtacatctgtgtctgtgctgttcgctccgctccaagtgcggcaaaaagcaaccaagaaggcaggcagcccaatcgtttctccaaaatggccaagtactcgggcaaaaaatgccggctgctctcgatgatgtggcttacggcgttcttcttcttcgtggagatcatagtgggctatgtgaccaattcgatggctctggtggcggatagtttccacatgctgggcgacattgcggccctggtcatatcattcctgtctgtgaagatgtcaccgaaaaagtggtcaaagaacacttttggctgggccagggcagaagtcttgggtgctttggtcaacgccgttttcctggtggccttgtgcttcagcatcaccatcgaggcttgcaaaagattcattgaggaggagccgattcacgagcctgaactgcttgtcatcgtgggagccttgggtcttctggtgaatgttattggactttgtctgctttacgagcacggcggtcaccatggacactcacatggcggcggactcacccgtaaccacagccgcctcactgagttggccaacatggacgagggcgaggatgagcaaaacgactttgcctacgagaagcagaaggaaaaggcaccggtcaagaaatccagccatggacacagccatgatcccggccagatgaatatgcgcggcgccttcttgcacgttttgagcgatgcccttggcagcatcattgtcgtaatcagtgctgtggtggtgtggaagacggagtggaagtaccggtactacatggatcccgctctgtccatcgttttggttgttttgatcctgcactccgtgtggccgctgctgcgcgagtccgctttaattctgctccaaacggtgcccacccacatccaggtggatgccattcagaagaggcttctggagaaagttgatggcgtgctggctgtgcacgagttccatgtgtggcaactggccggcgaccgcatcatcgcctctgcccatattaggtgccgtaacctttcggagtacatgaagattgccgaaaaggtgaaggagttcttccacaacgagggtatccactctaccaccattcagccagagttcagcgagatcgaaggctgcaacatgtccgatggcacctccagcatcaacatcagcggctccgactgctgcgcgttggattgtcctaccacggaagaaggatgtgtcaaggccacgtgctgccaaaacaacaacaaattgaaccaactgccctcacccaccaactcgccgtatctgtgccgccagcggaatgccgcccgacaggccggcgatgtggaggcgggttccctgctggaggccacgtccagtggcaaccagggagccactggtggggccagcacaggagcgcccgtggctgcgataggggccacgtcaacgccgaagagcgatttggtttgacgacagccacatcaggcgcaacaacatgtacactttgccacgaccaaaacggaaaccgcaaccgcaacaacaaaggccgccacaacagcagcagcaacatcaatacgtgatataatgtacgagccacgcgccaacaacctagtggtctccagcgcacaggtggacgtcaatctcggcctgacggtgaccgcccagcggcgacgggagcttcagttgcaggccgaacagcagtatcaggagcaggtgtcaccactgagtaccaggaatggcgacgaggtggcactctaattaggagcctagtttaacgttaattgtgcaaaccgctgcaatggagactggtctgccatggtgcagctttcgtgtttttt

SEQ ID NO: 258 - protein, 449 aa, DROSOPHILA
MAKYSGKKCRLLSMMWLTAFFFFVEIIVGYVTNSMALVADSFHMLGDIAALVISFLSVKMSPKKWSKNTFGWARAEVLGALVNAVFLVALCFSITIEACKRFIEEEPIHEPELLVIVGALGLLVNVIGLCLLYEHGGHHGHSHGGGLTRNHSRLTELANMDEGEDEQNDFAYEKQKEKAPVKKSSHGHSHDPGQMNMRGAFLHVLSDALGSIIVVISAVVVWKTEWKYRYYMDPALSIVLVVLILHSVWPLLRESALILLQTVPTHIQVDAIQKRLLEKVDGVLAVHEFHVWQLAGDRIIASAHIRCRNLSEYMKIAEKVKEFFHNEGIHSTTIQPEFSEIEGCNMSDGTSSINISGSDCCALDCPTTEEGCVKATCCQNNNKLNQLPSPTNSPYLCRQRNAARQAGDVEAGSLLEATSSGNQGATGGASTGAPVAAIGATSTPKSDLV

SEQ ID NO: 259 - DNA, 8105 bp, DROSOPHILA
catccgctgacaagtggactctttcccggtctcctgcccgctgccgccgctcctggagtggatcccacagcccctaacttccagctcacccacctgatggccctcttccagttgcagaatcccctcttctaccagaacctctatccgggaatgacccagaattcctccatgctcggcaacctggcagcacttagcgccgcatcggcagcagcggcggcggcagcggcggcaaatggagccggagtccagcagccgaaggcagagtttagctttaagccagagtttaaggagtaggaaggatgcgtgtccttagggtattttgccagctacttagtttgaccgacggacgttggacattgtacatacgcgctttaagcaggtttaggtgggtttttttgtgggttcaggcagatccaggacaaggcatccttccctccacaaaaaccaactcagccacactttgagaacctagaagtcccctatacaaagtgtagctgaattggcttttgccaaacattttcccctttagcttagattctctcagtgccacattaatttttaaaattttcagccattttaaataaaaaggaagaactttctgaatttaagtttgactaaactgtgatgttttcattagagtagcctcttttaattgatagagcgagtgcaggctatgcaggatatgcaggacttaggagacttggattgtcaataacatagcgtctaagcattacattgtatgtgatatactaataaataatggctaattgtttttgctttataatttaagggaataatattataattctaattataaactttagtaaaatcagcattcttctataataaataagtcaacattacctgaataaattttattatgcctcagagcttattatttaaacacaaaatgcttgagttattgggggttactggaaaatacaatatataaagtaactaacatatatgtatacccaaccacacataaaacacttaaacatttgattaaataatttatgactttattttgttttcatgtaattgttggttttactcatatgctaacagaaatcagctacacaaactcaggacgcctgataaaaaccgtcccgctaagcaatatttaagtactttacacaaaatcaattattttttcctttgcttgtatttttgtattttttatagttcataatcgcatatatgtatatgtaaacaatcaatacaatccaaataccataatcataagcataacaaaagagatttcagaaagttgtatcctagtcaagaacaatgtacaagcaagtatcatcattttatacattaggtatttgcttttagtttacattgcaaagtgaaaccctgcgtgaaatgtacaaataaaggtaaactaaaaataacattaagaactaatggtctagaactcaagaaacacgaaaatcaacaagtaaacttctaagtaaattcgttaaatgttatgttaaaagtaggagaaaacttaaacaaactacagactcagtaatgccttttgattttgcctaaggttataagcttcgattttgatgcggtagccaaatttataaaaccttgaaaaagcagtatccaatttattcctataagcatctatactcgtctaattttttgggtcatcagtttataacgattgcataacttccggtgcaatatctatggcaacattttgtgcgcacatcgacacatacacacaatttgaaaacgaagtttaagtttgtatcttataggttgggttaatcgtatctaagccgcaacagaagaggttatgagtagcgttgggtttgaaagctgcccgttctgccggcgggccttaatcgcggtaaaatccgcgcagcagtttcccaataaatcagaaccgttagctgcgaccggtggtcgcagtggccgccggtggggccagctccacgggcacgggagccactcgcaccgcgggctccgtgctggatggatgctgtactccacccagcgggatcgcacgcatgtggtgcaccggacgtatggatttgagctgcgtggtgcccttgaagcgtacgttaacatcgcccccgaccatgctgagcggatgcatgggctgcggctcctcgacatcctcctgaggcattacagccattgtcgttgcgggcgccacctcctccatgtgctgcgggcatggtgctgtggtaattgccacgccataactttgtcgctgggccagcggggaaagggctgggggcgttgtccgatagcccatgcggctgaatatgcttcctccgctgctgttactcgctgtgctgggcgggctgaggggcgtgcctacgccagaatctacctccaagggacttttgatatttgctacgaacttatccacgtgctccggcagcttcagctcatccagtttcacttgcatgacggtccgagcgctggcattgtccagcaggcgattgggtcgcgaaggtggagtcggggaccctgactcaccgacattagatgactggccgccgccgttgaggcgatgctgttgctgctgctgacgcaactgctcaaaaaaaggtgtcttctccttcttctgcttttgtggcgaaccaagttcgtctctttcggtcagctcttcgagcaccttgagaggaaaccccaagtgactgttgacggaaacggatttgccgatcttgcgttcggtgaatatgggcttccgacgctgacggtccaagtcgtccagctgctggagcatgcgccgcacctcgtttggtagttccaggtcgggattgtgttccaccagttggccaacgtagcgacccagcgtttggatggttagctccagagactggacctgcgattgcagcgtggttatctgagcttgctgtgaggaacgagtcgtctccagctgagcaatcgaagattgagcaaactacacaaaatataaataaaacaattagcgttatttttctaacttaatgtaagttttaaaacaatacctgcaactgctgctctagatgctggttctgcgtcttctcccggttaagcatttctaggtgatggttagtggtggtaatctcctcctgaagcacattgtactccactttgtattcggcaagctgctttccaatgtccatgctaaagaccagcttcataatttgctccatgcacgtgtgctccatctttggcaccacggtcttcagatagtccataatctcttcgaagttatccttggccagtagttgctgcttgtgcacggagagcaaggcaatggcaaacttaaagattacatcggaggattccaggaagagcagatcaaagacgcgggccacgaatcccagcggaaactgtgagctaaagacggtgaggatccatggagccgcatacaaagtgggcgagacatcgttctgatcgagccacacgtagagatctggcagatgatccttgaccaatcgggagagctgatacagctgcagttgaaactttttcatgtccggcaggtatttcgtgcgcatattacggcgaaacattaggtgcttcagcagttgaaatgaattggcttcatcgcactggaaaaaacaacatttagttagtgttctttatggaattcgattaagaaaactcacatgcaggagtaagacgccgcagatgaagcccagaccctggcagtaccctaattccggatctagaatggagtacgccttcagcaggttaaacagcgacaactggccgagaccaagcggatccttgtagaactggtgattaggaaaagtcctgcccagatcaatgaaaatcgcatgctgatgctcagtaaggtgtttcagcagcatgtgatacggtgtattgaagttggggaatcgctttgtgtccaccggtgccgtgttcatggaatgctgctcagccaggaaggtccagacatcgccgcgcttcgatcgcggtactccggtgcgaatggcgtggcccaggactttgggatccttcttgttgcctatctgtgtggagttgcgctcaatgatctgctcccatcgctcgattagctgcttgtcgcagggtacaatctcctcgtagtccagtttaatgcgctttagctcgttctcattctgccgtgcctgcaacatggcgttctccgtctccatgcggttcagcattatagtctgcctaatggcagtgcgccacagttccctcagctccgccgcatcccgcttaccacgcttggcagctatcaaatcaatttattattagtcatgaacaaatgtggaggatataggaataacttacgctttcgcatgggcgacagaaactcggtgggaacctcactatccagacccttggatggtgtcactacactattaagtatggcctgacgccaggagccctgatgtgtttccgcctctttgggactattgcccaccttgatgaatctatgcagtggaagatgttagtggatttcaacagaacataaaattatttacttacatatccatcatgggactcttcagttgctcagctgtgggcttgctgctgggactagctcccaccgtgttcgatcgcgatcggaagccctcgggaggtgactgggtgcccagcggctcggcagatccctccctgatgtccctcaagttgtgcgacggcacagcaatgtcatccttggagggcttacgcttgaggagattatcaaaggagttggtaagcgagcgcttggccttcatgaatatggtgctgccaccgagatattggttaaggaactccgaccggttctctgcggtgtcgtggacatgtctctgctgtctggactcgcagtgcgccctgagcagcatcatcagaaactgattttgctcggccaccggagagttggtcttctcagagccacagaacttggcccagacaatctcctgctcgtcgtcgcttagagtctcgattcggcgcaggatcagggcctgggtcttcttctcggaaaggccctcgacgtcagtgcacagtttgtggtaccaaagcatcgggcagtgctcgcagctaaagatttgggtatcctgcttcttcttctgctccgcgcaggtgtcgaaggcctgagcaatggcggccactatgtcatcacacacatgttccgactggcacttgaacacgtagccaatgtagccatcgttgttcagctccctgcagataataccaaagtgatccagcgacttctggccgtgcacacagctggccacgtccttgaagtccttgtagagcagaacctgcttgcgatcgggcgagatgagtcggagatcgcatcgtcccactaggaacaccatcgtccggttctgctccacatacggcggaatgcagccttgcgaggcggagcgatccctctgcttgggtatgctaaaaaaaaagggtgcgttagtttatagcttggaacatatttcagtgattcaagttctaagtgcttcaggcggtgacatgcaactataaaaggacggaagcgatgggtgctactgggcaagcgaaacaaatgaaaaaggatacgctatcgagagatcgcaggcaaaactattttggcattcacttccctgagagtcttgatagccaattacttaagcttttcagacatcttaaagaaaaagttttggaaacaaaaaccaagaaacgaaatcgaaaacgaacatgcgacgggattgctggcctaggtgccacttacttatccatcgcataattgggatgcagttgactgggacccgcagaagcggaagcggtcccagtgcccacaccctgatccctgggcggcgtgggctgcttgtttacaatgacgttgggcgcctccagttggctattggctgctaatggctgggagccgtcggagctttggggttttcggcaagacggagaagttgttggtcgaaatgtcaggggaaaaggtactcgaatgacgggatacttactgctccttatggcccagttcgatttgactctgacctcgcagcaggggccgtttctccggggacttgttctccttgttgtcctccaggggtcgcggggcagctccttcctcggcgcccgtcagctgtagttgcaccaagggcttggcctgtgaatcctgtgaatcgtcatgccccttgtgctgctcctgctcctcctcgtcctcctccttcaaatcgtgactcttgagggagctgctgggtttcgcttcaatgcccacaccaccctcactgctgagagacatcttgcgattctggagaagtctcaggcgctgggcatcgtacgccttgaacttgggcagggcgtcgtctatgaaggtgttgggcacccgcttctgggacacccggatcttgcccacgtacatcacctcgaagaagtgcgtgtggttcggcgagatgtccgctagcagggagagattgctctgggccgacgtggacgtgggaatgttcaccgtgcccgaggagctactcaggccatgggtgtacgatttggaggccttcatcttagagctgactggattggggctggtgtcgtgctgagcgttgcgcattgcctcgctcatcttcagattcgtggcgggcgtggcgtggattccgttcagcgctccattggagtttccgtggctgcctcctccgccaccgatcagcgtctgcggaatgctgcccacggaacctcccagcgtgtgggcgggatctcgcatctggtgcatcaattcggccatctgcaagagattcgcatacgaaaacaccggttagacactcagcttttattaatctgggatttgaggagagagttaaaaacgtgcagttggaaccaaaccaaaagttagctcaatttgatggatgactcgatgtcccgaagtgtcccttctgtcccccattcattcttccgcccttggagttttactacccttgagtttatgaccgttttttgtggtcctgccacttaagggttcctgggagatgcttttgatgtcttgcaaggagcgcaaagtttgccggacatcccctcataatttcgtctatgaccgcatcgtaactgggataatgcagcttgactgctttttggaaaatatatggggaactatggagtttattacgagattcatgaaaatttcagtcgtttcgggtggatcaagacgttctctctagtgcgcttatgttgtgtaactccaagcaaaacaaacaagaccagacaaatgtttatgaattcctgagatctgcaatttaggtttttataaagttatcttttcacttgaaagattacgtttatgtctacctacagctgcagactcaatttaattattaattatttaaaattaagtgttctgcggaactcactaaaatagaattcttaagaatattttaaaaatagaggcgatcccactcaactaaggcatcaatcattcatgaaagcatgattatctacgggtgaggtgtctatccttgcaagcccacaaagggaacccggtggaaatgcgaagtacaacggatgaggataataagtcaccagtaaaccgagataaaactgggatacttggtggtgactcacggtgaacatgttcagtgctcatgccgacgcaatgtctgctcgcaagctgcatcatcggatgcatcagctgctcccggcgtgatgatgatgcactgcactcccgctggccggagaggaggctctagggcgctccgtggacgagagagatcgggcattccgcacgtcgtcccagtttttgcattgaacgggtgccagaagtgattttggcgggtgccagcaagctaaaagtccaatgtcaacccactccccggctgatgcagctgtccatcagatgcgttcgcgaactcacacacacacacatgtatatatctcgtagatacattagtgtggaccacaactaattgtcacttatcggcaattttagggcacaaagtcggacagacacacgacaagaacaaatgaaaaagttatcttcctaaattgatttaaattttcattctaattttgggaccccctcttcttcttcctcgtgatcagtcgttgcgcgagtgatcgtgacgacatctgcagaacaagttgaccaatagacacattttgaatatatgtatgtgttgcgctacagtggcggtcacaataatagaactaaattgtgtagaaaattatttactggttgg

SEQ ID NO: 260 - DNA, 5472 bp, DROSOPHILA
acaacataagcgcactagagagaacgtcttgatccacccgaaacgactgaaattttcatgaatctcgtaataaactccatagttccccatatattttccaaaaagcagtcaagctgcattatcccagttacgatgcggtcatagacgaaattatgaggggatgtccggcaaactttgcgctccttgcaagacatcaaaagcatctcccaggaacccttaagtggcaggaccacaaaaaacggtcataaactcaagggtagtaaaactccaagggcggaagaatgaatgggggacagaagggacacttcgggacatcgagtcatccatcaaattgagctaacttttggtttggttccaactgcacgtttttaactctctcctcaaatcccagattaataaaagctgagtgtctaaccggtgttttcgtatgcgaatctcttgcagatggccgaattgatgcaccagatgcgagatcccgcccacacgctgggaggttccgtgggcagcattccgcagacgctgatcggtggcggaggaggcagccacggaaactccaatggagcgctgaacggaatccacgccacgcccgccacgaatctgaagatgagcgaggcaatgcgcaacgctcagcacgacaccagccccaatccagtcagctctaagatgaaggcctccaaatcgtacacccatggcctgagtagctcctcgggcacggtgaacattcccacgtccacgtcggcccagagcaatctctccctgctagcggacatctcgccgaaccacacgcacttcttcgaggtgatgtacgtgggcaagatccgggtgtcccagaagcgggtgcccaacaccttcatagacgacgccctgcccaagttcaaggcgtacgatgcccagcgcctgagacttctccagaatcgcaagatgtctctcagcagtgagggtggtgtgggcattgaagcgaaacccagcagctccctcaagagtcacgatttgaaggaggaggacgaggaggagcaggagcagcacaaggggcatgacgattcacaggattcacaggccaagcccttggtgcaactacagctgacgggcgccgaggaaggagctgccccgcgacccctggaggacaacaaggagaacaagtccccggagaaacggcccctgctgcgaggtcagagtcaaatcgaactgggccataaggagcactccgacggctcccagccattagcagccaatagccaactggaggcgcccaacgtcattgtaaacaagcagcccacgccgcccagggatcagggtgtgggcactgggaccgcttccgcttctgcgggtcccagtcaactgcatcccaattatgcgatggataacatacccaagcagagggatcgctccgcctcgcaaggctgcattccgccgtatgtggagcagaaccggacgatggtgttcctagtgggacgatgcgatctccgactcatctcgcccgatcgcaagcaggttctgctctacaaggacttcaaggacgtggccagctgtgtgcacggccagaagtcgctggatcactttggtattatctgcagggagctgaacaacgatggctacattggctacgtgttcaagtgccagtcggaacatgtgtgtgatgacatagtggccgccattgctcaggccttcgacacctgcgcggagcagaagaagaagcaggatacccaaatctttagctgcgagcactgcccgatgctttggtaccacaaactgtgcactgacgtcgagggcctttccgagaagaagacccaggccctgatcctgcgccgaatcgagactctaagcgacgacgagcaggagattgtctgggccaagttctgtggctctgagaagaccaactctccggtggccgagcaaaatcagtttctgatgatgctgctcagggcgcactgcgagtccagacagcagagacatgtccacgacaccgcagagaaccggtcggagttccttaaccaatatctcggtggcagcaccatattcatgaaggccaagcgctcgcttaccaactcctttgataatctcctcaagcgtaagccctccaaggatgacattgctgtgccgtcgcacaacttgagggacatcagggagggatctgccgagccgctgggcacccagtcacctcccgagggcttccgatcgcgatcgaacacggtgggagctagtcccagcagcaagcccacagctgagcaactgaagagtcccatgatggatatattcatcaaggtgggcaatagtcccaaagaggcggaaacacatcagggctcctggcgtcaggccatacttaatagtgtagtgacaccatccaagggtctggatagtgaggttcccaccgagtttctgtcgcccatgcgaaagcctgccaagcgtggtaagcgggatgcggcggagctgagggaactgtggcgcactgccattaggcagactataatgctgaaccgcatggagacggagaacgccatgttgcaggcacggcagaatgagaacgagctaaagcgcattaaactggactacgaggagattgtaccctgcgacaagcagctaatcgagcgatgggagcagatcattgagcgcaactccacacagataggcaacaagaaggatcccaaagtcctgggccacgccattcgcaccggagtaccgcgatcgaagcgcggcgatgtctggaccttcctggctgagcagcattccatgaacacggcaccggtggacacaaagcgattccccaacttcaatacaccgtatcacatgctgctgaaacaccttactgagcatcagcatgcgattttcattgatctgggcaggacttttcctaatcaccagttctacaaggatccgcttggtctcggccagttgtcgctgtttaacctgctgaaggcgtactccattctagatccggaattagggtactgccagggtctgggcttcatctgcggcgtcttactcctgcattgcgatgaagccaattcatttcaactgctgaagcacctaatgtttcgccgtaatatgcgcacgaaatacctgccggacatgaaaaagtttcaactgcagctgtatcagctctcccgattggtcaaggatcatctgccagatctctacgtgtggctcgatcagaacgatgtctcgcccactttgtatgcggctccatggatcctcaccgtctttagctcacagtttccgctgggattcgtggcccgcgtctttgatctgctcttcctggaatcctccgatgtaatctttaagtttgccattgccttgctctccgtgcacaagcagcaactactggccaaggataacttcgaagagattatggactatctgaagaccgtggtgccaaagatggagcacacgtgcatggagcaaattatgaagctggtctttagcatggacattggaaagcagcttgccgaatacaaagtggagtacaatgtgcttcaggaggagattaccaccactaaccatcacctagaaatgcttaaccgggagaagacgcagaaccagcatctagagcagcagttgcagtttgctcaatcttcgattgctcagctggagacgactcgttcctcacagcaagctcagataaccacgctgcaatcgcaggtccagtctctggagctaaccatccaaacgctgggtcgctacgttggccaactggtggaacacaatcccgacctggaactaccaaacgaggtgcggcgcatgctccagcagctggacgacttggaccgtcagcgtcggaagcccatattcaccgaacgcaagatcggcaaatccgtttccgtcaacagtcacttggggtttcctctcaaggtgctcgaagagctgaccgaaagagacgaacttggttcgccacaaaagcagaagaaggagaagacacctttttttgagcagttgcgtcagcagcagcaacagcatcgcctcaacggcggcggccagtcatctaatgtcggtgagtcagggtccccgactccaccttcgcgacccaatcgcctgctggacaatgccagcgctcggaccgtcatgcaagtgaaactggatgagctgaagctgccggagcacgtggataagttcgtagcaaatatcaaaagtcccttggaggtagattctggcgtaggcacgcccctcagcccgcccagcacagcgagtaacagcagcggaggaagcatattcagccgcatgggctatcggacaacgcccccagccctttccccgctggcccagcgacaaagttatggcgtggcaattaccacagcaccatgcccgcagcacatggaggaggtggcgcccgcaacgacaatggctgtaatgcctcaggaggatgtcgaggagccgcagcccatgcatccgctcagcatggtcgggggcgatgttaacgtacgcttcaagggcaccacgcagctcaaatccatacgtccggtgcaccacatgcgtgcgatcccgctgggtggagtacagcatccatccagcacggagcccgcggtgcgagtggctcccgtgcccgtggagctggccccaccggcggccactgcgaccaccggtcgcagctaacggttctgatttattgggaaactgctgcgcggattttaccgcgattaaggcccgccggcagaacgggcagctttcaaacccaacgctactcataacctcttctgttgcggcttagatacgattaacccaacctataagatacaaacttaaacttcgttttcaaattgtgtgtatgtgtcgatgtgcgcacaaaatgttgccatagatattgcaccggaagttatgcaatcgttataaactgatgacccaaaaaattagacgagtatagatgcttataggaataaattggatactgctttttcaaggttttataaatttggctaccgcatcaaaatcgaagcttataaccttaggcaaaatcaaaaggcattactgagtctgtagtttgtttaagttttctcctacttttaacataacatttaacgaatttacttagaagtttacttgttgattttcgtgtttcttgagttctagaccattagttcttaatgttatttttagtttacctttatttgtacatttcacgcagggtttcactttgcaatgtaaactaaaagcaaatacctaatgtataaaatgatgatacttgcttgtacattgttcttgactaggatacaactttctgaaatctcttttgttatgcttatgattatggtatttggattgtattgattgtttacatatacatatatgcgattatgaactataaaaaatacaaaaatacaagcaaaggaaaaaataattgattttgtgtaaagtacttaaatattgcttagcgggacggtttttatcaggcgtcctgagtttgtgtagctgatttctgttagcatatgagtaaaaccaacaattacatgaaaacaaaataaagtcataaattatttaatcaaa

SEQ ID NO: 261 - protein, 1379 aa, DROSOPHILA
MAELMHQMRDPAHTLGGSVGSIPQTLIGGGGGSHGNSNGALNGIHATPATNLKMSEAMRNAQHDTSPNPVSSKMKASKSYTHGLSSSSGTVNIPTSTSAQSNLSLLADISPNHTHFFEVMYVGKIRVSQKRVPNTFIDDALPKFKAYDAQRLRLLQNRKMSLSSEGGVGIEAKPSSSLKSHDLKEEDEEEQEQHKGHDDSQDSQAKPLVQLQLTGAEEGAAPRPLEDNKENKSPEKRPLLRGQSQIELGHKEHSDGSQPLAANSQLEAPNVIVNKQPTPPRDQGVGTGTASASAGPSQLHPNYAMDNIPKQRDRSASQGCIPPYVEQNRTMVFLVGRCDLRLISPDRKQVLLYKDFKDVASCVHGQKSLDHFGIICRELNNDGYIGYVFKCQSEHVCDDIVAAIAQAFDTCAEQKKKQDTQIFSCEHCPMLWYHKLCTDVEGLSEKKTQALILRRIETLSDDEQEIVWAKFCGSEKTNSPVAEQNQFLMMLLRAHCESRQQRHVHDTAENRSEFLNQYLGGSTIFMKAKRSLTNSFDNLLKRKPSKDDIAVPSHNLRDIREGSAEPLGTQSPPEGFRSRSNTVGASPSSKPTAEQLKSPMMDIFIKVGNSPKEAETHQGSWRQAILNSVVTPSKGLDSEVPTEFLSPMRKPAKRGKRDAAELRELWRTAIRQTIMLNRMETENAMLQARQNENELKRIKLDYEEIVPCDKQLIERWEQIIERNSTQIGNKKDPKVLGHAIRTGVPRSKRGDVWTFLAEQHSMNTAPVDTKRFPNFNTPYHMLLKHLTEHQHAIFIDLGRTFPNHQFYKDPLGLGQLSLFNLLKAYSILDPELGYCQGLGFICGVLLLHCDEANSFQLLKHLMFRRNMRTKYLPDMKKFQLQLYQLSRLVKDHLPDLYVWLDQNDVSPTLYAAPWILTVFSSQFPLGFVARVFDLLFLESSDVIFKFAIALLSVHKQQLLAKDNFEEIMDYLKTVVPKMEHTCMEQIMKLVFSMDIGKQLAEYKVEYNVLQEEITTTNHHLEMLNREKTQNQHLEQQLQFAQSSIAQLETTRSSQQAQITTLQSQVQSLELTIQTLGRYVGQLVEHNPDLELPNEVRRMLQQLDDLDRQRRKPIFTERKIGKSVSVNSHLGFPLKVLEELTERDELGSPQKQKKEKTPFFEQLRQQQQQHRLNGGGQSSNVGESGSPTPPSRPNRLLDNASARTVMQVKLDELKLPEHVDKFVANIKSPLEVDSGVGTPLSPPSTASNSSGGSIFSRMGYRTTPPALSPLAQRQSYGVAITTAPCPQHMEEVAPATTMAVMPQEDVEEPQPMHPLSMVGGDVNVRFKGTTQLKSIRPVHHMRAIPLGGVQHPSSTEPAVRVAPVPVELAPPAATATTGRS

SEQ ID NO: 262 - DNA, 3443 bp, DROSOPHILA
caaagcctgcagatcgctgtaaattaaatttttactaaaggtatcaaaagactaaggtcgctatgaatcgttgaaaatatccaaaatggccagagtttggatcaatgaaattcgtttagtgtaaattgaataataccatttactcgtagagtacaagtgtacactagattcattgcaatataaactccgagatctcggattcatctttgttttaagttttatatccatttttataatttgaatacaaagtctagtgtaagacagttatacccgtttctcgtagagtaaaagggtatactagattcgtttaaaagtattttatagatagaaggaaattttttccgaccataaaaagtatattaattcttgatcaggatcaatagccgagtcgatctggcctggtccgtctgtctgtccgtctgtgtgaacgtcgagatctctggtactataaggttgagattaagcatacagattcttaagacatagaggcagcgcaagtttgttgacccatattttgaaaaatgttttgatatgtttttataattttattagacttgtaaatttctatcgatttgccaaaaaaatttgccacgcccactctaacgccctaaaaccgcccaaaactgccacgcccacactattgcaaaatgtttacatttttttcataattttataagtcttgtaatattctatcggttagccaaacaatttttttcacgtccactctaacgaccttaagcttccaaaccggtcacgcccacacttttaagccatttttaatttgtttttcattttattccccatctatcgatatcccagaaaaattatgaaatttcgcgttcgcattcgcactagctgagtaacgggtatctgatagtcgtgcaactcgacttaagcattctctcttgttttacatttcagtttttggccacaagccgcccgtatgcatgacccacgctttcaaaattttttattatatatttcttttttttatttttttcccaacttcaatcgatatggaagaaatttctcgtttgctctttcactagctgagtaacgggtatctgatatttgggtatcttaacttcgcttgttttttagtgaaagccatttttttcaaatggtttgtacacctttatgagaatgttattgcttttattgtatctcgtaaactaaatatatggtagaaatggtcttgatcttttaaacacaagtcatagggttttccgtttggaatccacaagagtatatgtcgtaaaagtccttgttctgtttaaggcccagatagaagacatgctcggccagatccttcccaaactcacagaagttctgagcgtaaagagtaaaaaatatacgcttgttgtcaagatggtacttttgaaggacgccattttcctgatcgtatatcccactgttctgtggaggcgagttgatccaggcgctgtagtctatccaggccgctcggaagctctttaagtagatcacagccagcattctggcctcatccagaacattaacgaactgcggcagccttaaacactccacatcttcgcgaaaccgcgtgaaatcacgctgacgctccagactattaaaaagcatcatgtacaaatggaccgtaaacgtggagtagaagtaggacatgggcttgttgcggctctgaaagaggtacatgctccaatccagcatggtgcgctgaacccccaattcgtatgttgaattcagttttctgtgctgctccagattgcgaacgttgtgttcgtagctctcccggtagatccgcaggtccttgtactcccggctcaggtctctagcatggaagtagactcgcggcgttttaaatttctgcttatacgtggccagcttgctgagaatgggattcgactctctgtccttctgaaacctgacgacgaagcggtccaaaatgcccagaaagtcatccagctcgtgggattctccattgagcatgttttttgtaactatatacccgaaaagtggcttgaaatactcataggtctcacgatagcagtcttccagcgcgtggtgcacgttgcaggagatgaagaagtccagcgtcttctgcttagcctcgaatggctctggatcgttctgcagctcggtcagcaactgcataagatcgcccatttgcggcatgtgtccttggatagggtatatgcattaggcactcccccaacacaggctttcctcacttacccatgatcgaaaagaggggtcgattgcggctacagacgtagtcgaaatagctctcgcaggcatacttttcggtgttgatggagccctgtatacgaaccgacaatttttcaagttcccttatccgcagctccgacaggtgccgcacgtatcccacttggcaatgccctgaaccagtcaacatcaacagaataagcgctacggatgcgccgattgcaagacttgaggttgtcatcgcagagctcaagtcactggcaacccagcttttgcgccagcctatcggacccctcaacggatgtcggatttcgttgcacagtagttcgagagagagtcacttttcaaatacgtctatcactgggcaacgaaactatttaacttcaattgaaatgtaagcacaaaactccgtatcccctggtattaaataactaaaataacttattgaatgtttcaatttttagtaaaaacttttttattacttttgacaatatttaaaaagattttctgtccaagtggacaataattaaatgattgtgggctgacattgacataatttatttttatcataatgaacgtttgaaaagcatagatagtattgaaaaatgccctattagtgcaactcagtatatgtttttatggtgtgttttcaacattttcaacttatgcttcttcaacgtgtttaaccaaaaatttatccggactttagaagaacgttttgttgcagacagttacaaacagttctccaaaatcacaataatcaatctttaccgttttaccttttttattttatcgcgcacatataaacggtctaaaaaccaattaaacgctcacattcctattttatcatttttacttgaaaatgcaaaaacacccgaaagttctcgggttgtttgttgtttttatattgttgaattattagaacggatttatatatgatcttattacactcgcaccacagtgcattgctcaattcgaggtcttattttaattcagtgagtgagttcctatgcttaattatatttccgaagcgataagaatgtcaagtcctatcaggaaaatttctctcccactgtttttacgatcgcgctattctggaatatgggctttgcatcgtttcacaagtattacgagttatatctgactaagcgtagacaacagtgtgcagttgcttatgaaaggaatgatttaaatatacatatacatacataatatacatatattatattatatttgttggt

SEQ ID NO: 263 - DNA, 1388 bp, DROSOPHILA
atgacaacctcaagtcttgcaatcggcgcatccgtagcgcttattctgttgatgttgactggttcagggcattgccaagtgggatacgtgcggcacctgtcggagctgcggataagggaacttgaaaaattgtcggttcgtatacagggctccatcaacaccgaaaagtatgcctgcgagagctatttcgactacgtctgtagccgcaatcgacccctcttttcgatcatgggacacatgccgcaaatgggcgatcttatgcagttgctgaccgagctgcagaacgatccagagccattcgaggctaagcagaagacgctggacttcttcatctcctgcaacgtgcaccacgcgctggaagactgctatcgtgagacctatgagtatttcaagccacttttcgggtatatagttacaaaaaacatgctcaatggagaatcccacgagctggatgactttctgggcattttggaccgcttcgtcgtcaggtttcagaaggacagagagtcgaatcccattctcagcaagctggccacgtataagcagaaatttaaaacgccgcgagtctacttccatgctagagacctgagccgggagtacaaggacctgcggatctaccgggagagctacgaacacaacgttcgcaatctggagcagcacagaaaactgaattcaacatacgaattgggggttcagcgcaccatgctggattggagcatgtacctctttcagagccgcaacaagcccatgtcctacttctactccacgtttacggtccatttgtacatgatgctttttaatagtctggagcgtcagcgtgatttcacgcggtttcgcgaagatgtggagtgtttaaggctgccgcagttcgttaatgttctggatgaggccagaatgctggctgtgatctacttaaagagcttccgagcggcctggatagactacagcgcctggatcaactcgcctccacagaacagtgggatatacgatcaggaaaatggcgtccttcaaaagtaccatcttgacaacaagcgtatattttttactctttacgctcagaacttctgtgagtttgggaaggatctggccgagcatgtcttctatctgggccttaaacagaacaaggacttttacgacatatactcttgtggattccaaacggaaaaccctatgacttgtgtttaaaagatcaagaccatttctaccatatatttagtttacgagatacaataaaagcaataacattctcataaaggtgtacaaaccatttgaaaaaaatggctttcactaaaaaacaagcgaagttaagatacccaaatatcagatacccgttactcagctagtgaaagagcaaacgagaaatttcttccatatcgattgaagttggg

SEQ ID NO: 264 - protein, 394 aa, DROSOPHILA
MTTSSLAIGASVALILLMLTGSGHCQVGYVRHLSELRIRELEKLSVRIQGSINTEKYACESYFDYVCSRNRPLFSIMGHMPQMGDLMQLLTELQNDPEPFEAKQKTLDFFISCNVHHALEDCYRETYEYFKPLFGYIVTKNMLNGESHELDDFLGILDRFVVRFQKDRESNPILSKLATYKQKFKTPRVYFHARDLSREYKDLRIYRESYEHNVRNLEQHRKLNSTYELGVQRTMLDWSMYLFQSRNKPMSYFYSTFTVHLYMMLFNSLERQRDFTRFREDVECLRLPQFVNVLDEARMLAVIYLKSFRAAWIDYSAWINSPPQNSGIYDQENGVLQKYHLDNKRIFFTLYAQNFCEFGKDLAEHVFYLGLKQNKDFYDIYSCGFQTENPMTCV

SEQ ID NO: 265 - DNA, 2871 bp, DROSOPHILA
gcgtcctccggcgatgtgtctgccgaggcgttggcattctccccctcgagctccgcctcatcgtcgtcgtctggcaaggggccgggaatcggtgtctcaccgttcttcaggcaattgtggatgtaggcggccttccacttggcgtacttcctgttgtgcagcgcctcttcgctcagttcaccgaaggtctggagaatgtcgtagagcacaccactggagtagaaggccttaacgacgtttctgcgaagaagcacaatcttatgaatcaggaaaatcgattcagggtatttctacgaagggaacgcactttccgaagttctcctcgcgatcctgtttgtcggcgtacaggaatagtttcaaggcgtagttctcgatgtgtgcctgggcagccacctcgttggtgatggcctcgttctcagcatactgtttcttcatctgctccagccagtccatgatgcctggcggtcgtagggaaaaccaaaacaaaacaaaccacggatgagtcataggctggtaatatgcgtatcggatttttcactcacccagcagcagtttggtttcttcacccgtttgggtggaggctttgaggcccacctggagagcactggattcggaagatgagtaaatacgggcaaaacaagaaaaactaatctgtagatactcactagagtctcgcccagtaggcgatgaccacatcccgggtatcatgttcctgggccagcttcagaaagtgttggatggacttcagcgagggaggacaaggcggaaactccatcgtggtggaaagagggcttaatctttagttctatgcttaattacggatctggaaaattatgccgacaacaatggaaatgacgagcacgcagagtgaccagatatcgcagtttctcgaatgccatggaaccaccccagttccaaactctggaactagcgaaatactaaagtttgtaccttcggctaaagttgttggttcggcgctcagttgcgaatctgcgaccaaaacgtttggagtttctcaggtaagcactggactctgggaactggttttcgctgttatcagtgcgaccagttgcactttgcactttgacctgcatccttcacaccagtcacattccaggcacatctctgcaccaccggcaacatggttctctccaagcccctgtactcgctcttcggcacttatctggagcagctcttcaaccacccggtccgcaccaaatccattacggcgtaagtacactattcgccttatcatccggttcgcctcacccaccggctgctccttactgcagatgcgttctggccacctcggctaatgtcacctcccagcgtttggcgggcgccaagaccctcaaccagcagagcgtattcgcctacggactctttggactgatcttcggcggtagtgtgccgcactacttctacacgacggtggagcgactcttcagccaggatgtgcgcttccgaagattcttcctgttcctgtccgagcgactggtctatgctccgatttaccaggcactgtccctgttcttcttggccctgttcgaggtgagaatccataatccgcaatctcagttcctagaactataatttgtaatcccttacagggcaagtctcccagcactgcattgaagaatgttgagaagctctactggcctctgctgaaggccaactggcagtacctgtccgtgttcgtgtacctcaacttcgcctacgtgcccccgatgttccggtccatcagcatggccatcatctccttcatctgggtggtgtacatcgcccagaagcgtcgccgcttccaggacaagctggccgccaaagaggcagccaaataggctatacgacccttaaaccctgtggtagtcgtcttggcctaatattccaattactgcttagattacggctgaactgcttcaagttctttatcttcccgcgttccggcggattgcaaaaagtccgtgtgtatttgaacactttagataagctaaaactaactggaggggcgccttatcaaccgactgttgttataccttaaaccctaaattttgtaaacttttcttaccaaaataaactaatatacaatgtataagatatctagatatccatggccaaatttggccaacagaaatgcttaacaagtagcgacaatcgtcgatctaacatcccatttccattgcgcacaatggatcccaatttgagaaattccaaggcaaccttttgagatgcaacaaataatgtctgttttttttttattaaaacgcagcttagaactagcaaataatcgagcaaaggcttacaaacgagaattattggctttttatcggcgctacaatataatttcgctagtaaattcatgggcagatgactaacttagggctacggaatgcagtgtaaaacaagttaaatgcgcataacaactatcttaaaactaggattctgactagaggaggtgactacgatgatggtgatgattgtggggggcacctgtgcctcaagactcgccgcacatcctgcgcagcgacgcggttaacactcagaaggcggccatcgacggactccggctgttgcgcaggggcgtgagaaggggcgtggcaggactgctggcgcggctaaagcaactggagcagcaactagaggcatcctccacctcgccctcggcgttcgccttgtggtgatagggaatcggtcgcttgcgagcgctgaaagcataatgaatagattagtatgggattcgtgtagcaagcttaaaaaccaaagggcaaatatgaaagtaactcaccaaactgaaaatcgtaaggaatagaaaagcagtggctaaaaatcaaacaaaagaaatcctataaaaccatataatcggtaaagtgacaa

SEQ ID NO: 266 - DNA, 661 bp, DROSOPHILA
aacgtttggagtttctcagacattccaggcacatctctgcaccaccggcaacatggttctctccaagcccctgtactcgctcttcggcacttatctggagcagctcttcaaccacccggtccgcaccaaatccattacggcatgcgttctggccacctcggctaatgtcacctcccagcgtttggcgggcgccaagaccctcaaccagcagagcgtattcgcctacggactctttggactgatcttcggcggtagtgtgccgcactacttctacacgacggtggagcgactcttcagccaggatgtgcgcttccgaagattcttcctgttcctgtccgagcgactggtctatgctccgatttaccaggcactgtccctgttcttcttggccctgttcgagggcaagtctcccagcactgcattgaagaatgttgagaagctctactggcctctgctgaaggccaactggcagtacctgtccgtgttcgtgtacctcaacttcgcctacgtgcccccgatgttccggtccatcagcatggccatcatctccttcatctgggtggtgtacatcgcccagaagcgtcgccgcttccaggacaagctggccgccaaagaggcagccaaataggctatacgacccttaaaccctgtggtagtcgtc

SEQ ID NO: 267 - protein, 191 aa, DROSOPHILA
MVLSKPLYSLFGTYLEQLFNHPVRTKSITACVLATSANVTSQRLAGAKTLNQQSVFAYGLFGLIFGGSVPHYFYTTVERLFSQDVRFRRFFLFLSERLVYAPIYQALSLFFLALFEGKSPSTALKNVEKLYWPLLKANWQYLSVFVYLNFAYVPPMFRSISMAIISFIWVVYIAQKRRRFQDKLAAKEAAK

SEQ ID NO: 268 - DNA, 5655 bp, DROSOPHILA
aagagcgaaagaaagaatacagttcagttcaattagcatcgatatataaaatgttaatccgctgttaagacagctgaagcaccgggtgactccgctcataatccgtacacctcgtaaaaacaaatttgaaatggtgagtaattcatatgtccgtgggtcttaaatggctttttgtcaccttacgggatttaatttcaatatagctttagcacattctcagaaaataataaatcaaaagaaaactaaaatctgattatctgcccctattctaatttaactcgactagcttagaaaacaaagaaaaagactttgtatttagtcagctggttgccatctttatttgtttaatagtagtgtagctatgtctgttgtgtatttttttgttgcatgctctgcttgtgttttcatagtttttagtttaataatttagttattatttttcgtggccttgcgtatttgtttatatttgtaatacatttaaatacattccacagcggttttagggtttgttctcgcgacatggctagcttatgaaatttgataatgtcctagaaaaaatgatccttacattggcgtccagatgttcgtttatcgaaatctaatgtgtctgggttttcgtattcgaatcttgtctagccgcagctagtcggagctgcgaattccattcgtgctcgtttcagagttgtgctaagcgaatgctttggtttttgtcaagctcgctagcagcttttttcaaaagtttgtgtcgaggtgtcgcagtggatcgaggtttcaattgggacatgagtcgaaacaattcctagcaaatttaccaaagaaactaaaggactaataacattgtttttagcaggcatggaaacaaacgaatcgttttgaaccatgtttggtactttccgcgtacgatttcgagctaaattattgttatacagtataattcgcttagctgcctcgagtactttgcacaatgcctcgatgcaggtaacttaaaaatgcagctaacttaatttttttttttctattttctattttctattcacacaaaaaaatggaaaaataatgcagatatcttgccgatgcagctaactatcgatgcagctaagcgaattatactgtacttatagtttctctaagacatgtcgctaagtgttcctgcgattttgaatgttcatcgtgctcgcgagaggcgacccacctttgtctgccgcgtgtcccacgtcatcgaaatctttagcctggaagcctggttcaacatcgtttatgatacatacatacataaatattatttcaaatacatacatacatatacacatatatataggtatatatataaaaataacaaataatagtattaataaaatcgtaatgtgtaatttcccaatataataaaaacaatacgcgccggcatgccctgaatactaagctgatactttcaattgctcgtcgtgcccgagtgttctacgtcgacgtccccgtccgcgttctgctgctcctgcggtacatacatcacggcagtgccctgcttgtctgcatccgaggatatcgaccagttgcgctccagctgctccaaggccgccatggtcgccgtggtcgtcacccccgcaccggagctctctgccccggcaccgtcgctcataacgcccgctttaagcgtttcctccagcagcacctggatcttgtcctggtcgtcgaggtggacgaaaccgaggcgcaccagttcgctggtgagatccgccgccgtatcgttctcgttcacctggcatgtcagttggcggttcatcttgtcgtccatgcgcagcagtattgtcatggttatgtcattgctatcctctttgattttaacgctgcacatcatgttaacgatgcgccgcgactccgtgtccacaggctccggcgtggccgattttacggagtcagcccgttccggggaggcggcccgggaacggaagttgggcggcttcttgccgctgtacgtaattagcggatacacaccatacttcacgtcctcgacgaacttttccagcttatcggcgcctgaaacgtctgcgagtcggtactgccgctcctggccgccggccagccgcagctgggccataaccacgtccggctggtagtatcgctgcatgaggccgtcgaaggcggtttccgagaacatagtgcggttggcgggcgagaagaccaggcaatgggcagtcagcagtttgagggagtgcacctgtagtaatagcagcaaaaaattgattattaactactgagtttttcagttaattacctttataaaagtgttataagaataccttgcaatgtcatttgaaccatgtacaaatttatattttaaagtcaacaagagcgaacgctacactgtttttctcgaatatcagactcaagttgaagtgcaaacgagaagtttccacactttaaaatggcataccaatggatattgacaagacaaataagaccaaagtatcggcgtggcagttctatggggtttccgttggagtggacgattctaatgaagaatcgctaacaatatagggctgaaaacgattccttctacccgttaatttcctcttaacgaatatagtaacaggtatgaaaataaaacaacagaccctcagtaatcaaaataaaatgtatagttacatattaaccacaacttgaacttaagatataagtgactgtgagcaataaataatatactacagtcaaaatggattgtagaattatcaactgattactagttctccttccatttatatacatatatatataatatacacatgaatataatatattaaattctaagataatttacgatatgattcggataaaaccaaatttagaacttaaatatttaacggtgcatttaaatcatataattattcaaatcttcagatttcaattatttacttaaaataaaatttaataatatcaggtgtcttattaaactaaatctctcactcgatggatccgagaattagaatgcaaggtctagttgacaaggcaattgttatgcgggtcttgaatttatagcatttagaacaagataattgacttgaaaactcacctcgaaaagcaatgggtgaaagagcagatcattggcgctgggtcggtcctgcggctgcgggttgagacactttcgtatcaggtcgcgctgcagatcgttttccaggctaaagattgtgcgctggatggtctcctcgttgatggcagttgactcgctgttactgggctggatttccagggcggccatctccagggcacacatcccgaaggcgtagatgtcgagggcggcggtcaactggtcggcggcgccgtactcgggcgcctggaagtagtgggcgcctcgttcgcgttcacgctcccgctctcggccgcgccggacgctgtagtggaccgcgtccgggaccaccgagccgatcttgaccaggccgttgtgctggatgaagatgctatcacaggttaaattgccgtggatgatgggcggcgagcaggaatgcaaatagctgagtgcggacaaaatctgagtgcaccaccggcgccacgactccagcggtagccgcttggcgttgcgcttggtgcgcttgaggaactgtttcagcgatccgctcgacatgtactcggtgataaagaccaccctgggtcgctcggcctgctgcgtgtccgtccagtagcggtggaacttgacaatgttttggtggtccagctgcagcagattgtcgaacacctgccgcatcttctcctcctgcgacttcagctcctgtaggctggcatattgcacctcattccacacgacctctacgccctcctcggtgtccatggccagatggacgcagtcaataccgggtacgtcacgctgatccacctcctcgcgtcgcttcagccagcgtccacatggcgactcctccaaaatctcgctctcatcctccgaatcgtccccggactcgcgtggcgacgagtccagattgacgccctcgctgccagctacgacgccgacgccgaccgcagcgctgctgcccgcatcagctgttgaggcactaactatgtgcggcgggggctgctgcgtcgactgcgacggcggggtcgctgctgggcaggatgcacttacggggccggccgccaaggaagggtggtgctggatgggttcatccgctaccgtgctaccgctgatgccggcattcgcttggctatttgacattagggtgcggtcaccgacgcggctgcggctgttgagcagtgctgttccagttccagaaggcctcgtcgtcttcggtttccagtgtttattttctttgttggactgcctacgtttgcgctagcttttcgtggtatccactacggggtccgggcaacgagctacatccgccgctgctcctctgccgctgcctctgccccactcactggcgcacacatacacacgcacgcgcccacacagctcatccactgcacccctcgcccagtaaacactccgctgcgacggctggcggttgctgggacgtttttcggcaccttcgacggcgtcttctgttccaatcctcgactgcgtcgcgaactgcgatccgtttgttgcactttctggcctgacacgctgccgattcgtttatttaggcgtttttttcacgctaaaacacccaagaaatgtgagcaaatcgatgcctctggcttatcgatagtcacccccgcatatcgctcggccagcgcaactgcggcatgctcatcgataataacgcgttaagctgagatatgccaaaaatggcttaatttatgtgatttattaattttttatacggtaacgagcaaggaaaattagtttgcaggcggttcatttgattataagccaagtttttagtaaaatattctttttcttttgaacacattaagagctggcaaaaaatagctagatggtccggaaatatgcagaattaccaacatcatagaaccgttttcgatagtttctcaatggtaccgataacaccttgccatccgtgccggcagctcttaaaaatatccgaagtatcgcagatttaggcaaaatctgcatcaattaaccaaacatggatagcataattggacgcagccagtttgtctcggagacggccaatctgttcacagacgagaagacagctacggcaagagctaaggtagaacacaaatcttaatcagacaagacagtccggactgctgtattgtaccatatattttcccattcaggtggtcgattggtgcaatgagctggtcatcgcatcgccttcgacaaagtgcgaactgctggctaaggtgcaggagactgtgcttggatcgtgcgcggagctggccgaagaattcctggagtccgtgctgtctttggcccacgactcaaacatggaggttcgcaagcaggtagtcgccttcgtagagcaagtttggtaaggatttccatcaaaggatctaacttcttgctgaaacgatttatattttccatcccagtaaagtgaaggtggagttactgccccatgtcattaacgtcgtgtctatgctgcttagggataactcggctcaggtaatcaaaagagtgatccaagcctgcggtagcatctacaagaatggattgcagtacttgtgcagcctcatggagcccggcgacagtgcggagcaggcgtggaacatcctcagcttaat

SEQ ID NO: 269 - DNA, 2803 bp, DROSOPHILA
aggcatcgatttgctcacatttcttgggtgttttagcgtgaaaaaaacgcctaaataaacgaatcggcagcgtgtcaggccagaaagtgcaacaaacggatcgcagttcgcgacgcagtcgaggattggaacagaagacgccgtcgaaggtgccgaaaaacgtcccagcaaccgccagccgtcgcagcggagtgtttactgggcgaggggtgcagtggatgagctgtgtgggcgcgtgcgtgtgtatgtgtgcgccagtgagtggggcagaggcagcggcagaggagcagcggcggatgtagctcgttgcccggaccccgtagtggataccacgaaaagctagcgcaaacgtaggcagtccaacaaagaaaataaacactggaaaccgaagacgacgaggccttctggaactggaacagcactgctcaacagccgcagccgcgtcggtgaccgcaccctaatgtcaaatagccaagcgaatgccggcatcagcggtagcacggtagcggatgaacccatccagcaccacccttccttggcggccggccccgtaagtgcatcctgcccagcagcgaccccgccgtcgcagtcgacgcagcagcccccgccgcacatagttagtgcctcaacagctgatgcgggcagcagcgctgcggtcggcgtcggcgtcgtagctggcagcgagggcgtcaatctggactcgtcgccacgcgagtccggggacgattcggaggatgagagcgagattttggaggagtcgccatgtggacgctggctgaagcgacgcgaggaggtggatcagcgtgacgtacccggtattgactgcgtccatctggccatggacaccgaggagggcgtagaggtcgtgtggaatgaggtgcaatatgccagcctacaggagctgaagtcgcaggaggagaagatgcggcaggtgttcgacaatctgctgcagctggaccaccaaaacattgtcaagttccaccgctactggacggacacgcagcaggccgagcgacccagggtggtctttatcaccgagtacatgtcgagcggatcgctgaaacagttcctcaagcgcaccaagcgcaacgccaagcggctaccgctggagtcgtggcgccggtggtgcactcagattttgtccgcactcagctatttgcattcctgctcgccgcccatcatccacggcaatttaacctgtgatagcatcttcatccagcacaacggcctggtcaagatcggctcggtggtcccggacgcggtccactacagcgtccggcgcggccgagagcgggagcgtgaacgcgaacgaggcgcccactacttccaggcgcccgagtacggcgccgccgaccagttgaccgccgccctcgacatctacgccttcgggatgtgtgccctggagatggccgccctggaaatccagcccagtaacagcgagtcaactgccatcaacgaggagaccatccagcgcacaatctttagcctggaaaacgatctgcagcgcgacctgatacgaaagtgtctcaacccgcagccgcaggaccgacccagcgccaatgatctgctctttcacccattgcttttcgaggtgcactccctcaaactgctgactgcccattgcctggtcttctcgcccgccaaccgcactatgttctcggaaaccgccttcgacggcctcatgcagcgatactaccagccggacgtggttatggcccagctgcggctggccggcggccaggagcggcagtaccgactcgcagacgtttcaggcgccgataagctggaaaagttcgtcgaggacgtgaagtatggtgtgtatccgctaattacgtacagcggcaagaagccgcccaacttccgttcccgggccgcctccccggaacgggctgactccgtaaaatcggccacgccggagcctgtggacacggagtcgcggcgcatcgttaacatgatgtgcagcgttaaaatcaaagaggatagcaatgacataaccatgacaatactgctgcgcatggacgacaagatgaaccgccaactgacatgccaggtgaacgagaacgatacggcggcggatctcaccagcgaactggtgcgcctcggtttcgtccacctcgacgaccaggacaagatccaggtgctgctggaggaaacgcttaaagcgggcgttatgagcgacggtgccggggcagagagctccggtgcgggggtgacgaccacggcgaccatggcggccttggagcagctggagcgcaactggtcgatatcctcggatgcagacaagcagggcactgccgtgatgtatgtaccgcaggagcagcagaacgcggacggggacgtcgacgtagaacactcgggcacgacgagcaattgaaagtatcagcttagtattcagggcatgccggcgcgtattgtttttattatattgggaaattacacattacgattttattaatactattatttgttatttttatatatatacctatatatatgtgtatatgtatgtatgtatttgaaataatatttatgtatgtatgtatcataaacgatgttgaaccaggcttccaggctaaagatttcgatgacgtgggacacgcggcagacaaaggtgggtcgcctctcgcgagcacgatgaacattcaaaatcgcaggaacacttagcgacatgtcttagagaaactataagtacagtataattcgcttagctgcatcgatagttagctgcatcggcaagatatctgcattatttttccatttttttgtgtgaatagaaaatagaaaatagaaaaaaaaaaattaa

SEQ ID NO: 270 - protein, 637 aa, DROSOPHILA
MSNSQANAGISGSTVADEPIQHHPSLAAGPVSASCPAATPPSQSTQQPPPHIVSASTADAGSSAAVGVGVVAGSEGVNLDSSPRESGDDSEDESEILEESPCGRWLKRREEVDQRDVPGIDCVHLAMDTEEGVEVVWNEVQYASLQELKSQEEKMRQVFDNLLQLDHQNIVKFHRYWTDTQQAERPRVVFITEYMSSGSLKQFLKRTKRNAKRLPLESWRRWCTQILSALSYLHSCSPPIIHGNLTCDSIFIQHNGLVKIGSVVPDAVHYSVRRGRERERERERGAHYFQAPEYGAADQLTAALDIYAFGMCALEMAALEIQPSNSESTAINEETIQRTIFSLENDLQRDLIRKCLNPQPQDRPSANDLLFHPLLFEVHSLKLLTAHCLVFSPANRTMFSETAFDGLMQRYYQPDVVMAQLRLAGGQERQYRLADVSGADKLEKFVEDVKYGVYPLITYSGKKPPNFRSRAASPERADSVKSATPEPVDTESRRIVNMMCSVKIKEDSNDITMTILLRMDDKMNRQLTCQVNENDTAADLTSELVRLGFVHLDDQDKIQVLLEETLKAGVMSDGAGAESSGAGVTTTATMAALEQLERNWSISSDADKQGTAVMYVPQEQQNADGDVDVEHSGTTSN

SEQ ID NO: 271 - DNA, 5934 bp, DROSOPHILA
tgttttgggagtttcggatcgaatcgggtttattttggtttttcggtctcttcattttttagttttttagttttgggtgtgtgtgaaagtcactgcatgatgatatttcgtttgttgcataatccttccacgcaaatcgcccagggccaagccaatgaaccctgtcgaattttagtttgcccatctctagaagaatcatatggcatgatacaaccacaccatactataaaattgcaatctcacgtcgtcgccggggcaatctttcgagtgtaatctgctctgcggactcgtgtcttcgtcacccaactgccattctggatgcctcctaatggataaacaatttcttggtaataaaagtttgtcactcaactaacataactagcttctttggaaatacttcgctgccggaacttggtgattctcaaatgtcaatgaagatccaggatttagttttaattagaggggaatcacttcaaacaatgagttttttaaattgaaatcattattactaataaagggaaatatcttagacaaactaagtaaacgatttgaaattaataatgataactaaagtgtggtaatttatttcgcatttcgtactaatttattgagatattacaagatcatggtcatgaccatcatcatttcctgccgctcttcagctgtctcttcgctcaggttccacacaacttgagttccacatacgtcggcacactttagcgcatgcgcgccaaacttaccgccacgcacaccaacacacagtgcgtatgcgcaatgtcacgtctgcggtgaagaagagggttccagttgtaaatgtaatggtgtgtagttgtaattgagttgttactgtacccacatacgtagtagccacctttcttcgggctgctctgtgtgtgcgtgactctttggtttctctgcctttttgcattcttaataaatcaacgcgaagaatatataaattgggcggctcggtggacggtggcagttagtattttccagccaacggtgcctcacaggtgtgcaaaagagcccgcagtgcgagtgcaagccttgcgtcttaccccaattatatagccgggatattggaattggattaaacgcagcccccacacctatcaaatagcacaagaaaaagagccaaaaaatcagaaaacggattatcgcatgtgttttttaagcaaagtgttacaagccaagtgatatatagtgaccaaaactgaacaatctgtgtgtgaaaatgtggaaaacgttgtgtttgctgcttctcttgacggccacctgcagcgcaggacccctgtccgcccaccaggtgagtgttagagtccactggtcggatatccatgccgcagacagcttgaccaccgaagaccacttccgttcgccttaacggaaatgggaaactgttagtggatggtttgccgacccgccaagccatacgatgaaatcttaatgggacatggcctggactcactcgcatttgcatacctgaatgacgacgaatgcctcttctacttctttggcccggcttatttggtatgccaagcgtttagcctttttttaacggccaagactccaagacaattcggtctatggtatttataggcactgcaggtggcttaatgacaggtagaagccggcgagaattcgccagagaaatcactggaaaagcttccaagaattagccagcaacaaagtctttaagtttgcattactcatgatgggtaacctttttgtgggaagggtctacgtacaactgaaagtttttggcaccaactcattgaaatgcagggcccaaaataataagttaataacaaatccatatggctaaaatattatgtgataatatgtgagcgttccattcgaaagtgacttcaattgcagcgagacccataaaagggctgcaacaggtgcgaagtgcacagagggctgggcattaactcacctttttgattcgagtccattcgcttcgcttcgattcaatttaattttcacttgctgccgcctcgtagacgaaaactagaacacaagtgaaatttttcgggtgcctagttgatcgcagagtcacgtgctggcttcacgggattatccatgcccatcacgtacctcgttagccgaatggatcgtacagctggcttaaagataggatacggaatgtgaaataggatacaagccatcgtagattccagaaataactgtacatatatttttcctttttcttgaattcaacagaagaggaaagcacccgtgacgcgtgaggagcctgtcccagctgaggtggaaatgccggaacagaccgaaacggaggatgaggaggctccagcggaagcagcttccatgggaacgctcaccctgcccagcaatgccacctccattcgctcggacatcacggataacttctcgtgtgtcaacaagacctatggctactatgccgatgtggagaacgactgccagatctttcacgtgtgcctgccggttacctacgccgatggcagggaaaatactttccgctggagcttcatctgccccgaggagaccatcttcagtcaggtgggtgttctggaacgaatccttggcttagtaaaaaatttattcaacatttatcacaggaatcgttcacctgcatgcgtcgcgaggacatgaccatcgagtgcgaggatagctccagatactacgaactgaatggcaactttggtggtcctgcggaggaggaaagtaagcccactcccgtggagagcgaggagccggagaaggaggagtcagagcccgaacccgaacccgttgagtcagagccagagattccggcagaaccagaagtccagacagccaagccgatgaagccagtcaaggcccaaaagcccaaacccaaccgaaggaagccccagccccagagaaaggttccagctgtagttactgctgcacctgaggtagaagctattcccgagccaagtgcccccgtcgaaatggagccgaagcccttgaagccacagaggttcaccagcagaccccaccaggaaagaccccaagtgaagaggcctgcaattgctgctccacctatgcgaaatgagctattcaatggaatccgcaagcgtccagccatcttcaataagccaccaactacagtgaaaccagttgaggaggtggtggaaaatgaaccggcggtcacagaggcagtggttcaacttagtgagccccaacccacactgaaactgcagaccttgttcgcggaaccggaagttattcctgtggaagtccaggagccagaagttcaggcttccgaaccagctgtgactttcgttcagccagagcccgttgttgaggaagtggtaccctcgaaggtggagattgataccaggatcgaggatgtcaagcccattgaagccatcgaagagattcctgccgtcatagtggaaagtctggatcaatcaaggccccaggaaatgcaggaggaagctaagataactgaagaggaggccaaaccagaggaggagccaaagccggaagaagaagtgaaactcgaagaagaactgaagtcagaagaagcagctaagccggaggtggagctgaaaccccaggaaattcaagcccaagaagagcccgaagtgccagccaaggtggaggagatcattgaagctaatcccgaggaaattaaatcggagccagctattatggaggtcagcaactcccatgaggaacccttggtcaacctggaagctctggaagcggccaagccagcagatgcgcccgagagcatgccagccactcctgaaatggaacagcacagtcctcttgtggaagaaatcctggataacactaacgatggagaggcgcaggagtccctgggaggcttcaagccagtggatcccgtgatggccgccgaagcggaacagttgatcaccgactttcttaacaccctcaaaaagaacgaagagaaaccagagactgacttggctgagagtatactgccagtaaataataccgatgtgtccattgaggaggccaagcttccggagcccgagatcgtggacaagaatgcatcagttgaggagcagttgttggaggaaaccgaagacaagaagtctcacaagaccgagatgatgcaggactctccgatcatcaatataatgcaggtgcaacatatgcccatggactacagaatcccagtccgggttattcccgtggaagtccaacctgttcccgcaatctctgaggcatcagaggtcgctaaggaaagcgctccagaggtggtatccgaatcttctctagaggaggccaaggaaagtgctgcagaagaagctaaagaatccattcccgaagaagttgtcgatacagctcctgaggaagtcaaacaaattcctaatgtagagattcaggaatcccctatggaggagcctaaagaatcttctcctgaagaaatcaaggaaagcactcccgaggaaatcaaagagactgctccagagacagaggttgagctggtggtcgcgcccgaccagactgctttccacgacgatgacgcccaggagagtctagtcacagccgcctacatgccctccatcgaggacatcgtggaactggtcaaagagcgcctggatcagacgcccaagaaggatcagatggctcccatggagctgatactcacacctggtggtgcagaacccatgtccttggttcagagcactccagaacagttggagccggaatctcagcccacggaggaggcggcatccactgccgggcaggaagaggaagtcatcctgcccatttacaaacgcgtctcaactgccgaacccgccatgtctaaggtgcaaacgctgcccgtaacggtgagcaaagtggatacagaagcgctgccggaaactgaatcccaaccggaagtccgggagcccaagatggacgcccgcaagcgacgtttcctgttccgcgccgatgccagctaaaaaggaaaacagggagatgcagcgaaggacagataacaatcctggcaaggattattcacccacttagcccgaaccggaaccccgttcacctcctagttcccaatacgctatcccactcatttgcacctaggcaaataaatttaataattttttgatttcctagttttatggccatttctcaaaggataattgcggacgagcgttgaaatttaagtttagaattgttgttccgaccagttaaagaaacaaactacaaaaaaaattgcaaaaaaatcttaaaataaaaatattaaaaattaaataacaaaattgtttgatgtaggtggggtaaaataggtaaggaacactttttggccagctaatcaactccatcgtgcagaggtttgagtgtcctgtgttttgcctaatcgcattcaatttctgaacggtagagatggtacgcttagaaacaacctaaaacaattttatcttatagttgaacttaaaataaagtaacaatatttaaaaataattctataatccttattttttttcaccacttgtaatatatgtgcttaaaaatcaaaagacttaggacacaaactgcaagtggcatatcaacaggttgtagcccaattcaaatagccaaacataccatattcgtaatttattttagaaaatcgtttacaaatcgtattaacacttaggctttgggtaattagctgtatgaggcaactaccaggtgagagaaccacaatttacagatacagtgaacactggacgttaagtaactaacacatcacatctcattgacggagccaacgcaggatcaccaggataactacgcctccgtttcctgctccagttcgccagcctggatttcctccggcgttcgcagatcgatggcgaacttgtgtcgcgtgggtgtaatagtgtcgctgggcgtggcctcgccctcctcctcaccggttgcctccttgacccgtcgcgagtaatcctggaaggcggcggccagggcaaa

SEQ ID NO: 272 - DNA, 2955 bp, DROSOPHILA
caacggtgcctcacaggtgtgcaaaagagcccgcagtgcgagtgcaagccttgcgtcttaccccaattatatagccgggatattggaattggattaaacgcagcccccacacctatcaaatagcacaagaaaaagagccaaaaaatcagaaaacggattatcgcatgtgttttttaagcaaagtgttacaagccaagtgatatatagtgaccaaaactgaacaatctgtgtgtgaaaatgtggaaaacgttgtgtttgctgcttctcttgacggccacctgcagcgcaggacccctgtccgcccaccagaagaggaaagcacccgtgacgcgtgaggagcctgtcccagctgaggtggaaatgccggaacagaccgaaacggaggatgaggaggctccagcggaagcagcttccatgggaacgctcaccctgcccagcaatgccacctccattcgctcggacatcacggataacttctcgtgtgtcaacaagacctatggctactatgccgatgtggagaacgactgccagatctttcacgtgtgcctgccggttacctacgccgatggcagggaaaatactttccgctggagcttcatctgccccgaggagaccatcttcagtcaggaatcgttcacctgcatgcgtcgcgaggacatgaccatcgagtgcgaggatagctccagatactacgaactgaatggcaactttggtggtcctgcggaggaggaaagtaagcccactcccgtggagagcgaggagccggagaaggaggagtcagagcccgaacccgaacccgttgagtcagagccagagattccggcagaaccagaagtccagacagccaagccgatgaagccagtcaaggcccaaaagcccaaacccaaccgaaggaagccccagccccagagaaaggttccagctgtagttactgctgcacctgaggtagaagctattcccgagccaagtgcccccgtcgaaatggagccgaagcccttgaagccacagaggttcaccagcagaccccaccaggaaagaccccaagtgaagaggcctgcaattgctgctccacctatgcgaaatgagctattcaatggaatccgcaagcgtccagccatcttcaataagccaccaactacagtgaaaccagttgaggaggtggtggaaaatgaaccggcggtcacagaggcagtggttcaacttagtgagccccaacccacactgaaactgcagaccttgttcgcggaaccggaagttattcctgtggaagtccaggagccagaagttcaggcttccgaaccagctgtgactttcgttcagccagagcccgttgttgaggaagtggtaccctcgaaggtggagattgataccaggatcgaggatgtcaagcccattgaagccatcgaagagattcctgccgtcatagtggaaagtctggatcaatcaaggccccaggaaatgcaggaggaagctaagataactgaagaggaggccaaaccagaggaggagccaaagccggaagaagaagtgaaactcgaagaagaactgaagtcagaagaagcagctaagccggaggtggagctgaaaccccaggaaattcaagcccaagaagagcccgaagtgccagccaaggtggaggagatcattgaagctaatcccgaggaaattaaatcggagccagctattatggaggtcagcaactcccatgaggaacccttggtcaacctggaagctctggaagcggccaagccagcagatgcgcccgagagcatgccagccactcctgaaatggaacagcacagtcctcttgtggaagaaatcctggataacactaacgatggagaggcgcaggagtccctgggaggcttcaagccagtggatcccgtgatggccgccgaagcggaacagttgatcaccgactttcttaacaccctcaaaaagaacgaagagaaaccagagactgacttggctgagagtatactgccagtaaataataccgatgtgtccattgaggaggccaagcttccggagcccgagatcgtggacaagaatgcatcagttgaggagcagttgttggaggaaaccgaagacaagaagtctcacaagaccgagatgatgcaggactctccgatcatcaatataatgcaggtgcaacatatgcccatggactacagaatcccagtccgggttattcccgtggaagtccaacctgttcccgcaatctctgaggcatcagaggtcgctaaggaaagcgctccagaggtggtatccgaatcttctctagaggaggccaaggaaagtgctgcagaagaagctaaagaatccattcccgaagaagttgtcgatacagctcctgaggaagtcaaacaaattcctaatgtagagattcaggaatcccctatggaggagcctaaagaatcttctcctgaagaaatcaaggaaagcactcccgaggaaatcaaagagactgctccagagacagaggttgagctggtggtcgcgcccgaccagactgctttccacgacgatgacgcccaggagagtctagtcacagccgcctacatgccctccatcgaggacatcgtggaactggtcaaagagcgcctggatcagacgcccaagaaggatcagatggctcccatggagctgatactcacacctggtggtgcagaacccatgtccttggttcagagcactccagaacagttggagccggaatctcagcccacggaggaggcggcatccactgccgggcaggaagaggaagtcatcctgcccatttacaaacgcgtctcaactgccgaacccgccatgtctaaggtgcaaacgctgcccgtaacggtgagcaaagtggatacagaagcgctgccggaaactgaatcccaaccggaagtccgggagcccaagatggacgcccgcaagcgacgtttcctgttccgcgccgatgccagctaa

SEQ ID NO: 273 - protein, 905 aa, DROSOPHILA
MWKTLCLLLLLTATCSAGPLSAHQKRKAPVTREEPVPAEVEMPEQTETEDEEAPAEAASMGTLTLPSNATSIRSDITDNFSCVNKTYGYYADVENDCQIFHVCLPVTYADGRENTFRWSFICPEETIFSQESFTCMRREDMTIECEDSSRYYELNGNFGGPAEEESKPTPVESEEPEKEESEPEPEPVESEPEIPAEPEVQTAKPMKPVKAQKPKPNRRKPQPQRKVPAVVTAAPEVEAIPEPSAPVEMEPKPLKPQRFTSRPHQERPQVKRPAIAAPPMRNELFNGIRKRPAIFNKPPTTVKPVEEVVENEPAVTEAVVQLSEPQPTLKLQTLFAEPEVIPVEVQEPEVQASEPAVTFVQPEPVVEEVVPSKVEIDTRIEDVKPIEAIEEIPAVIVESLDQSRPQEMQEEAKITEEEAKPEEEPKPEEEVKLEEELKSEEAAKPEVELKPQEIQAQEEPEVPAKVEEIIEANPEEIKSEPAIMEVSNSHEEPLVNLEALEAAKPADAPESMPATPEMEQHSPLVEEILDNTNDGEAQESLGGFKPVDPVMAAEAEQLITDFLNTLKKNEEKPETDLAESILPVNNTDVSIEEAKLPEPEIVDKNASVEEQLLEETEDKKSHKTEMMQDSPIINIMQVQHMPMDYRIPVRVIPVEVQPVPAISEASEVAKESAPEVVSESSLEEAKESAAEEAKESIPEEVVDTAPEEVKQIPNVEIQESPMEEPKESSPEEIKESTPEEIKETAPETEVELVVAPDQTAFHDDDAQESLVTAAYMPSIEDIVELVKERLDQTPKKDQMAPMELILTPGGAEPMSLVQSTPEQLEPESQPTEEAASTAGQEEEVILPIYKRVSTAEPAMSKVQTLPVTVSKVDTEALPETESQPEVREPKMDARKRRFLFRADAS

SEQ ID NO: 274 - DNA, 4280 bp, DROSOPHILA
gactcgctgtcggactccaaagttggaaggcttggtttctcgtcctcagcctcgctgagatcgctcttgtggccagcagaatcgttggcattggagggtatcttggtgcgcgacttcttggcggacggctgtcgatcctcggtatccggggatttggatttgaccttatccgacgcctcagatgaggttgttttcttcgtcccgctatccgtgcgcttctttttcttcccaccatttagctcctcgggagtgggttcccgtttggctttgttcttggcggaagatttggaggatttggtctcgacagcgggttgagggctttgcttggcaggcttcttggttttccgcttgctactgcccgccagggaagatgtggcagtgctgacggagctgatgctcggctccgagtcggatgagtctccaccattcgattcggaagcctcactccttgtgttgaactcaaagtcttgcagctcctcggcaatgtccgcctcgttctcgtcgaggcccaggtgcactgcatccaagtccgccatctcgcgcatcggcagcgtttgtttacctgctccgaaatcggaaatcggagtaccagatgaatggagcacccacgcacacgcacacacgcaaaccaagaaaaatatatagagaaaaaagccgatcgatcggcaaggtaagaaaaggtcagggaaatacaggtattcccaaactcacgggctgctcttggcattaattgtgtggacaccggtctagcgccactttttgttcacttttaacgcaatatatccctttaatatcgcgaaattacgccaattttacaatgcttacacacaaattctgcgtcacagcggcgacgaattggcgatggcgtcagaagagtgcggctatatgtctgcaggccgcgactatcggaccactatcgataggcggatgcagctgaaaaaggtagctagaaatagctgaaaatgcactgcaatcggttatgttatcgttcctaacgaagcgaggtaaacaaaatgcaccacaatcagtcggatttcccgacttttccgctttccttgctggacgacagcgatctagagccacagagatgttatatacccgcgtgggagaactctactggaactggatggtaccgttgtcacctttgcgatggcagctacgcagtttgttgggtaactccgcgtgcaggcagtgaaacttgttgcttccttgatggaattgtaacctccttgacgcggttctcccccaccaatcagcggttggtgcttctggagccacttaaattagttccctgcgtgaagaggatttcatgcgtgattacagtcacccaggagctccttcagcgacctccggtttccctggaggatctgaaggacgatgtgcgaatcttcctgcgccacctgaagcttaccaaaggatgctccgtgcagcacagacgccttgtgcagctgggcattgccagtgtggagatattcgatgctccaggagttgctgatgacgagtgttttgaaatagcccacgatgctgagctactcctggcggacatacgcctgggaatgcccttttctttagattttatcttcaagtatttgccacacagcttcgagcgacccatggagcagttggagaagctcctggaaacctctaaaatcagcttttcgcatagatttcctactacagcattggttgtgggtccggtggactgtggaaaaagtggtctactcagtgagttcctgcgtcgtcatagctgcaactgtttttacattacagccagccaggtgctgcgctcatatcccggcgaaaccgaagaggagttgaggaggatctttcaggctgctcagactttcaaggagaaactacgtccattatgtaattttcacagtgtttgttttacgtttgaaatattaattagttttatatttatagtgccaattgtaatcctcattgaggatctggagctgctctgcccctcaacggctgtcgcagatgcaaaaaactctagcaatagcctacgaatttcagctgagctctacaaactgctagacgcacttcctcgaggcatcatatgtctggcaacttctggtgtcccggactccttgcatgaacatgcgcgcaggcggttcgtccgagaggtgaccattaatatgcccagcgaagggcagcgcagacaactcgtagagcatctctgcgaagtacacgagctgaatatctcacagactttactcgagcatatagcgagaaacactcagggatatgtgatagcggatttaacactactcctgcgccgcgttcaacagcaactcttaacaaaagacgacttcgacatagagcacattttcctcaaatccctgtcacaaactcaaccgagtgcatctcgatccacagatgtgcgggtctcgaagatgacggctgggtttgaggttatcggaggcatggaagcactgaaacgtaccttgcaagtctccgttctagcgggtataagacaaagtgccgcttttgctcgattcggactaagtttgcccaaaggagtgctgctctatggacctccaggatgtgccaagaccaccgtagccaagtgcctggccaaggaagctgacatgaccttcattgctacgtcggcggcggaggtgtactctccctacgtcggttgcgcggaaagatttatatcgcgaatctttgacacagcgcgaaaaaatgcaccctgtcttatatttctagatgagataggtgagtcggataagcttaatttgccataaaaatgattaatccacttaattttatagattcgcttgttggcagaaggacggtctcaagtggcggaggtggtggacaagttcagctgaggattctctccacgctgttgaccgaaatgaatggcattgtggggggtggtagtcagcaacatatacttgtcgttgcagccaccaatcgaccggatatgatcgatgatgccctactgcgaccaggacgctttgacaagcttatccatgtaccagccccagatgagaaatcccgcctggctctgctaaaactccactcccagcgcatgcctttccatgaaaatgtgtttctccaggagattgctgcccgaacagaccggtattctggagcggatctgtgtaatctctgcaatgaggcggctatcgaggcttttcaacgtgactttaaggccacggaaattgagctacaagactttgaaaaagttctgaccaagcagaaatcctcgctcactcaaagccaaatagatggctactataagtttgcttataggttcttatagaacaagatgtatgtgcagttgcatttgttagttttgcataaataaatgtattttaagatgttaaatcgtagaattctttgctcaaattcaaactactgatttacgatatgtactcccgcgaccacgattaccaatcgatagaatagtcgcagtcagctgttgcaacgataactgattgcggcaaaacaaagaaaacgcagagaaaaagttaacgcaattaaacgtagtaaaaaagcctagactattttcataacaagaagcagtgagtcacaaaaaaaagctttccggccacaatggcagatacccgtaaagacgccgcgccgccgagctacgaagaagtcatgaacagtccctcgcagggtaagtaataggctcactaaaggcatccaattcaatgcacatcttttttagattcccggctgatagtgggcgtgcatcagggagcacctagtgctccgccaccaaacatgcacatgccaacctacggagctttcgagacgacgccggtcagcgtggtgattcagcctgctccggtcgctatgcccaccgagatcatcgtgattggaggatgccctgcatgtcggattggatacctggaggacaccttctccgcctgcggactgtgctgcgcaatcttcttcttcccgctgggaattctctgttgcttggccatgcgtgagaagcgctgttccaactgcggaacggttttctagaggggattacccagaaattatccataaagaaacgctaaaagttgatccctattaggctttcgcggtgggtgactatcacaaagcaccaatatttttgttattgttaatcgttagctcgcaaatcattatatactatgtgtaaatattattcatgccagcctgcggaatgcccccgattccattccagtccctgtccggagaatggtcatgtacagtgaaatatgctaaactcgaattcaaatcagtaagcccagttatgaaaaaaatgctaaaaaaaatcagttgaa

SEQ ID NO: 275 - DNA, 2224 bp, DROSOPHILA
cgaggtaaacaaaatgcaccacaatcagtcggatttcccgacttttccgctttccttgctggacgacagcgatctagagccacagagatgttatatacccgcgtgggagaactctactggaactggatggtaccgttgtcacctttgcgatggcagctacgcagtttgttgggtaactccgcgtgcaggcagtgaaacttgttgcttccttgatggaattgtaacctccttgacgcggttctcccccaccaatcagcggttggtgcttctggagccacttaaattagttccctgcgtgaagaggatttcatgcgtgattacagtcacccaggagctccttcagcgacctccggtttccctggaggatctgaaggacgatgtgcgaatcttcctgcgccacctgaagcttaccaaaggatgctccgtgcagcacagacgccttgtgcagctgggcattgccagtgtggagatattcgatgctccaggagttgctgatgacgagtgttttgaaatagcccacgatgctgagctactcctggcggacatacgcctgggaatgcccttttctttagattttatcttcaagtatttgccacacagcttcgagcgacccatggagcagttggagaagctcctggaaacctctaaaatcagcttttcgcatagatttcctactacagcattggttgtgggtccggtggactgtggaaaaagtggtctactcagtgagttcctgcgtcgtcatagctgcaactgtttttacattacagccagccaggtgctgcgctcatatcccggcgaaaccgaagaggagttgaggaggatctttcaggctgctcagactttcaaggagaaactacgtccattatgtaattttcacagtgtttgttttacgtttgaaatattaattagttttatatttatagtgccaattgtaatcctcattgaggatctggagctgctctgcccctcaacggctgtcgcagatgcaaaaaactctagcaatagcctacgaatttcagctgagctctacaaactgctagacgcacttcctcgaggcatcatatgtctggcaacttctggtgtcccggactccttgcatgaacatgcgcgcaggcggttcgtccgagaggtgaccattaatatgcccagcgaagggcagcgcagacaactcgtagagcatctctgcgaagtacacgagctgaatatctcacagactttactcgagcatatagcgagaaacactcagggatatgtgatagcggatttaacactactcctgcgccgcgttcaacagcaactcttaacaaaagacgacttcgacatagagcacattttcctcaaatccctgtcacaaactcaaccgagtgcatctcgatccacagatgtgcgggtctcgaagatgacggctgggtttgaggttatcggaggcatggaagcactgaaacgtaccttgcaagtctccgttctagcgggtataagacaaagtgccgcttttgctcgattcggactaagtttgcccaaaggagtgctgctctatggacctccaggatgtgccaagaccaccgtagccaagtgcctggccaaggaagctgacatgaccttcattgctacgtcggcggcggaggtgtactctccctacgtcggttgcgcggaaagatttatatcgcgaatctttgacacagcgcgaaaaaatgcaccctgtcttatatttctagatgagatagattcgcttgttggcagaaggacggtctcaagtggcggaggtggtggacaagttcagctgaggattctctccacgctgttgaccgaaatgaatggcattgtggggggtggtagtcagcaacatatacttgtcgttgcagccaccaatcgaccggatatgatcgatgatgccctactgcgaccaggacgctttgacaagcttatccatgtaccagccccagatgagaaatcccgcctggctctgctaaaactccactcccagcgcatgcctttccatgaaaatgtgtttctccaggagattgctgcccgaacagaccggtattctggagcggatctgtgtaatctctgcaatgaggcggctatcgaggcttttcaacgtgactttaaggccacggaaattgagctacaagactttgaaaaagttctgaccaagcagaaatcctcgctcactcaaagccaaatagatggctactataagtttgcttataggttcttatag

SEQ ID NO: 276 - protein, 736 aa, DROSOPHILA
MHHNQSDFPTFPLSLLDDSDLEPQRCYIPAWENSTGTGWYRCHLCDGSYAVCWVTPRAGSETCCFLDGIVTSLTRFSPTNQRLVLLEPLKLVPCVKRISCVITVTQELLQRPPVSLEDLKDDVRIFLRHLKLTKGCSVQHRRLVQLGIASVEIFDAPGVADDECFEIAHDAELLLADIRLGMPFSLDFIFKYLPHSFERPMEQLEKLLETSKISFSHRFPTTALVVGPVDCGKSGLLSEFLRRHSCNCFYITASQVLRSYPGETEEELRRIFQAAQTFKEKLRPLCNFHSVCFTFEILISFIFIVPIVILIEDLELLCPSTAVADAKNSSNSLRISAELYKLLDALPRGIICLATSGVPDSLHEHARRRFVREVTINMPSEGQRRQLVEHLCEVHELNISQTLLEHIARNTQGYVIADLTLLLRRVQQQLLTKDDFDIEHIFLKSLSQTQPSASRSTDVRVSKMTAGFEVIGGMEALKRTLQVSVLAGIRQSAAFARFGLSLPKGVLLYGPPGCAKTTVAKCLAKEADMTFIATSAAEVYSPYVGCAERFISRIFDTARKNAPCLIFLDEIDSLVGRRTVSSGGGGGQVQLRILSTLLTEMNGIVGGGSQQHILVVAATNRPDMIDDALLRPGRFDKLIHVPAPDEKSRLALLKLHSQRMPFHENVFLQEIAARTDRYSGADLCNLCNEAAIEAFQRDFKATEIELQDFEKVLTKQKSSLTQSQIDGYYKFAYRFL

SEQ ID NO: 277 - DNA, 3082 bp, DROSOPHILA
tagctaaggagtgcttagatttcagtccgcttgcccggacatgcggatgtctttcactcaaaataatctctacaactgaaatgcacttttttcaccaccagccgagttcgtgccaccggaagagtgctcacatgtgacgcaccgagcgggtggaggaagccctgcccgcgtaggggtggctcgccaacgggctgggggtagttcagtgctcagttcggcgcgtgtgcgtccgctctctggcgtgcaggagcagctaccaggcgccaatgtaaacataaacagcgaaggaagcaacagccccaggccggcgttatataacccggattgacattacatactggcatgtaattgcccatgtcccctgctcacccctgcttctcgagaatgtcctccaattccaggcacttgacttcgatcttgcgcttgcggtcgtggtccaggatctccttgttcggcggccggttcagctgggcgtccagcttcttcgtgtcgtcctcggcgcggtagtccttgtccttcttcccgggccgcacacatgcccaattccgctgcacgtgcccattggtgccggagccacggggcgtggtcaggccaatgccgttgtacatgctggtctgcgatgtcctgcaaattcctcttaactatcaacgactcccggcggccactgggtgctccaccaacgctgcaattgcaccacacgaaaaatcgatttcagttgcagtgcaagtggtgttcgacttgtctggctttctcacctctgttatatgtcctgcggcgctgctatccaagcgctggctttactaggctgcctaacttttcagtagtttattcctttttgtcaaaatattcgactagatatgcgacaatatgccgccctcagtgtgaccagatgacaaatgtcgcctaaatgctccctagctgtcaattccacaatgaagctaacatgagtggatcctgttcaaagcaacgaagtggatgttatcagtgaagtgaaaatcggcgaaacgggcacactaatagctaaacgtaaacaacaatattacacttattttatcttaagaaatatatagatttattagtctaaaatcatgagcgatgcagaggaaacaaaagcagaagccaccaccaaagtgttgttcaaaaaagccggtcgaaaaaacctaaggcaacgcaagaattcagacgaagaagaaaaggaggaacagtaagccgtcaacaattagaaatgaattaaactaaagtgttcatttctatacagattaacgctagatgagattaaagaacgccagcgcctcaggcagcgacccaatggcgtcagccttgtgggactggcgctgggcaagaagatcgcgccagaagaggagctggccatcaaggatccctttaatgtgaagaccggtggtctggtcaacatgaagcagctgaaatcgggcaagatgaaggaggcggacgacgcctacgacgtgggcattggcacgcagttctcggcggagacgaataagcgggatgaggacgaggagatgatgaagtacatcgagcaggagctgcagaagcgcaagggaggcggcacggaggacgcagcagaggacgacggtgatgtaaacaagtacctgacccccgaggatgccgccctgtacgccctgcccgaccacctgaggcagtcttcctcgcacagatcggaggagatgttgtccaaccagatgctcaatggcattcctgaagtggacctgggcattgtggccaagatccgcaacatagaggccaccgaggaagccaagcagaagctgctgcaggacgccaagaacaagaaggacggaccctcgcaattcgtgcccaccaacatggcggtgaacttcatgcaacacaatcgatgtgagttcccaagtgtgaaacgtttccgcggatactaaacctttgttacttccagtcaacatcgaggacaacagcgatcaaaggaggcgcaagcgtgaggaaagggagggcaacaaatccgcacagcatcagacgaatcccaatggagtcaagcgagccacagatgactaccattatgataagtttaggaagcagttccgcagatactaaagatacgagtgccagcaataaaatgtacaattgtttaggttcaggattctgttttatttctatatatatttcaattaaatgtactttaagaattaactcattaatccattaatcgggccacttctgtaaaaataaaagcaaacacttggttagttatgcttcacaacgatgaacatatttgcttttatgcttgcaatcagtgagagacaaaattaatttcaaagcaacgaatgactgaggctcaatgagattcctactcaaaatatcatcacaataaagaagttgtcagtaactaaaacagatacacaccttataagaagttagtccagagaatcgggaaacaatggcgcaactgaaatgaattaaaaaagaattgttaaataaagcgctttaagagaagccattgttgtttgaaatgatttgatcagtgggagattaaaattgatttcatagctacaggtagctcaatgagattcctactcgaaatatcatcagagcagattacaattcaaactactccatccgaaatatacacaccttgaagaatttcatatccaaggatccagatacgagccagattgaaaactgaaacgaaataaagtcttgattagcttggtttggttgagttcagcttccttgagcataatgctatcagtggagataaaattgatttcatggttatttcaatgagattcctactcgtaatatcatcagctaagtgttatacattaaaattacaaaataaaactttaattacctcttcgtttagcaagttaagcttcccatttaaagacagcctgcgatagaaggtagtattagcaaattgaaagattgcttgttattaaaaactcaccaatttagagcgctaaaacctgaagtatccaatctgaaagagaaaactgaaagaaactcagaacccattgagcccacattgaaaacccacacttagtttttgagtggttttattaaacccagacaactttgaaacgttcatcctcgc

SEQ ID NO: 278 - DNA, 973 bp, DROSOPHILA
cgaaacgggcacactaatagctaaacgtaaacaacaatattacacttattttatcttaagaaatatatagatttattagtctaaaatcatgagcgatgcagaggaaacaaaagcagaagccaccaccaaagtgttgttcaaaaaagccggtcgaaaaaacctaaggcaacgcaagaattcagacgaagaagaaaaggaggaacaattaacgctagatgagattaaagaacgccagcgcctcaggcagcgacccaatggcgtcagccttgtgggactggcgctgggcaagaagatcgcgccagaagaggagctggccatcaaggatccctttaatgtgaagaccggtggtctggtcaacatgaagcagctgaaatcgggcaagatgaaggaggcggacgacgcctacgacgtgggcattggcacgcagttctcggcggagacgaataagcgggatgaggacgaggagatgatgaagtacatcgagcaggagctgcagaagcgcaagggaggcggcacggaggacgcagcagaggacgacggtgatgtaaacaagtacctgacccccgaggatgccgccctgtacgccctgcccgaccacctgaggcagtcttcctcgcacagatcggaggagatgttgtccaaccagatgctcaatggcattcctgaagtggacctgggcattgtggccaagatccgcaacatagaggccaccgaggaagccaagcagaagctgctgcaggacgccaagaacaagaaggacggaccctcgcaattcgtgcccaccaacatggcggtgaacttcatgcaacacaatcgattcaacatcgaggacaacagcgatcaaaggaggcgcaagcgtgaggaaagggagggcaacaaatccgcacagcatcagacgaatcccaatggagtcaagcgagccacagatgactaccattatgataagtttaggaagcagttccgcagatactaa

SEQ ID NO: 279 - protein, 294 aa, DROSOPHILA
MSDAEETKAEATTKVLFKKAGRKNLRQRKNSDEEEKEEQLTLDEIKERQRLRQRPNGVSLVGLALGKKIAPEEELAIKDPFNVKTGGLVNMKQLKSGKMKEADDAYDVGIGTQFSAETNKRDEDEEMMKYIEQELQKRKGGGTEDAAEDDGDVNKYLTPEDAALYALPDHLRQSSSHRSEEMLSNQMLNGIPEVDLGIVAKIRNIEATEEAKQKLLQDAKNKKDGPSQFVPTNMAVNFMQHNRFNIEDNSDQRRRKREEREGNKSAQHQTNPNGVKRATDDYHYDKFRKQFRRY

SEQ ID NO: 280 - DNA, 3726 bp, DROSOPHILA
attgattcttaatttcgcattcagctcgcttgtaagctagtaatttgcgtgcaagaactccatttcccttgtttttccatatactttccttttgaccagctcgaaaatcgattcaaatcagtggggtatttttgtctgtcaacgacaaaaaccttcaatcaaattggagtatgccaaaaatccgagccatgcgtcgggcaattcaattacaaagcccagcaggagatgtacatacgaagggatatgtccctttccacctcctgccgcccaaaactttgcactcctccattcaactggcatgtcaatgaccaggtaggactcatcgctcacctggcgacatgtcaatggggctgggaaatggggcggcaacaaagttccgaagataaagctcttgccatgaatatgcagctgatgtgcacttgcgcccggggaaggcagttcccttttccatccagtttaccaccctttccgcccgcttttcactgctttccaccgctttccaccgatttagccttaagctgctactgctgctactcactttcctcacagacgacagtcttttgcactcgcccatgcattttttccatcgaacaaaaacattgaaaagcgagtcatagatttccgtttgtgcgcctcggaaacaatggcatttcatgttgcacgtaaaacgagccaaataaacccgcggataagcgggaaggggaggagtcggggtagggaccggggtcggagagatagcactggcacaatataacttaagtgcaattccatttttaccgatattcctgccactggcgccttttaagtgaagtgaaccaaacacaaatcacacaaatcgcagcgataatagcaaaggaacgcaaagtgccccaggatattatgctagatagtagaaatagaaccagctgatcgatgattgggcatttccggcagagattgggcaggtgacctttgtccagggctagctagtataaatagcccgagaaaattctaaattggcacagttcaactgaaaccctcatcatggtaagtcaaacgagagagcgagtccttgggtagtacaattgttaagtattggccttccaatttctccaccagcattctctacgactcctggttcttcttggtgttctgatggccactcagggcagagttctagaacaggacaaggctccggaggttgtcgcttcacctcaagaaatcaaacccaacgtggaggtcaagcaggaagttgccaataaagtgcgggaaacccagccgcagctgggtggcgctgtcatctcccaaggccaatcttctgcagctatcgatcaggttggtgtgaaggagggtcaagatcaggtggcgaactccacaactcctgatgtccaggaaagccaacgcgaaggggtttctttcgtcgaagtgactaaagaaaaccaggaagcacatgccccactgagtaaggtcgtcagtagcccattagccccagcgatagccgaggaaaagcagcccacttccaatgagatacccaaggaccaggagccaggcaaagaagttataacccagaaccatcccgacgtccaaggacgcgacaataagattcagtttgtgtacgagcagcctggtcaaaaccaaaaccagattccacagataagcattcaggatctggagaagatcttcaagtatcagggagtgcaagtggtcaacggatctcaatcatttaaccagtatccgagcatctacaacaagttcccatcttacccgaaggtggaatacgtttctgtggtaaacacatcggatgccaatgtgacccagcatctccacaaccacacgcactattatcccaaccagaagaagcccggatttccctttcccttcctgcccaatcccttcgagaaactggaacccgtttatgttaatcttaatcaaactacgaactccacgggcaacgtgacttaccacacccacatccacgaggaaatcaagccgttccccttcctgcccaatcccttcacggacttccccaaggtagtgggcctcagcttggtgctcctcccgaatccattctatgtgaacaagaaccaggacattaaccagtctcaggtcgtgagcctgcctgctggataccaggacaacggggagtaccagtactttggaaagttccgtgctctttccgaggaaacccagaagcagcagcagaagcagcaatcgcagcagcagccggctcagaagcccaatttctacctgattcccaatcctctggccagtcaggcatccggtgatggtaaaaaggtagatgccaatgtcctgcttccaataaatctggctgctctcccacttctggttccggctccagagctgacccagggtaaagcttcgccctcgggcagcatcagtttccaggatctgattaaggccaccaatgtccatgtgagccagcccatcaagctgcaggccaacaatggcctcactcaagtgcagaaggagcaggctgccatccaacagttgatcctcagtcatcttagcgagcagcagaagctgttccaaaagcaatccgttgcggacggaaagcgctcccaatccgcacagcccattgtccaactgcaggaggaggaggagagctccgttctgtttgccgtggagattccgaagcccatctatcgcttcttcaagggcatctttggcggtttctccaactgagaggctaactaaagtgatcaataccgaaagaacaacaaagaaacgaggtggaaactaaggcatatccttgtagttattcattagaaatacaaataaagttaagtgcaaacccaactagaagttttttgatattgcatggcatactatatactatacttttgaaagtgcccattttcaaacgaagctaaagcacaaaattctaaccaaaatgaattttaccaactcccaactagctggatccccagagtcttgttactcccacacattaacagactttcccagctcaattcaaagaaactcgtgcaaacatgataaatgtgtgtatttaggaatcattacccgactttccacccatggagacggatgacgcaggagggaggaaggtcgctcacattcgtcattccacattgggttatcaagccgagatggatataatcaaactgtgagaacagactccccagcacacacagaagcggaggccattatgctgaatatattccagtgaaatgcattcatgactgctcaccttttgccaacccttcggctgcaggagtcgaaggatgcccaggatgcagatgctcagcacagacattcgtacccgggcacatgctgccttctgccgtttgccattttaatgaatacataattagtctttttgccaagctctcccaatccaccgcccactcatacaccacccactcatccacctccgccttctactcttggcttcttttgctgatgccactgcagcacctgttcaaatcatttctcatttgagtttaatgtccatgcagcaacacgttccttttcgaccctcgacttagaggtacacttaaaccaaaagttagagaagtgctgaaacaatataattggaatgtatcagccgtaatgagagtgactttccccttcaggagatttctctcagtgcagcctgcacgtgcagctgattggttcatttcatactttcatgcaatatggagataatgtttgctcctgtccaggtcctcgctcaaagcgagcgagagagcagataatggggaacag

SEQ ID NO: 281 - DNA, 1561 bp, DROSOPHILA
acagttcaactgaaaccctcatcatgcattctctacgactcctggttcttcttggtgttctgatggccactcagggcagagttctagaacaggacaaggctccggaggttgtcgcttcacctcaagaaatcaaacccaacgtggaggtcaagcaggaagttgccaataaagtgcgggaaacccagccgcagctgggtggcgctgtcatctcccaaggccaatcttctgcagctatcgatcaggttggtgtgaaggagggtcaagatcaggtggcgaactccacaactcctgatgtccaggaaagccaacgcgaaggggtttctttcgtcgaagtgactaaagaaaaccaggaagcacatgccccactgagtaaggtcgtcagtagcccattagccccagcgatagccgaggaaaagcagcccacttccaatgagatacccaaggaccaggagccaggcaaagaagttataacccagaaccatcccgacgtccaaggacgcgacaataagattcagtttgtgtacgagcagcctggtcaaaaccaaaaccagattccacagataagcattcaggatctggagaagatcttcaagtatcagggagtgcaagtggtcaacggatctcaatcatttaaccagtatccgagcatctacaacaagttcccatcttacccgaaggtggaatacgtttctgtggtaaacacatcggatgccaatgtgacccagcatctccacaaccacacgcactattatcccaaccagaagaagcccggatttccctttcccttcctgcccaatcccttcgagaaactggaacccgtttatgttaatcttaatcaaactacgaactccacgggcaacgtgacttaccacacccacatccacgaggaaatcaagccgttccccttcctgcccaatcccttcacggacttccccaaggtagtgggcctcagcttggtgctcctcccgaatccattctatgtgaacaagaaccaggacattaaccagtctcagcagaagcagcaatcgcagcagcagccggctcagaagcccaatttctacctgattcccaatcctctggccagtcaggcatccggtgatggtaaaaaggtagatgccaatgtcctgcttccaataaatctggctgctctcccacttctggttccggctccagagctgacccagggtaaagcttcgccctcgggcagcatcagtttccaggatctgattaaggccaccaatgtccatgtgagccagcccatcaagctgcaggccaacaatggcctcactcaagtgcagaaggagcaggctgccatccaacagttgatcctcagtcatcttagcgagcagcagaagctgttccaaaagcaatccgttgcggacggaaagcgctcccaatccgcacagcccattgtccaactgcaggaggaggaggagagctccgttctgtttgccgtggagattccgaagcccatctatcgcttcttcaagggcatctttggcggtttctccaactgagaggctaactaaagtgatcaataccgaaagaacaacaaagaaac

SEQ ID NO: 282 - protein, 484 aa, DROSOPHILA
MATQGRVLEQDKAPEVVASPQEIKPNVEVKQEVANKVRETQPQLGGAVISQGQSSAAIDQVGVKEGQDQVANSTTPDVQESQREGVSFVEVTKENQEAHAPLSKVVSSPLAPAIAEEKQPTSNEIPKDQEPGKEVITQNHPDVQGRDNKIQFVYEQPGQNQNQIPQISIQDLEKIFKYQGVQVVNGSQSFNQYPSIYNKFPSYPKVEYVSVVNTSDANVTQHLHNHTHYYPNQKKPGFPFPFLPNPFEKLEPVYVNLNQTTNSTGNVTYHTHIHEEIKPFPFLPNPFTDFPKVVGLSLVLLPNPFYVNKNQDINQSQQKQQSQQQPAQKPNFYLIPNPLASQASGDGKKVDANVLLPINLAALPLLVPAPELTQGKASPSGSISFQDLIKATNVHVSQPIKLQANNGLTQVQKEQAAIQQLILSHLSEQQKLFQKQSVADGKRSQSAQPIVQLQEEEESSVLFAVEIPKPIYRFFKGIFGGFSN

SEQ ID NO: 283 - DNA, 6158 bp, DROSOPHILA
tgagtaccgatactttgataaaggctaaggactccagccaaatatttatggatctgaagaacctgttgttatggcgcaatagccgaaagactttgatcgtcttcacgggcatcctgctcctcctgctggatgtgatggtccactcggtgatcagtgtgataagcatggtagggatcacagttctcatagcagctattggccatcgccttttggtacagttctggagtatctggaagaaggatgagaacaaagatcagatcttacgtttctatcctcacccgaagatagaaatcccccgggaggagactctttatctggccgggaaagcagtttcccatattaatttaattttaaaccgtatgatagaattgttgctggtggaaaagtgggaggattccttgaagttcctagttttgctctgcggcatcaatttgctgggcgattgcttcaacggattgactttgcttatatttggtatgtgcatatgttgtcttactttactttatctataaagttacattaaattgaaataatttttctttataggacacttgtttatttttaccgtaccaaaactgtacgagtcgtataagccattcgttgatgtccagatccgaaagttccgtaaatgcaagatagataaatcgaacgttgaaaaaccgatttgtattcagaaagagtgtccgccggagtcagcatacgagggtcaggaatccaaagagggcaaagtactatatgagccatgcgataatgagccacttcgaaatctcctagagctccacaaaggatgtcgttgtcctgattgcgagcaccggtatttgccagttgaggctcgctaaactatattcatatgaataagaatccaccctctttgatgttattgttcaaaattaatgttgtggaaatatatattctacatattttccactcatatactttttcttttctaatcagttggccataattttaacatcattacttaacttttctgatttataaggggttttcgggaacacctttttgtttggatcgagtgtactttattatttgggtcaaaaatagtatttgactatgacatgtggaaactctgtcagccgagaagtcgaagtcggatcaaatgtttcagattcctaatcctgcgttgttgtcccggattcaagagattctcgtgccaatcagcaggtgatgcagactccaaagtcgtcaagctatcagtagggagtgtcaagggtcgtcgactgagcggtatctatggtgacgagttctacagcttcgagggaattccctttgccaagccgccgctagggaaagcccgatttgtggcctcccaattggcagacccatggaattcagagctcgatgctcggcaggagagaccgattcctctgcagatggacagaaggtcgggaaaggtcgttggcagtgaggattgcctgtacttaaacgtatacaccaagcatgtaagtatttcttcacaacccaaaaatttggctaagcatttattaacggggcaggccatcgtatacaaacttggcctgctcaatttaaaattctgtaagagaattattgagatttcgggtaacacagactaaaaaagggaaactccagcctgttcgaatagttgatcatagaacactagtttaggcatggtatgcggcataaacttaagttcctcggcgatgttgaggaccataggagaaggtcccgagcttaatggcttccaatctacaaaaggttagcggtaagcggtgagttgggatccgaggtggcggcaaagtgcacaaacatggataccattcgacaaatcgtggtgaactctggtcgggatttgtccaatttaaaagtggccggcatgacaaatatgtagcccagctcgtccgtgtatttaactccgcgatgctccattccccagttctgaatccggaagaagttatagtccggattgaatcattcggtacagctcgtgaaaggtatggtgggtgaagatatcttttacagcatcgaaatgatcgaagctcagttgttcaccactcgcctggcaaaaatactccagaattttgagacccatttcacgcttttgggcggagtcacaggtggtcttaaggacatgcggtagtgccctctctgggttatcctggaatccctgtaagaccttgggatcggatttaaaaccaactgtactgagtagcccctcatcggtattagtgcccaaaatgatgggaatgcggttgctccaactgttccgcagcaattctttgggctccgccaatataacagcattgggactattgtgggcttaaaggacaaatttaacgccttcagccttctcctctgggctaaaaacgtcagcagaaacgagcagttttggatcagccttcagtaggaactcaaaaacctggctatcgatattatttccctcgtagcccaaactcttcgccaaacggtactccaattgcggctgaaaaacccgccaaaaggatggccttatggaagagcccttccgtttgcggactagccaagagcatattaaccaacgcgctgccggagctgtggccaaagatggtgattctatcggggacaccattaaaattaagtgcattcgccttaatccaacgaagggccataataatatccttgaggccagcatttccgggaacatctagcgagggatcagcaaagttgagaaatcctgaaatgtaagattcaatgatgcatgttacattggtaaagcaacaatatctaaaactgaagagcatagctacaaatcttgtagttttaggtttaaatgtaatttgggaccgaatatttaaaaccaactcaccgaaaagtcccaagcgatgtccaatgcttacgtgaaggacattttcttccataaaatagtccggtccccaagctcttctcgatgaatctccgcgaagaaatgccccaccatggatgtaaaccatgatgggtaagggtttctcgctttgcagctgtaaaataaataaataaaatgtttgggaaaaacattatttttagtaatataactaaatatatttatggtatttaaaaacttaccgttttcactgacatatttaagtatagacaatcctcggaaccctcaatcaattttgttaaggagatcacttttacgcacttgctagctggctgtgagcaatctcgggtccctttccatggttgaatatcttgtggctccttgaagcgaagggttccaagtggcggagcagcatagcatatatgggatgccatcaaaaacatagaattcattgtcatagagccccttcaaaagtgttccctgcacttttccatgtgtggtctgcaccacgggggaagttccactactgcaaataatataggatttaactaaagttaaaaaagaaagaaaaaatgtttttacctttcaaaagacatatccgatctcgagtaactctcagctttgactgtgtatacgaaacactggctagatagtacctacttatctatctaataactaacttagcttttatggtagcagttagcatccacatatagtagggaagatagtatgcaaaccctgatttaatcttataggcagtatataactgtgaggggttaatgagattatacacagtgtgtgtaaatttacataataaaattcagaaaaatatattcctgagctattgtagatgccagttttgagcatatttccttattcttagaatcataaatgcttcttttaataattttaaaccatgttaccctagtttaacgaatctgagccacctctgcccgtaatggtgtatatctacggcggtgcctttcgcacaggcggagctgtgaagagcaaatacgggccggattacttgatgagcagggatgttgtatatgtgctattcaactatcgcctctgctccctgggattccttagtatgcccagtggcaagttggatgtgccgggcaatgcgggtctccatgatcagttactagcccttcaatgggttagccagcacatacggaacttcaacggagatccgcagaatataacgctttttggcgaaagtgcgggggccgcctcggtgcactttatgatgtgtctgccgcaggcgaagggtctcttccacaaggccatcatgatgtccggatcgatgctgagtccctgggtgaatgctcccgatagcgatggtatattctgccgcctggccacgtctgcaggatacgaaggacccgcggaagaggtccccattttggagtttctgcgcaacgtgaatgccgaaaaactcatcggccacgatttcatctcaccccgtgaccgttgctttgggtttcttaacccatttgctccagttgttggaggcctggttgcagccccgtttcagcagctgatgaaggaggcgtggtcctgtgaagtgcccctcctcttgggtggcacttccttcgagggactggtgtactacccattctgtcagctggataatggctatatgctggagctgctgaaacatgaaccagcgatggtattaccccacgagctatatcagtcgatgagcgtcgaggagcggaacacagcggccgatgtcctcgttaagtatcactatggaccgcgcggtatcaccaagagtaacatcacacagattctagatgtgagtaacttagttcatttttcaaggcaaccattacatggtagcttcaattattttattataaaaaggtaattgacatatttgatctacagcttttcagttacaagttattctggcacggcatacatagggtggtcctctccagattatctcacgcacaagcacctacctatctgtaccggttcgacttcgattcgcccaagttgaatctgatgaggaaccagctctgcggcgatgacatcaaacgcggtgtttgtcatgcggatgacttggggtacattttccacaagcaggcccaagcgaagcagccccttgactccccggagttcctgaccatccagcgtatggtgggcatattgaccacgtttgccaggaccggcgatcccaattgtccggagacgggtccggatccgtggatgcccgtctccacaaagtctcccttcaaggcattgaatattggacagcaggtggagtgtgtaacgcaggtcgaaaaggacggtctgaaggtgtggaatcggctatatagtgacttaaaatagttgggggttatatgaagtctattttgctataatttttgtaaatattcaataaacgatactgtttagaggaatgatcatgatcaatgtattttctccgattacaccgcaattgtgcccactgtgctcagctttttcggagctttacggcaacgccccactccagtcgaaagatcggtgatcgtgtaaacaaaaataaatcgcgtcaatttgtttgtttacactagttttgccggcacgatcaaaatgttgttgaccccctcggtgggcggcccgcctctttttcccttgattttctggcaagaagccttagaatagtcacttttataggctaagtttacgatagatcagctgagatcgcggcgtagttgcttatggtagaagcataaagtttatgacacctggtttcctaataactgagatacttatctatctcgcagatacttcactagaaacttcacgcaaccaggtagtgtttaaggaagctgtgattttatgcatgctacgtttaaaagagagattttttttcgcagtgttgattagttatgcattcgctaggaggaactgccacgcccactggccaagcttccagccgactgcccacgctcgatgatcggatccagtcatatcagttattccgtttatctcgtcaccgtacttgaaatacacaatttgttgtattctgtcttctttttttgtgtgtttcttctctctctaccgctctccacgctcttcttgttcagtaatttgtattctgatatttgtgttaatgtagtatattttttttctataatattttctttacttgtttttgcctattttgtgggctcttttcgctggccgctcgccgctggaattcgatgtgaaaaagtgtgtttttaatttcagtttcggttcggagctggcgcgatacagtacgcagctcgcgcctattagtatctacgtatagcaagcaaatcgatcggatcgtgtggcggtgctctagtcaatccgatatgaataa

SEQ ID NO: 284 - DNA, 1783 bp, DROSOPHILA
gggttttcgggaacacctttttgtttggatcgagtgtactttattatttgggtcaaaaatagtatttgactatgacatgtggaaactctgtcagccgagaagtcgaagtcggatcaaatgtttcagattcctaatcctgcgttgttgtcccggattcaagagattctcgtgccaatcagcaggtgatgcagactccaaagtcgtcaagctatcagtagggagtgtcaagggtcgtcgactgagcggtatctatggtgacgagttctacagcttcgagggaattccctttgccaagccgccgctagggaaagcccgatttgtggcctcccaattggcagacccatggaattcagagctcgatgctcggcaggagagaccgattcctctgcagatggacagaaggtcgggaaaggtcgttggcagtgaggattgcctgtacttaaacgtatacaccaagcattttaacgaatctgagccacctctgcccgtaatggtgtatatctacggcggtgcctttcgcacaggcggagctgtgaagagcaaatacgggccggattacttgatgagcagggatgttgtatatgtgctattcaactatcgcctctgctccctgggattccttagtatgcccagtggcaagttggatgtgccgggcaatgcgggtctccatgatcagttactagcccttcaatgggttagccagcacatacggaacttcaacggagatccgcagaatataacgctttttggcgaaagtgcgggggccgcctcggtgcactttatgatgtgtctgccgcaggcgaagggtctcttccacaaggccatcatgatgtccggatcgatgctgagtccctgggtgaatgctcccgatagcgatggtatattctgccgcctggccacgtctgcaggatacgaaggacccgcggaagaggtccccattttggagtttctgcgcaacgtgaatgccgaaaaactcatcggccacgatttcatctcaccccgtgaccgttgctttgggtttcttaacccatttgctccagttgttggaggcctggttgcagccccgtttcagcagctgatgaaggaggcgtggtcctgtgaagtgcccctcctcttgggtggcacttccttcgagggactggtgtactacccattctgtcagctggataatggctatatgctggagctgctgaaacatgaaccagcgatggtattaccccacgagctatatcagtcgatgagcgtcgaggagcggaacacagcggccgatgtcctcgttaagtatcactatggaccgcgcggtatcaccaagagtaacatcacacagattctagatcttttcagttacaagttattctggcacggcatacatagggtggtcctctccagattatctcacgcacaagcacctacctatctgtaccggttcgacttcgattcgcccaagttgaatctgatgaggaaccagctctgcggcgatgacatcaaacgcggtgtttgtcatgcggatgacttggggtacattttccacaagcaggcccaagcgaagcagccccttgactccccggagttcctgaccatccagcgtatggtgggcatattgaccacgtttgccaggaccggcgatcccaattgtccggagacgggtccggatccgtggatgcccgtctccacaaagtctcccttcaaggcattgaatattggacagcaggtggagtgtgtaacgcaggtcgaaaaggacggtctgaaggtgtggaatcggctatatagtgacttaaaatag

SEQ ID NO: 285 - protein, 568 aa, DROSOPHILA
MWKLCQPRSRSRIKCFRFLILRCCPGFKRFSCQSAGDADSKVVKLSVGSVKGRRLSGIYGDEFYSFEGIPFAKPPLGKARFVASQLADPWNSELDARQERPIPLQMDRRSGKVVGSEDCLYLNVYTKHFNESEPPLPVMVYIYGGAFRTGGAVKSKYGPDYLMSRDVVYVLFNYRLCSLGFLSMPSGKLDVPGNAGLHDQLLALQWVSQHIRNFNGDPQNITLFGESAGAASVHFMMCLPQAKGLFHKAIMMSGSMLSPWVNAPDSDGIFCRLATSAGYEGPAEEVPILEFLRNVNAEKLIGHDFISPRDRCFGFLNPFAPVVGGLVAAPFQQLMKEAWSCEVPLLLGGTSFEGLVYYPFCQLDNGYMLELLKHEPAMVLPHELYQSMSVEERNTAADVLVKYHYGPRGITKSNITQILDLFSYKLFWHGIHRVVLSRLSHAQAPTYLYRFDFDSPKLNLMRNQLCGDDIKRGVCHADDLGYIFHKQAQAKQPLDSPEFLTIQRMVGILTTFARTGDPNCPETGPDPWMPVSTKSPFKALNIGQQVECVTQVEKDGLKVWNRLYSDLK

SEQ ID NO: 286 - DNA, 4473 bp, DROSOPHILA
gtttcttctttggaaaattaatgtcaacgccctgaaatctgcgcaaataacttttgcattaagaagagatgactgcccacaaagtaattgcataaagtaccttggcttgcacctcgatcccagactaacgtgaaaaaacacataaaagcaaagcgccagcaactaaatctaaaaagtttgaagatgacctggttgctggttgccgaaaatctgcaaccactctggaaaataaagtccgtttatacaaagccatactaaacttataccagcaattcaaatatttagattctacaacgctaccaatcaaaaatattaagacaaattgttgatgctcaatttttatttcaaatgcaagtatccataaagacttaggaatcccttatgttaaagaagaaatagcaaaacatattaaaaaatatatagacagactaagaacacatgaaaataacttagccttaagtttggtaaaacgtaataacaacgtcagaagacttaaaagattttacgtgctagacctccctgacaggttttaagtattaaaacatgttatgcctagagtatgtagtagggattaatggataactactgcctctgttaatataagattaattataaaatgtacttattgtcatacttttttaagacagattgtaaataaaaagagagaaaaaaaaaacttagatgggaggtaatcattccaaataattttccaagatcatagtcattttaatcacaacatttaatcacaacattattataatcacatatttattatggttctaaacattttcaaaagtggatatttcccatattattaggatatttcgtgaatatgaattataataatttttaatgttatgttatattttatgtttatataatttccgtatttaccctatttcgccgtttcattttcgttgacaactcgttgtcgtcgttatcttgacgcacaccgttattcaacacttttttcctctgaaccaatatggcgattgtgtagatctgtgtgcgtcgtttttgcaaagttttgtgaaattccacgcgctcctccttaaaaaaaaaacgctttaaacacattcttcagtagcaagcagagacccaatctttcccttgactttaaacgatctccaagtagtcaatacagcacgcaataagcaagatggtggacaaaattgaaatgagcctcgacgacatcattaagtccacacgctcgcaaaaaaagccgcaagccgcccgcggcggaccaggtggcgcccgaaaaacgggcggacagcagcgttttgctggtggagcccgccgcggcggagccaatgccggcggctcgcccaggaagccaggaagcgtgctcaagggcccgcgaggaggagtggccgccggagccgttcagaaggccaagttcccacgggtaattcattgcgtttcaatggccaaacggagcagccggagcagaccatccccgtgctcagttcaccaggacagagcactaccaaagcaagtgtcttgcggcccatgatccgcacaacagtgcttggaagcgaaaaacagactcagaatctaaaccaaaatcaaaatggccaccatgcgccttccaacggacggaacaactcttcgagcccgagcagagcctcaagttcaagttcctttaaccccgtttttacagaataccaaacagacgacacctgtgtcttaacttatttttcctcacgtctcacgcctcacgttttccacgtgaaccatacccagttaacaagcatttctagtgtctccgctcaatatggctgtcctctcttgtggctaggatacgatgcaactgctactgcaacggctactcccgccacatacatatagttgatacgcgcagcgttcgaagacatacccatctaccttctacctaatactacccccacctctagggcgatgtgaacagcgcttggaagcacgatatgtacgacggaccgaagaggggtgccgtcggtggaggatctggacccacccgcctcatcgtcggtaacctggactacggcgtatccaacacggacatcaaggagctcttcaacgactttggtccgataaagaaggcggcagtgcactacgatcgctccggtcgctcgttgggtaagtgctagtactactccagctacctgtcgttaggtgaaacatttcggtacatgctgttcataaaatggcggcagaatggttcagtaacagacattccaagtaatataaatcggcttgaattgataacagatcagatcatccgatgaagctgcggtttttatttagtattttgatttatgccgaaatttaaagctattgccatgtatttgatttattcacttttctttgcaggcaccgctgacgtgattttcgaacgtcgcgccgacgccttgaaggccattaaacagtaccatggcgtacctttggacggacgccctatgaccattcagctggccgtctcagacgtggccgtgttgacccgtcccgtagccgccaccgatgtcaagcgtcgcgtgggtggtactgcaccaacttcattcaagcgtggtggtgcgtatccaaaatgctacagcagggaccgtgaatgatgcccattttcgtttatttttaccacaaacatcgttcatttaaaactatttcagatcaattttggatctatccccattcccacaaagatttttaaatgcctatttatttcgattacctagtatgtcttaggtttcaaattttgttacttgactttttatacgaaatactttcctttctttgttatgttttcttgtcaacagcttttgtaattattcaaacttttgtttcgatttaatacgatgtttgttgggtaaactacgttactaggtcagttccacatatgaaagcttacctttctataatgaccatgatacggtcccatgacgatccatccttgctccaatgcttacactatcattccgaactgttttttaggtggccaagctggtggcacggcgcgtcgcggcttcaaacgtccggtcggtggcaagccggcggcaggcggccagcgacgggagcgcaaggccccgcccactgctgaggagctggacgccgaactggactcatacatcaacgacatgaagatctaaatagtgaatagtctgaattagtctaacaagaatagaagagcagcccaatctatagttttaagcctaccatatggacaccccccgcatggtacataaatgcaaacgcatcgacaacgccgcgcccaggagcagatctttgaaagcatcggacatcaaatcaatcaaccacttgcgcatttatccattaattgttagttttgccaatgcggcggatgttaagataactgaaatacatttgatgctgtatttattgtatttagaaatgcgctttatcaagttcgacgataaattgatggaccttgtcaaattaaactgaattgtaataaatactagaattaatttcgtgaccaaatcgaattgtatttactgactcaataggctaggagtattgtttaattactaggcggcggcggactccgaagaatctccatcaacttgcaaaaataaaagagccatcacttacaattaaatgttttatttggagtaatacatcgatggttatattggtattcgtttggacgaattttacagactataagaagattcgattggacactttaagtacaaatgctaaattaggcttagtaggtggtagattttagcaaagtcaatccatatcatccgtatttgtggggcggaatcacgagttacttaatttcaacaatttcgttagacattttaaacctgttacttagacaatagaacaaatgtgggacatgaaaatgaaagggcgaaaggaagaacgacttggagtgctgcttggcaaaatataatcagtttcccttcttcttcggctgatcagcaggttaatataggtaatgcgcctctaaatataggtgtatacgtatgttataagcgagttatgtatatttatagttttatgattcttatgtcggtctgaggatgtgatggtgagtcattaaatgcttggcagctgcttctgctcccgggcacacttccttccctccttcctccctctaccagaatccgcccgacgagaatccgccgggtggaactcggccgcgtgcctctccatttgtggccgctggtttgttcgccggctccttgggctggctgggtggggcggacttggcctcctccttctggatggagacctcttcgcgaattttctccaccaccttgttgggatccgtggagcccatgcaggcattgaggtttgaggagttctgttggttgtacttggcacgcggggcgggaacggccacgtcgggctccgagaagatattggtgtgtccgccgcctgggggcttcagcactcggctggagggacgggcactggtggtcaggccgattttcagctcggtggatgtcattttgtcgctgctggttgtggttt

SEQ ID NO: 287 - DNA, 1317 bp, DROSOPHILA
atctgtgtgcgtcgtttttgcaaagttttgtgaaattccacgcgctcctccttaaaaaaaaaacgctttaaacacattcttcagtagcaagcagagacccaatctttcccttgactttaaacgatctccaagtagtcaatacagcacgcaataagcaagatggtggacaaaattgaaatgagcctcgacgacatcattaagtccacacgctcgcaaaaaaagccgcaagccgcccgcggcggaccaggtggcgcccgaaaaacgggcggacagcagcgttttgctggtggagcccgccgcggcggagccaatgccggcggctcgcccaggaagccaggaagcgtgctcaagggcccgcgaggaggagtggccgccggagccgttcagaaggccaagttcccacggggcgatgtgaacagcgcttggaagcacgatatgtacgacggaccgaagaggggtgccgtcggtggaggatctggacccacccgcctcatcgtcggtaacctggactacggcgtatccaacacggacatcaaggagctcttcaacgactttggtccgataaagaaggcggcagtgcactacgatcgctccggtcgctcgttgggcaccgctgacgtgattttcgaacgtcgcgccgacgccttgaaggccattaaacagtaccatggcgtacctttggacggacgccctatgaccattcagctggccgtctcagacgtggccgtgttgacccgtcccgtagccgccaccgatgtcaagcgtcgcgtgggtggtactgcaccaacttcattcaagcgtggtggtggccaagctggtggcacggcgcgtcgcggcttcaaacgtccggtcggtggcaagccggcggcaggcggccagcgacgggagcgcaaggccccgcccactgctgaggagctggacgccgaactggactcatacatcaacgacatgaagatctaaatagtgaatagtctgaattagtctaacaagaatagaagagcagcccaatctatagttttaagcctaccatatggacaccccccgcatggtacataaatgcaaacgcatcgacaacgccgcgcccaggagcagatctttgaaagcatcggacatcaaatcaatcaaccacttgcgcatttatccattaattgttagttttgccaatgcggcggatgttaagataactgaaatacatttgatgctgtatttattgtatttagaaatgcgctttatcaagttcgacgataaattgatggaccttgtcaaattaaactgaattgtaataaatactagaattaatttcgtgaccaaatcgaa

SEQ ID NO: 288 - protein, 266 aa, DROSOPHILA
MVDKIEMSLDDIIKSTRSQKKPQAARGGPGGARKTGGQQRFAGGARRGGANAGGSPRKPGSVLKGPRGGVAAGAVQKAKFPRGDVNSAWKHDMYDGPKRGAVGGGSGPTRLIVGNLDYGVSNTDIKELFNDFGPIKKAAVHYDRSGRSLGTADVIFERRADALKAIKQYHGVPLDGRPMTIQLAVSDVAVLTRPVAATDVKRRVGGTAPTSFKRGGGQAGGTARRGFKRPVGGKPAAGGQRRERKAPPTAEELDAELDSYINDMKI

SEQ ID NO: 289 - DNA, 4054 bp, DROSOPHILA
tcccggttcgcctagtttggcgccgtgaaatttaccggctaggaactcaaagggacccaccaactgcagttgaaatactttgtctaggtgctccaagccagcatccttgggcttcgcaggatcaatttttaagcttcccacaaacttccaaaattcgtagaagtccggcggcatttcgacaaggaacttgtgtcgaatgaactcgttggactcgcagagattgtcgtactccttctgcacggacaggcggatgcgcttctccaagatctccatgtagttctttccggatatgttgctcatggcctctttgtgaagctcctcggtttcggcttcataactgcccttggctgtatccttgttcaccatctccgtacttgaagcactcgtattggacttatccttgttcaccggctccgtttgttcttcctttttctgttcaccagactgcgaggatgcacttctttttggcgccacttttttgccttctgcgccgtccacttcgtgttcttgttgctttttcggatgattgtatttggacaaatgtgcgggattctgctgatagcacttatcccagtatttgcaatcttcttttggcattcttaagtaacaacaataccgatttcaaacaaatttgcaaaatgtgaggtttgctatggcacaattaacaagaataacaagcatccagtgacgccgttaaaagttgcaaggggatgattctgacccatttgagaaaaatactttaccatgacagctgggtaatagaaaatactacactatatactacagcccagacatttccccttggtgaaaagctaataaacttttcataaacttgtatacttttattggacacttaaattcaattttagtcatttttttagatctacgcccatgttgacttccctggataagaagaagcactctgcacacacccccaaaagtgttgtaaaataccgccggaaatcaccagtgactggcaaaaactgcactgaattgcatggagatttaatggggggattcatttaataattgtagttcattcaatgaatacaaacttcacgaagagaatcgaaatgttgatggttaggggttagtacaattacagttgcgtgtggataggcgcttcaagggggaaacactattctaagcacctatggaacaggattaatcctcgacagcacacatgacggagtagacgcactcttccttgttaatcaagtggcaggtcttgttgaccagggacatcagctggttgacgtcggtggcccagttgttcaggatgtcggaggcgctctttttttgggtgaagtaaatgatgccggcgggacggtcgatctttacgcggatggtgtcggtgttggccagtttagaaagatactcctcgcagcggctggtgggcaggttcagcagctcactcatgcgcgccaaatgcaggcgggagtaatacatggcaatgatgcgaatgttctatgaaataaccagtagcaattagttattattagtattgatttaaatcaaaaaaaacctacatgctctatcagacgatccttaagctcggtgatacatttcttgccatgcttggtgctatccttgaacatctcgttttcagccaacacgagcccaaagtctgcattaaatgtgtcgaagttgatcagctcctttgacatgaacaagcgcagaatttcccttttaaatcgaaaataaaataacatgctcgaaatgtacttcaaatcaaatgtacttacttataggcgggcacttcctccagcttcttgttcttcgaaagatgtgccatcatgtcgctctgttcgttgtcgaagggagctaaaacgcaataaagcacggcacaaaccagcttttccgtcagttccttcttctgctcctcggtaagttcaatttcgacctcagcctctgtagcaacctctggcttcttatccttgtcatcttcctccttctttttcttatcgtcatccttctttttttgctcatccgtggacgcggcagagtctacgggtgtaaggccagtcttcttgcgcggaggctccgctatggcctgataatggcgcgaagtattcaggaaggaggtgtctctgttcaactgaatcattagatagtagaacttcagcttcagatcatgctgtgccggatcgtcaaagaactttatactgatcttcttggcaatgatctgcgtggatacgtaatcctccttcaacagacaaaggcgcatctgctccaggatgagctccaccttctcgcgcttatccatcgagccataagtctccacttgaagctcctccatgacagtggcagctccggcgacatcgccatcggcttccttaatgtccgccagaatcttagtaagacgggcccgctcgatctcaacgtaaatcttgccctcggtaaccgagcgaagtgtgtcgataagcttcagcttagtctctttgtcgggcgtcttgtccacgtacgtgacgcactcctggatcatcttgaccacagcctgcttcagctgggagcgacggcgtaccagcagagacacgtactcgttgagggcgttccagttggacgcgtcaaagcagatctgacagatggcaaccaggactcgtgagcaagaaaccatgtcggcgcccaggcgcgtctgcttctccagttgtagcatcatctcgatggcttcgtgaaaggcgtcggggtttttcttggccagctccttagccagggggattttctcgttgcacgccggctcgtagtccacctccatcttggtgatgcggccgccatcaaacaaataggtgtccattgtgttctacaaaaaaatgtttacttcaatttttgccgatatgacgaggcagttttccaacctacctatatttcgcctttaccctgctgcagaatctactaaaactgtttttcacgataggaaatgataaatgtcgtcttgcttcaaacctggttggtttgtctgctccttttcttaaagttattggatgcaaaagcggcttttttctaataataatctccgcacaaatttttgcttacaaatgctgtgttaagttggctgcgggattttgtagtgttgaaaaggtgaattttgaagtgatagtaccagagcgagatgtgtcacagtcaaagatatttttgtagggataaaattacgttccaaagggtttttttttataatttcaactcaaagtatgactcaaaatttgtcagaaaaatggaagactgcgaaatcaagaaaacatcggtaaattgcgcatagggttgtcagaggtttaacaatcgaaacaacataatttgcgtaacttctgatttaaaaacaacaatatttttatggcaacaaaatgatataattaccttttttatacaaattctcattctttccaaccctgcaatcaacacataacagttatatcttcaatcgtaatctcagcaccaatagttaaactatcgcttaaacgacacatctgacagcccaatccgtggctagtgttgttggttagtattcaccgtcttgcgttgtccaacattgttggaaagccaatcactttgtttagccgcgaaaattgcgctagaacgcctgcaaaaagctgtctggttttataaacaacgtgatttttgatttttaaagcaacaagttagctgcaaactacttaacggtcacaagtaaaaagttccggaaagatcttctggtccaccatttgcgaaagcgaatcgattgccgccttttgaagtacccaacaatggcacaaatcgagaagtaccaggactttgtgattgatgctctcgaagtggtagactttaagctgagtaagtatccttgtttcgtagcgaggtagaactgcaatgttcccgtttttagtccgtgacaaggccgacatcaacaatgatgccctgacctttcatcccgcaatggcccaccagattttcggggagaccgagacgattttcggctaccaggacttgcacgtccgtgtaatgtacacggcaggacctttgcacatctacttgggcgtcgattacggcaaacgggtgaatgagatctccggcggagagatca

SEQ ID NO: 290 - DNA, 1874 bp, DROSOPHILA
agccaacttaacacagcatttgtaagcaaaaatttgtgcggagattattattagaaaaaagccgcttttgcatccaataactttaagaaaaggagcagacaaaccaaccaggtttgaagcaagacgacatttatcatttcctatcgtgaaaaacagttttagtagattctgcagcagggtaaaggcgaaatatagaacacaatggacacctatttgtttgatggcggccgcatcaccaagatggaggtggactacgagccggcgtgcaacgagaaaatccccctggctaaggagctggccaagaaaaaccccgacgcctttcacgaagccatcgagatgatgctacaactggagaagcagacgcgcctgggcgccgacatggtttcttgctcacgagtcctggttgccatctgtcagatctgctttgacgcgtccaactggaacgccctcaacgagtacgtgtctctgctggtacgccgtcgctcccagctgaagcaggctgtggtcaagatgatccaggagtgcgtcacgtacgtggacaagacgcccgacaaagagactaagctgaagcttatcgacacacttcgctcggttaccgagggcaagatttacgttgagatcgagcgggcccgtcttactaagattctggcggacattaaggaagccgatggcgatgtcgccggagctgccactgtcatggaggagcttcaagtggagacttatggctcgatggataagcgcgagaaggtggagctcatcctggagcagatgcgcctttgtctgttgaaggaggattacgtatccacgcagatcattgccaagaagatcagtataaagttctttgacgatccggcacagcatgatctgaagctgaagttctactatctaatgattcagttgaacagagacacctccttcctgaatacttcgcgccattatcaggccatagcggagcctccgcgcaagaagactggccttacacccgtagactctgccgcgtccacggatgagcaaaaaaagaaggatgacgataagaaaaagaaggaggaagatgacaaggataagaagccagaggttgctacagaggctgaggtcgaaattgaacttaccgaggagcagaagaaggaactgacggaaaagctggtttgtgccgtgctttattgcgttttagctcccttcgacaacgaacagagcgacatgatggcacatctttcgaagaacaagaagctggaggaagtgcccgcctataaggaaattctgcgcttgttcatgtcaaaggagctgatcaacttcgacacatttaatgcagactttgggctcgtgttggctgaaaacgagatgttcaaggatagcaccaagcatggcaagaaatgtatcaccgagcttaaggatcgtctgatagagcataacattcgcatcattgccatgtattactcccgcctgcatttggcgcgcatgagtgagctgctgaacctgcccaccagccgctgcgaggagtatctttctaaactggccaacaccgacaccatccgcgtaaagatcgaccgtcccgccggcatcatttacttcacccaaaaaaagagcgcctccgacatcctgaacaactgggccaccgacgtcaaccagctgatgtccctggtcaacaagacctgccacttgattaacaaggaagagtgcgtctactccgtcatgtgtgctgtcgaggattaatcctgttccataggtgcttagaatagtgtttcccccttgaagcgcctatccacacgcaactgtaattgtactaacccctaaccatcaacatttcgattctcttcgtgaagtttgtattcattgaatgaactacaattattaaatgaatccccccattaaatctc

SEQ ID NO: 291 - protein, 502 aa, DROSOPHILA
MDTYLFDGGRITKMEVDYEPACNEKIPLAKELAKKNPDAFHEAIEMMLQLEKQTRLGADMVSCSRVLVAICQICFDASNWNALNEYVSLLVRRRSQLKQAVVKMIQECVTYVDKTPDKETKLKLIDTLRSVTEGKIYVEIERARLTKILADIKEADGDVAGAATVMEELQVETYGSMDKREKVELILEQMRLCLLKEDYVSTQIIAKKISIKFFDDPAQHDLKLKFYYLMIQLNRDTSFLNTSRHYQAIAEPPRKKTGLTPVDSAASTDEQKKKDDDKKKKEEDDKDKKPEVATEAEVEIELTEEQKKELTEKLVCAVLYCVLAPFDNEQSDMMAHLSKNKKLEEVPAYKEILRLFMSKELINFDTFNADFGLVLAENEMFKDSTKHGKKCITELKDRLIEHNIRIIAMYYSRLHLARMSELLNLPTSRCEEYLSKLANTDTIRVKIDRPAGIIYFTQKKSASDILNNWATDVNQLMSLVNKTCHLINKEECVYSVMCAVED

SEQ ID NO: 292 - DNA, 3917 bp, DROSOPHILA
agtgccatgggcttattcggcagaactcccagtaaagatcccaaagagcaggtaacgacgcagaggcgtggcagtgatttttttgggaatgatgtcattccagttggattgattttattagacctttccccatctgtccattgtgcgttatgaatattgttttgaaatgtaaattcccattaggtgcaggagtggacgcataagatacggaaagagggcaaccagctggatcgccagatccgaagtatccagcgcgaggaagagaaagtaaaacgctcgctgaaacaggcagcacagaaaaatgaccgcgacacctgcgtcattcttgccaaggagattgtgaatgcgcgaaaggccatcaaccgcatatatacgtcgaaggcgcacctcaactccattcagatgcagatgaaaaatcagctatgtgagtgaactcttcgcttgtttgatacgacctgattatcgaatcctccttgcagccaccttgcgtgtagctggatctctgcaaaagtctacagaggtcttgcaagctatgcagagcctggtgcgctatccagagcttgcaggcatcatgcgcgacatgtcaaaggaaatgatgaaggccggcattattgaggagatgctagacgagaccatggactcgctggaggagtccgaggagctggaggaggaggcaagcaaggaggtggacaaggttttgtgggagatcacagatggcaagctcggggaagctcccctgcctccagaggctacaccggcggacaaggcgtctgcgtctgctgcgcgcgtcgaggctgagcaggacgatgaggagggtgaggaactgcaagagatgcaaagccgcctggcctcgctgcgatcttaaaacaactgctatgggtattttatttagatttgaaattaaaggcaagtgattttgactggcagaccttatcaaaatcataaacggcaacccccacgccgtcatttgattgtagaaaccaaaataatctccagaaacttgaattgagtttttatattataagtgtacagtacaccagatcaagaagtgttgaactctgcgcgttttaccgttgaatctacacgagataacttaatttattgtaaaatctacctttcattaaaaatcgatatttactgtggcatgtcccattttacaatggtaatctgcacgatttacgatcaatccctaagaatgttaattttcgtcatttaagattaagccctaacgttgttttctatccagttcagatacgcttcaacccttgtgtacacgccgggccatccttttaggccacagggcgtgggtccgtaggagaccacaccagcaatgtagtagtttgagtttccattggagtagtcctcgagcagaagggggccacccgagtccccgcgacaggaatcaaccccctcaactccgccggcgcacatctgtttggtggtgacagtccttctttgggtggcgtatctttggttgcattcggacgtcggtaccgtatccaactcagccttcagcttgatattggacgtaaaatttgtctccgtgcgaccccaccctgccaccaccacctttcggccaaggaatatattgttgtgctgggacgctaaagtgggcagacatactggtaatatgaagtcgctgtactgaacctcgtcccgcaatcgcagcaacgcaatgtcatttagctggtcccgtgagtttcccgggtactgcgggtgcggaatacgctcctcaacagggtagtctacgtacggttcgttgcagtcccgtcgtccgtttttaccgactgtgcaatccggattggtgctcgcatcccactcacccaggcgtactcccgtcagctcccaatcactgggaatagccgagacgcagtgtgccgccgtcagaacgtaacgatggttgattagagatccgccgcagtggtgacctttcacgttaccggctggtaaaatggggggggggggggattagtccctgcagcagggaatattttggttactcacgcttcgtgtactctattagggccatccaaggaaactccctctttgtcgtctcgttaccacccaccactcggtctccaaagttttcaccgcaattgggcgccattggtaacagtttggtcccagagcgttttgtaggcttagtggtctgagtaggttgaggatgatttccccactgaggttgctggtttcgcattcggctgtttgcacagcaaatctgaacattggtaaaacaaaaatgtttttcctaaattgataaaagttgataataagaatgcatggtggcgtcgcatcgaaaagcgattcgatgcgatagccataagtaaaagaattaatttatatatatgttcaatggatgaaaatgatcttaatcgattttagcaccacaactttttaagggggtactaacaagcacttgtccattccggtagccacattggctggcttgcagaaatcgacggtcctgttccgtaacctcttcgctttgaagcagttcgaataggtatccacattcccggaggtttatgcaggtgccgctgttctcatcaggcgttctacaatacccaaagatttctgaaaaaaaaaaacgtaaatcgtaaagcccggttcaaagatagtcgtgattaacagcgggaacgggatttctgcgttctgggaccagcccactgtgactatcatcgactcagcccgactcggggtgaagttcaccgctgataggaggttgctttgtgttttgatgccagcaacccccgactacgactgagagccaaaaccacttgccttgtgcgtaagtgctgcttgttcccatcaatagcatccacagtacggtgaaaaaaaagtgcggttccatggttatatcttcgactgtactatagcactgtacttggaagaacgatacgctgacagagcgcctgccgagaacacactgaatgtggctataaactggaatgcgatcgagctctaagttacagcttatcagcggttctctcacagagaatggttcaacctgaggaagcacaccagcattaagagagtgcaagtctgggtttatctcagggtctggttttgggcacacccatactggcgaaaaagcccgctctcaatgttgggtccgctctttatgcgttgctcatcagggaacttcccacgccaacagaatgcagatgatacttaccctcttctcctagggctgaaatatcttgggtcggacgatatctgtaagtccatacgggccaatccattaaaaaatctggcaaacccactttattaacagagagtgaattttcacattcaaacatttgcaaaccctctgtaaaaacaatttctgtaaaacataataatcgaatattttgaaaaatatcaaaattaaacattaccaatctttttttgtagccagatacataaaatctttgaaaataattaggagaaacttaggaaaatatcctaaagtagtttccataatcaatttttctaacttcgtatatattctctaaacttcattaataggtatttaaaacgattgtactactatactattatacttattttatcgttaagattccagagaaatacagtaaccttaagttttttaagtattgttagaaaaataacaagagagaatgcgagttccccgactatccgatacccgttactcagctagtgtgaatgcgaacgcgaaatttcataatttttctgggatatcaataggtattggggaataaaatgagaaaaaaaaaattaataattgttcaaaagtagggcgtgaccggctttagctgctttagggcgtggcaaaaagttttttgccaaataaatagaaaatttacaagactaataaaattatgaaaaaatatcgaacaatttttcaaaattgtgggcgtggcagttatgtgcggtttaaggtacttgcagtgggc

SEQ ID NO: 293 - DNA, 1457 bp, DROSOPHILA
ggcaggcgctctgtcagcgtatcgttcttccaagtacagtgctatagtacagtcgaagatataaccatggaaccgcacttttttttcaccgtactgtggatgctattgatgggaacaagcagcacttacgcacaagaaatctttgggtattgtagaacgcctgatgagaacagcggcacctgcataaacctccgggaatgtggatacctattcgaactgcttcaaagcgaagaggttacggaacaggaccgtcgatttctgcaagccagccaatgtggctaccggaatggacaagtgcttatttgctgtgcaaacagccgaatgcgaaaccagcaacctcagtggggaaatcatcctcaacctactcagaccactaagcctacaaaacgctctgggaccaaactgttaccaatggcgcccaattgcggtgaaaactttggagaccgagtggtgggtggtaacgagacgacaaagagggagtttccttggatggccctaatagagtacacgaagcccggtaacgtgaaaggtcaccactgcggcggatctctaatcaaccatcgttacgttctgacggcggcacactgcgtctcggctattcccagtgattgggagctgacgggagtacgcctgggtgagtgggatgcgagcaccaatccggattgcacagtcggtaaaaacggacgacgggactgcaacgaaccgtacgtagactaccctgttgaggagcgtattccgcacccgcagtacccgggaaactcacgggaccagctaaatgacattgcgttgctgcgattgcgggacgaggttcagtacagcgacttcatattaccagtatgtctgcccactttagcgtcccagcacaacaatatattccttggccgaaaggtggtggtggcagggtggggtcgcacggagacaaattttacgtccaatatcaagctgaaggctgagttggatacggtaccgacgtccgaatgcaaccaaagatacgccacccaaagaaggactgtcaccaccaaacagatgtgcgccggcggagttgagggggttgattcctgtcgcggggactcgggtggcccccttctgctcgaggactactccaatggaaactcaaactactacattgctggtgtggtctcctacggacccacgccctgtggcctaaaaggatggcccggcgtgtacacaagggttgaagcgtatctgaactggatagaaaacaacgttagggcttaatcttaaatgacgaaaattaacattcttagggattgatcgtaaatcgtgcagattaccattgtaaaatgggacatgccacagtaaatatcgatttttaatgaaaggtagattttacaataaattaagttatctcgtgtagattcaacggtaaaacgcgcagagttcaacacttcttgatctggtgtactgtacacttataatataaaaactcaattcaa

SEQ ID NO: 294 - protein, 390 aa, DROSOPHILA
MEPHFFFTVLWMLLMGTSSTYAQEIFGYCRTPDENSGTCINLRECGYLFELLQSEEVTEQDRRFLQASQCGYRNGQVLICCANSRMRNQQPQWGNHPQPTQTTKPTKRSGTKLLPMAPNCGENFGDRVVGGNETTKREFPWMALIEYTKPGNVKGHHCGGSLINHRYVLTAAHCVSAIPSDWELTGVRLGEWDASTNPDCTVGKNGRRDCNEPYVDYPVEERIPHPQYPGNSRDQLNDIALLRLRDEVQYSDFILPVCLPTLASQHNNIFLGRKVVVAGWGRTETNFTSNIKLKAELDTVPTSECNQRYATQRRTVTTKQMCAGGVEGVDSCRGDSGGPLLLEDYSNGNSNYYIAGVVSYGPTPCGLKGWPGVYTRVEAYLNWIENNVRA

SEQ ID NO: 295 - DNA, 4827 bp, DROSOPHILA
cacacggaaactggccgaccagaaagcgaagtaaacaacagccacttcaagagcaggctactgagattcggttcaaactgctttcggttagtttttcgtacctaggtgcatgcaataatcgcctgactaaagcgaagcactcagaacccgaacaatatggccgcccaaaaggagcggcagccggagattgccccgtcgtgggccatagcccaaaagaccgagccacaaaccgggaatcttccacttccacagaggatgtgttatttataatgcatatggcagctgtgctaaataaaattcaaaagcagctgcactcacacaaacgcacgcacacacagacagcgcttgcgctcggtgtacgaaattccatgacacaagtgaaaagtgttggtctgcgaaaatattgatttatctcgcaaacccgctgtcaaccaactatctgtgggcccagcatgtcgacacccaagtcacgcttaccttggaaggactccggaatacggctctactcgaagaagtctggctttaactttgcgaataagagatgcggaaacgacgcgcacttgccaacgaacgttgatttcaaatatggtgtaaagtgaccggagcagagtattggaattaaccgaaaatctgtcttctgttcgtaggggaagcttttctagtctggtcccatttgatataacagcagtgtatcctggcactgttaagtgtcgagattgctcaacacgccatctatgaaagagaattgcaacttttgaaaaaaagtacttcattactgtttaataactaaatctaaatcatagacgttcattactatatcatctcggttgttgatcagtacaagattatttatgctgaattatgctttgacttctagtttttatatttttatttaaacgccctgtagctgagtaacgggtatgttgtaatcgatatttttcttgaatatcagattcaagacattagcctcgtgttcaaccagtgcattgactgaaaccagtgaaaccaccttgtgagcagtaaggtcacacttgagttttgttgacgtttcattttaggttttttcagattgcatctaagcagtctaatatctttatctttactatcgcagcgaatcataacaagatgggtagtgactgggacgagatcaagcgcttggccgccgactttcagaaggcgcagctcacgtctacgctgcagaagtaaggcgaagctctcctattttactgctttacgttttcacatttgttacattaccaatttcgtaggctctcggagcgaaactgcgtggagatcgtcacgctgctgctggagaagcagatgctggaggtggtgttcaccaacgatggcaaggagtacatcacgccggatcatctggagcgcgagatccaggacgagttgtacgtgaacggaggtcgtgccaacttggtggaggtcagcaaaaccctaaatgtggatttatcacgaatcgagctgcttgccgaacgaatatctgcggagaatcaaagcgtacacctggtactgggacagctaatcgacgaggactacatcagtcatattgcgcaggagatcaacgagaagctggttcagcgaggagaggtttccatttcggaattggcttcccagttcgatctgccgtcggacttcctgcaacacgacgtggtcgaaaagcatctaggtaagattattaagggtcgccaggatgcctcaaatccgcgggtgttcttcactcaggcctacatccaacgttgcaaagcgaagattcggggagccctggccgccattaccaggcccataaatgtggctgtgattcttcagaagatcggtgtgcaggagaagatcttctactcgttgctggacgaaatcgcgccagctggccaggttacctccaagcaggccaactcccaatacgtgccgcacatctatgccaagacgcaggctgactgggtgaactcgttctacaagcagaacagcttccttgagtatgatgccattcaaaagctgggaatttcggatgccaagtcctacattcgcaagcagttccccaacgaagagtttctctacctcaagcgtgtggcccttggcgctcgactggtggagctcacggtggtcacggcgctaaatgagtgcagtgccaccaagcagtacctggatctgaccaccatacttccatcgaatctgtccgaggaggatatcgaggaggttttcagcaccatcatggcccaaaagcatagcaatcccagcaactttgtttatcttgatggcattggtacgtacttgagttactcttttttaatttcattacaacgaatatgttacttttagtattttcgcaaccatacctcgcgcaattggttcagccgtgtcaagcgttggcagagtctcaggccaaggcggccatcgatggcggcgtataccagcagtacattgtggagaagacgctagcgcaaaagggaaacgtgtcgacccaagagctagaggacgaaggcaaggtggacaagcgcgacgagcggcgaaagaaggcgtcctctggcaaagcaggaggaggagcccaagggcgtgagaccaagaccaagtccacgaagaagcatcaacgcggaaaggcggcagctcagttcgacagtgatgatgaggacgatgcacagcaaggctctcgaggtggcggtggagcaagcaaaaaggcagttaagccattggagctagtcaagacagcggacatcgtcaaactgattactgcgagtctggaagaggagggactggagcatttgtcgaaatccattgcttccctctatacaaagtacgtattataaaaaaaatatgaatcgaaacaagaagcgtggtgctaatatcaattttgcttaacctttttataacagccaatttaatcagacggccctggcacgtgctcaggagttgttcgaggctacaccgcagacaaatcgtcgccagacacacgctgctatccaggatcgcatcaatacgcttttgatagacataaggctctatgagaagggcttaaagctttttccgcaggacacgcaaacccagttggttaaatacttgctaaagtcattgggaaatgagatttgcaacgaactttcgctatacgtggccagcgagtgcaatctgactgtgaaaaataccaacctgaatgtggaccagcgcaataagttggctcaggagtgcgaggcccaataccgtgccgcgttgcttgagcaaaacaaagccctgaataagagcattgacgactttgaactggcgaccgaaacggtgctgaagacctgcagcatgatcatcaagaaggtggacaagaaaaaggatcgcctgctcatcgcagaccacaaaaagaagctgcagaagcagctactagagtgcaacgagccggcactgctgctgcacctggctgcactgatcttgttcaccacgatcactggtagcattttgcacgcgtccggaaaattcgtttctgccatactgcagcatattcgcggctcactaaacgaggaccagaatgctctgttgcttcggtatcacggtgagtttttgcaaccataatttgcgttttacctaattcttacatacatttcagatttggtcctgcaagttctgcaggccattcccgatagcaatgagtcaaaactggccaacgaacatttgcagacaatgcagaatcaagtggtggagctagctcaaaacttttcacgtgcatcgatttctaaggctgattgatgatgctcctatattccaatctttcttcccatgtcattaaattgcgtctatgtaaattggttctggtctgcaatagattttgcatttgttaaattttcatagtttataaattgtttttattactgctatgcatgaagttacaaaacgatgagccttaaacagagttcctagctttatcactttcgaaggtttgggttgttggaaaaacgatttaaaattgattagtttggaagggctgttctccatttagtttgttaagctcaagcttgaattaaataaatctcttacgaagctacttatatacaatattttctaacagaccgatataagttgtgcatttctttataacgagtatttgattgttaggattgatgtgagcgatgtttgtccctacactttataaactatgtagtctttgaagtatttgcttggctttatcgctggattgcctgcaaaaagggaaatgattgcttttaactctcaaaagtgagtttcattacttacataaagattggattgcttgcatcacagttctctaatgtttgtttaatatatcctataaaaagttccatgttcttgagggtctcgctgttcggtaacaaccagactgtaggcagggtatttacaatgatgtaagctttgtttatggcatcgtttggcgtgcagactcgcatagctaataacaggtaacgattcagaagggctccaatcgccagctcacgcagtagcttatcagccaggatgccctgccagcttaggaaatttcgaaacagctttagaccactgcaaaactgcctctgaaagaatgaggtcttcgcctcttgcactctaaagttcaaacaaaaagcggtaattaagaccatgatggccaatcttttgcaagaataatatacttactgctttggaaaaatgggtataaatacatcattttctagggctaaccgcatgcgttccatgatggattcaaacagtttgttaagctgcttatttgtgccgctcaagggaaactcgcgacctaatcgattgatgaacccaaccaatctcagggtctgtgtggtagataatggatcccagcattctgtgaccagagctaaaaaa

SEQ ID NO: 296 - DNA, 2572 bp, DROSOPHILA
tgaaaccaccttgtgagcagtaaggtcacacttgagttttgttgacgtttcattttaggttttttcagattgcatctaagcagtctaatatctttatctttactatcgcagcgaatcataacaagatgggtagtgactgggacgagatcaagcgcttggccgccgactttcagaaggcgcagctcacgtctacgctgcagaagctctcggagcgaaactgcgtggagatcgtcacgctgctgctggagaagcagatgctggaggtggtgttcaccaacgatggcaaggagtacatcacgccggatcatctggagcgcgagatccaggacgagttgtacgtgaacggaggtcgtgccaacttggtggaggtcagcaaaaccctaaatgtggatttatcacgaatcgagctgcttgccgaacgaatatctgcggagaatcaaagcgtacacctggtactgggacagctaatcgacgaggactacatcagtcatattgcgcaggagatcaacgagaagctggttcagcgaggagaggtttccatttcggaattggcttcccagttcgatctgccgtcggacttcctgcaacacgacgtggtcgaaaagcatctaggtaagattattaagggtcgccaggatgcctcaaatccgcgggtgttcttcactcaggcctacatccaacgttgcaaagcgaagattcggggagccctggccgccattaccaggcccataaatgtggctgtgattcttcagaagatcggtgtgcaggagaagatcttctactcgttgctggacgaaatcgcgccagctggccaggttacctccaagcaggccaactcccaatacgtgccgcacatctatgccaagacgcaggctgactgggtgaactcgttctacaagcagaacagcttccttgagtatgatgccattcaaaagctgggaatttcggatgccaagtcctacattcgcaagcagttccccaacgaagagtttctctacctcaagcgtgtggcccttggcgctcgactggtggagctcacggtggtcacggcgctaaatgagtgcagtgccaccaagcagtacctggatctgaccaccatacttccatcgaatctgtccgaggaggatatcgaggaggttttcagcaccatcatggcccaaaagcatagcaatcccagcaactttgtttatcttgatggcattgtattttcgcaaccatacctcgcgcaattggttcagccgtgtcaagcgttggcagagtctcaggccaaggcggccatcgatggcggcgtataccagcagtacattgtggagaagacgctagcgcaaaagggaaacgtgtcgacccaagagctagaggacgaaggcaaggtggacaagcgcgacgagcggcgaaagaaggcgtcctctggcaaagcaggaggaggagcccaagggcgtgagaccaagaccaagtccacgaagaagcatcaacgcggaaaggcggcagctcagttcgacagtgatgatgaggacgatgcacagcaaggctctcgaggtggcggtggagcaagcaaaaaggcagttaagccattggagctagtcaagacagcggacatcgtcaaactgattactgcgagtctggaagaggagggactggagcatttgtcgaaatccattgcttccctctatacaaaccaatttaatcagacggccctggcacgtgctcaggagttgttcgaggctacaccgcagacaaatcgtcgccagacacacgctgctatccaggatcgcatcaatacgcttttgatagacataaggctctatgagaagggcttaaagctttttccgcaggacacgcaaacccagttggttaaatacttgctaaagtcattgggaaatgagatttgcaacgaactttcgctatacgtggccagcgagtgcaatctgactgtgaaaaataccaacctgaatgtggaccagcgcaataagttggctcaggagtgcgaggcccaataccgtgccgcgttgcttgagcaaaacaaagccctgaataagagcattgacgactttgaactggcgaccgaaacggtgctgaagacctgcagcatgatcatcaagaaggtggacaagaaaaaggatcgcctgctcatcgcagaccacaaaaagaagctgcagaagcagctactagagtgcaacgagccggcactgctgctgcacctggctgcactgatcttgttcaccacgatcactggtagcattttgcacgcgtccggaaaattcgtttctgccatactgcagcatattcgcggctcactaaacgaggaccagaatgctctgttgcttcggtatcacgatttggtcctgcaagttctgcaggccattcccgatagcaatgagtcaaaactggccaacgaacatttgcagacaatgcagaatcaagtggtggagctagctcaaaacttttcacgtgcatcgatttctaaggctgattgatgatgctcctatattccaatctttcttcccatgtcattaaattgcgtctatgtaaattggttctggtctgcaatagattttgcatttgttaaattttc

SEQ ID NO: 297 - protein, 782 aa, DROSOPHILA
MGSDWDEIKRLAADFQKAQLTSTLQKLSERNCVEIVTLLLEKQMLEVVFTNDGKEYITPDHLEREIQDELYVNGGRANLVEVSKTLNVDLSRIELLAERISAENQSVHLVLGQLIDEDYISHIAQEINEKLVQRGEVSISELASQFDLPSDFLQHDVVEKHLGKIIKGRQDASNPRVFFTQAYIQRCKAKIRGALAAITRPINVAVILQKIGVQEKIFYSLLDEIAPAGQVTSKQANSQYVPHIYAKTQADWVNSFYKQNSFLEYDAIQKLGISDAKSYIRKQFPNEEFLYLKRVALGARLVELTVVTALNECSATKQYLDLTTILPSNLSEEDIEEVFSTIMAQKHSNPSNFVYLDGIVFSQPYLAQLVQPCQALAESQAKAAIDGGVYQQYIVEKTLAQKGNVSTQELEDEGKVDKRDERRKKASSGKAGGGAQGRETKTKSTKKHQRGKAAAQFDSDDEDDAQQGSRGGGGASKKAVKPLELVKTADIVKLITASLEEEGLEHLSKSIASLYTNQFNQTALARAQELFEATPQTNRRQTHAAIQDRINTLLIDIRLYEKGLKLFPQDTQTQLVKYLLKSLGNEICNELSLYVASECNLTVKNTNLNVDQRNKLAQECEAQYRAALLEQNKALNKSIDDFELATETVLKTCSMIIKKVDKKKDRLLIADHKKKLQKQLLECNEPALLLHLAALILFTTITGSILHASGKFVSAILQHIRGSLNEDQNALLLRYHDLVLQVLQAIPDSNESKLANEHLQTMQNQVVELAQNFSRASISKAD

SEQ ID NO: 298 - DNA, 2420 bp, DROSOPHILA
aagtgcctggccaaggaagctgacatgaccttcattgctacgtcggcggcggaggtgtactctccctacgtcggttgcgcggaaagatttatatcgcgaatctttgacacagcgcgaaaaaatgcaccctgtcttatatttctagatgagataggtgagtcggataagcttaatttgccataaaaatgattaatccacttaattttatagattcgcttgttggcagaaggacggtctcaagtggcggaggtggtggacaagttcagctgaggattctctccacgctgttgaccgaaatgaatggcattgtggggggtggtagtcagcaacatatacttgtcgttgcagccaccaatcgaccggatatgatcgatgatgccctactgcgaccaggacgctttgacaagcttatccatgtaccagccccagatgagaaatcccgcctggctctgctaaaactccactcccagcgcatgcctttccatgaaaatgtgtttctccaggagattgctgcccgaacagaccggtattctggagcggatctgtgtaatctctgcaatgaggcggctatcgaggcttttcaacgtgactttaaggccacggaaattgagctacaagactttgaaaaagttctgaccaagcagaaatcctcgctcactcaaagccaaatagatggctactataagtttgcttataggttcttatagaacaagatgtatgtgcagttgcatttgttagttttgcataaataaatgtattttaagatgttaaatcgtagaattctttgctcaaattcaaactactgatttacgatatgtactcccgcgaccacgattaccaatcgatagaatagtcgcagtcagctgttgcaacgataactgattgcggcaaaacaaagaaaacgcagagaaaaagttaacgcaattaaacgtagtaaaaaagcctagactattttcataacaagaagcagtgagtcacaaaaaaaagctttccggccacaatggcagatacccgtaaagacgccgcgccgccgagctacgaagaagtcatgaacagtccctcgcagggtaagtaataggctcactaaaggcatccaattcaatgcacatcttttttagattcccggctgatagtgggcgtgcatcagggagcacctagtgctccgccaccaaacatgcacatgccaacctacggagctttcgagacgacgccggtcagcgtggtgattcagcctgctccggtcgctatgcccaccgagatcatcgtgattggaggatgccctgcatgtcggattggatacctggaggacaccttctccgcctgcggactgtgctgcgcaatcttcttcttcccgctgggaattctctgttgcttggccatgcgtgagaagcgctgttccaactgcggaacggttttctagaggggattacccagaaattatccataaagaaacgctaaaagttgatccctattaggctttcgcggtgggtgactatcacaaagcaccaatatttttgttattgttaatcgttagctcgcaaatcattatatactatgtgtaaatattattcatgccagcctgcggaatgcccccgattccattccagtccctgtccggagaatggtcatgtacagtgaaatatgctaaactcgaattcaaatcagtaagcccagttatgaaaaaaatgctaaaaaaaatcagttgaacatgttttccaattgaatagtgatttggctttttacaaggattttaagtaacataagttttaaactgcaaacaaaagaaaaaatatttatatatttaaataaaaggtttacaacatgtttattatatcttagagtaatggtacgcagatataatgacttggacggttttagatatgaactaggttgtacaaaacttcattagttcttgatttgtgaataatttgacccactgttgcatttcgtgattatagaacttttactgtacttgtaaaatgtgcactgtaagcgtcgacgaggcgcgcttccgttaaattcaattgaaatataatggagggcggttttgaattgcgccgcccgtccgatttctcttctccatgctctttggactttaccgcgcaaaacagtaaacaagtgaagtgttttaaatgaatttgggaatgacataaatatacccttcaaatgcatcaggagattaaaagaaaaacccttcaaaacgccatattttagatatttgaatttttgaatatatatagattacttgattttcaaaatttttataaaaccaaatgtatgagccgctgatatacccccttatcagatttcatgggcacagggtagcacaacaaattcgccggcatccacatccgccgtgtcggcatcttcgagtcaacagttgtgagcttccttcgccgtagacatgatcactgctcgtc

SEQ ID NO: 299 - DNA, 369 bp, DROSOPHILA
atggcagatacccgtaaagacgccgcgccgccgagctacgaagaagtcatgaacagtccctcgcaggattcccggctgatagtgggcgtgcatcagggagcacctagtgctccgccaccaaacatgcacatgccaacctacggagctttcgagacgacgccggtcagcgtggtgattcagcctgctccggtcgctatgcccaccgagatcatcgtgattggaggatgccctgcatgtcggattggatacctggaggacaccttctccgcctgcggactgtgctgcgcaatcttcttcttcccgctgggaattctctgttgcttggccatgcgtgagaagcgctgttccaactgcggaacggttttctag

SEQ ID NO: 300 - protein, 81 aa, DROSOPHILA
MHMPTYGAFETTPVSVVIQPAPVAMPTEIIVIGGCPACRIGYLEDTFSACGLCCAIFFFPLGILCCLAMREKRCSNCGTVF

SEQ ID NO: 301 - DNA, 3703 bp, DROSOPHILA
tcaaaaacgcatcaataaaacttgcgcaatgtcactgcatcacaccgaaaaccaaccaaaaacacccgagagttacccagcaggacatcgggcccaaaggcaaacagtaggtggtgccggaagtgcagggccgttttcccatcaacatgagccctgaaaactaattaaactaatgatgacataattggctctatctgcagcagtcgaaggtgtcgcgttctttgtggggtcgcacaaaccgtcagaggtcccggaaaagaaacagatatattcatttactctcacagaaaaaagataattgatttctttgcgaaattgaatgcaatgacacttggattttccgctcactgtgaggtccgggctgtttccgactcgagaaatgttttgacatttgggaaaaggcaagattcttggacaattcatcagcgatcagaaacccggaccctttttacttttttttacgttcttggagttcctggattttaccatgcggaagtgtagcgtgtgctcttccaacgagctaattcccacttccccttggagctggccccgacatgatgggccaattaggaaacaaacgctcgagttttctaatttttaacaatgactgttgttgctttatttgtaaatatgcacataaaaatacttggctgccgatggcagtaaatacacgttatagaaaaatgacattcgattgtattgtatgtatgtatatatgtaaagggtatataaatatggataggtgtgggcagtgctgtgcgctttagtttgtcttattccgatgaaagatcggcaggccagtcaggcgaagtcattgtacgcttatttaaacgaatataccataaactgaaatgagtatatagacggcccttgttgttggcaaggtaaaggcattaagtaaggcacaagtacttgagccactgagattactaggtgtcgctgctcgtacgtttgccaagcaacttcgtagaggttcatttgggaatccttctcgccttccttagtacagcattatggcggtcttgtttttatcgtcacatggcgcctccaggcattggcggttgcggaggccgagtcgctgggcgtacaacaggatggcgatattcagcagcacaacgacggtggataccacgaccaggtaaaagctgtaaccaagataagccagtccattgctgtaccagtgctgctgctgctgctcagttaaaagaacgttgtgtatgaaatattggtagaactgcacgagccaagctacaaacgccactatttgcgcccccgcggcgcatatgttggaagtcaggagcagcatcattgtgcctccttttttggccgcagaggctgactttaggacagcggcgatggcagccacagcgcaggccagcagtgcgaaaccggtgcccaaggtagtaagtagccagagccagaagctagtgtcgtcattttctgtccgaacaaaggtatacactgaaaatacggtgtgaaataacaaaagttaaacaggattgctttaaaaattttatattttatttgcatctccaaaagctgttaagcttccacgacgtttttattctatgttgcatatttgtggctcgcaatataatacccttgcaattttaaaaattgtaaaccccaaatttcaaccatattatataaaagcaagtaaaatatggttccctatgtcctcgcttctattatattttttgcgccaaaaatttcaatatttttcaattttgttaaatagaatgtaacttccctttagccctaaagtttgttgtgtcacttgattattaataagaaaaacaaaaacaattttggtttttacaatttaatttttaagcatatccttaggatctgcaagataaataaatgtaatcgaaaagtatacataatggttaatttttggatatgtctgcactgatcatgagtattattcgggtatttaattttatcaactcgcccgattatgtttgtgatcttcacaactaaacaaatttaaaagtaaatctatttttaacaacagtcttatccaggacaatatcggttttcaactaatacatgccccaataatcagcacattttcctaatcgtatattcattcagaaagcgtcccaagaagtttaaagaggctaattcacgatgcaggtaatgagaagatcactctctatctagttttccctgctatctaggctactttgattgctcaccatcaaccgaatttgtgcggactccgaatccgggattcaggtggtagttgccgaagaagagtccgaagttgaattcacccttggcgtccgacgagttcttgcggcgtggagtggcccgcacccagtgattagtggtcatgctgacgagcaagaggccaatagccaggcagctgccaaagaaggtggagaacactaacgcccgtgtgtgcaagctcatcttgataatgctcatggaagaccggtggcatatgtagaaggctatgctgttttcaccattaagaaatgtctagggcccgactccagctgcagcgaagaaagttagtaggaaacgttagtaagcggaggacgcaatgccagtggccttgcagcgtattgcttacccttttatgactatgtcggcgggatcaattgcaaatatagtctttgttcgcggaacaaaagattgttgcacaggtaaacaattaatataaactgtcttgcccttgtttttttctcagaagagaagactgagcggatattttttctcaaagagtacggtagcattaatttgggatttggtctggcaaccacggcccgtctagtatattcgataacgatacaattctcataccaaaatggctcgacaaccctggttccatgcaaaaatagcgcgaagtttttgtgtttacggcggtgaaaaaatagatttcgtgtaaatatgagcagtcgcaagcacagaggctccgaaaacatggaaaatttgtgcccggtgaccaggtgagttttcctttgcttggggtgtgggttcaagcagcagaccactgaactggtcgcgtgacgtcacacgcgccacaagtgtccaaaagaggtcaagaaagtaacttattgaattgcagggttcttgaccctttctttcatcagccattctgctgatgaagcacgatcgaactgcacacttttaataaattttcgactattgcagaaagcgctcgactaataagaaccacgtctctgttgtgggcgctctagtttccactacgaagtcatcgcactacgagcacccttcctcgccctcggcactaacttttgaggccctagaagagatgggaatcggaatgcttgattccgaagaaagcagctcctcagccctctcggccatcgctttggcggttagcgccaccagcgacgacaactcaaatgagacgaccccgtgcgccagtgtgtcgcgcatggcgcaccagctacagcacacgcaacggctaagtctgggctctacgggggacatcacactggatagcccagctgtggaggattcactgtcgatgtcccgtcaatcggccgagaagctgcagattctggcgcaggctaagcgctcgtcgttgggttctgaaggtagcggcaattcaaactcgcccagcaaacgtttgcgcaaccccctggctgcagtcacctgtaacaaccagattgatgggactgcttcgctcaattttcagccatcaaccagcaggttggcgcaagttcgc

SEQ ID NO: 302 - DNA, 886 bp, DROSOPHILA
ctcttctgagaaaaaaacaagggcaagacagtttatattaattgtttacctgtgcaacaatcttttgttccgcgaacaaagactatatttgcaattgatcccgccgacatagtcataaaaggctggagtcgggccctagacatttcttaatggtgaaaacagcatagccttctacatatgccaccggtcttccatgagcattatcaagatgagcttgcacacacgggcgttagtgttctccaccttctttggcagctgcctggctattggcctcttgctcgtcagcatgaccactaatcactgggtgcgggccactccacgccgcaagaactcgtcggacgccaagggtgaattcaacttcggactcttcttcggcaactaccacctgaatcccggattcggagtccgcacaaattcggttgatgtgtatacctttgttcggacagaaaatgacgacactagcttctggctctggctacttactaccttgggcaccggtttcgcactgctggcctgcgctgtggctgccatcgccgctgtcctaaagtcagcctctgcggccaaaaaaggaggcacaatgatgctgctcctgacttccaacatatgcgccgcgggggcgcaaatagtggcgtttgtagcttggctcgtgcagttctaccaatatttcatacacaacgttcttttaactgagcagcagcagcagcactggtacagcaatggactggcttatcttggttacagcttttacctggtcgtggtatccaccgtcgttgtgctgctgaatatcgccatcctgttgtacgcccagcgactcggcctccgcaaccgccaatgcctggaggcgccatgtgacgataaaaacaagaccgccataatgctgtactaa

SEQ ID NO: 303 - protein, 225 aa, DROSOPHILA
MSLHTRALVFSTFFGSCLAIGLLLVSMTTNHWVRATPRRKNSSDAKGEFNFGLFFGNYHLNPGFGVRTNSVDVYTFVRTENDDTSFWLWLLTTLGTGFALLACAVAAIAAVLKSASAAKKGGTMMLLLTSNICAAGAQIVAFVAWLVQFYQYFIHNVLLTEQQQQHWYSNGLAYLGYSFYLVVVSTVVVLLNIAILLYAQRLGLRNRQCLEAPCDDKNKTAIMLY

SEQ ID NO: 304 - DNA, 6459 bp, DROSOPHILA
ctagaggtccgggtgtgggaaatggagatcagaatcgactggcgtatggcagcagcgtgcgtattcacaaatagtgttttgacaacaatatccactctctgcgcagttcgagtggctttgggaacgctctagaatcggctacaaaagtgtcttctatgtcaaacacgtagtaggcagcaagtcggtccggtcgccattaaaacggagcagagttgccagtagggggtgttgataatatatcaatgtatcgaggtatccaagcgatatattagtatttatatcgcgatattatatctgcctaagatcgtgaacacaatatatttttcgaatatttcattatattttcggacttgcatcttaaaatgtaaacataagttagtcagtggtttttcagtcaaatacccgcattaatattcgtagcattcgaatctcttagtcgcattactgtcattcacttttcttaacggctatttttattgattgaaaattatttccagaaaatattgtaagaataatgtattctttgctgaatgctgataaagaaaacctaaaactggtgactgtgtaactagcggaggcaaagtacatttaccgtaagtaaactaaaactaaaaataaaaaatatgatttatttattcaataatttaaaattagttggataggcctgtctggcagcacactatcgctacgctactatcgctacgctactatcgctaccacaaacatatcgagatcagaagaaccaatttttgctgaatgtttagtttttaaatattattaagaaaaaataaataagaacctgagaaaaacagtggtgacaactcttacaaatctttcaaagaaataagataagcatgcataaaactgacaattaaattgtaaggccataaagataaataaaattgattcaactcctgactgctgttatatatcgataacattgcaatcgaagcacacgctggtgtccgcgtttcgtcgtgaattcctcaaattcgcgttgttcggaaagttactagttatttgcaacgcggcgatttgcaggtcgtttttacctatttagtctaagcattagtacacccaccaccgcgccaatgccaacactctagaaaacacgagtaagtagagctttgcgtgggtaatagcgtccaactaatacgcccactacgccttcatctgtgtgtgtgtttgtgtgcgggcgaagacattttttgcagccaagcggaaaaagaggcattggaaaaaacagccgcaacatggacgtatcccagccgccaccgcagctgctcacggcgccctcggccctggccaccaacttcacatcgctgcccccgccgaacatgggcggccagcactaccgtcactaccatccgcaccatgggtccaacaagcacggctacaaccagttcaaacccttcatgcccggcggcttccagcgacccttcggaatgtcccaggacgacttcgacggcaagcgactgcgaaaaagtgtgatgcggaagacagttgactacaacgcgtccatcatcaaggcactggaggtgattccataggtcatttagaatggaagtagattgactgcgaagttttgatttgtagtcgcagagaattgtattgttattattattataagatcaattcacccccattaaaaaagttcatttcaaaaaccattactagagctacacatttaaaaggccaatcgctataacattttgtaggttaatacgcggtaagcccgttacctgggctaccatttttaattagtttcggaccttgttatgtcgatatcccattttaaaatttcaaaaatatatttttgttttcgcagaaccgattgtaccagcgggactatcgggaccgtttggctttgcagccggacagcatttatgtgccccatatgctgccgccctctgcctacttggacaatccttcgaacgcggtgaccacaaggttcgtgaagacggctaccaataagatgcgatgtccgattttcacactggcctggacgccagagggcagacgtttggtaaccggggccagttccggcgagtttacgctatggaacggactaacctttaatttcgagaccattctgcaggtgggtttccgtcagcagatcccgtgggatcacgtctaatcttatgttgcccaacaggcccacgacatttctgtgcggacgatggtgtggtcgcacaacgacagctggatggtgaccggcgaccatggcggctatgttaagtactggcagtccaacatgaacaacgtgaagatgtaccaggcgcacaaggaggcgattaggggaataaggtatatagttgtaattgtcgaatgtatttaccattttgtagccgatgacaccagccgaccaaggcaaaaccaaagccagattcgcgttgctcacataattcctttagtttgggtcgcttgggcagtcatgggtatttattgttgcctaatcaacttagtggatcggttccctttagggctgttgcgaatacatatcaataaagccgtcaatatagcaacatgccaacatatagcttcgccttattggctacataagttttaacctcgcctccactagaacaaaaagactcaaatatgttgtaagcaccgaactcttctgtgatatatcaataaaaaatgaaaaataaaaagacaaagtgaaatgatgcaaatgcaatattgagaaaagctaacaataaaaccatctgactgagaacaaatgaaacctttgcacaattttctttccgcggccacaaaatcaacaataaataaaatgcattgtgttgcactgattgttcgaaaaatcgggggtttgagtgttttctttctcaagactgccgaataatcctggcccaaggacaatcgatcaagaaaatcggcattatatttatataaattatttagagctgtgctggtaacaatttactttttttgaagaaaatcttttggtaacttttaatacgctcaattattttacattcactgtaatttaagaggatttatttattcgatatctgtaagtcaaaaataaatttttaaagcatatttaaacattttattttgcaacaggccggtaaaagattttatattatattgtttcgtgtcacttaaaatgaaatgatgattctagatcgatttttggaagtcaaatgttttacgcactgtaaagagtttatattgtattatattattgtgagcttcgcgtacctagtcaagtaaaacttgatcctgaatttaaagtttaatcaatcaattcatcaaactaactccgcccacactcattatcatcatttaacccgtgttttgttacgttctaacgttctccaatgcaatccaccaaactcagtttcagtcccacggacagcaagttcgtcagcggcagcgacgacggaaccctgaggatatgggacttcatgcggtgccaggaggagcgagtgctacgaggtgagatttagtaggaggtagtcccaatacagagtctaaccatgtatctcaaaaaggccacggtgctgacgtcaagtgcgtgcactggcatccacaaaagggaatgatcgtcagcggaagcaaggacaaccagcaacccatcaagatttgggatcccaagagcggcattgccctggctactctgtgagtatttctttttggatgaatctttatcatggattctactgcacatactcacattttttcaatcatcaatagacacgcccacaaatccaccgtgatggatctgaagtggaacgacaatggcaactggctggtaaccgcatccagagatcatctgctcaagctcttcgacattcgcaacctgcgtgaggaggttcaggtcttccgtggccacaagaaggaggccagctccgtatcctggcatcccatacacgaaggcctcttctgctccggcggctccgatggctccattttgttttggaatgttgggtgggtcttagcattctgtttacactttaaaagataagtggattaatgacaatccccgctcgcagtaccgacaaggagatcggctgtgtggagacggcacacgacagcatcgtttggactctggcctggcacccactgggtcacattctgtgctccggctccaatgatcatacgatcaaattctggacgaggaacagaccgggagacctgatgagagacaaatacaatctgaacacattgcccgccagcctggctgctctggatgagtgtgaatacggtctgttatccctttttttgacctacaaaaccaatgcttttatatacccttttctcccaacagatgatgcaattatacccggaatgggacccgaggaccgggtggagtttactgaaagtttaactgccgacaaaggctttattcctggcttggatttggatccaagcaaagcaataaatgaccgcgaccgggagaaaaaggttccctacagcaagcccattccccgcaatttccaggtgaactgggcaggaccccggcgagcggacgatcccagcgtgctcagcattcacgaggagctggccgcccgagaggccaaggacaccaccaatggactgaaccaccagcaaatcagcgagaacacaatggagggcatcctggccagcggcatgctcaacggcctcgatccacagaccattgtcggcgttctcgtgtacaaccggttcattcgcgttcacccggactctcgactgatggctgctattcgtcagggagccgagtttctcaacaagtacatcgacgctggcaagctggaggagctcaacgatgtagtcccagtgagggataggtccagatctgtatcacccacagtggaggcacgtggggagatggtctccccgcccaccaagaagtcccgcttcgaaccacgtcagcataacgcccagttggtgtgcgttcgagaactaatgcaatgtaaaaagccctttctgcagtcactggtcgcggcgaaagcacagcaacccaacacggagtttgtggatgaaccgccgctggagcaaagggatcgggatcgcgaacgagaaggagatcgcgacagggagcgggagcgcgctcgcgaacgggagagagaccaatccggtggcaggcccaatccctgggcttccaatgcaccctggtcgaacaatggcaatcctggtggcaatggcaatggatccaatggctttagcaacaatggcgcggaaagtttcaacgaccgggatcgcggtggcggtggccaacgtcgccggcgtggcatcaacaactccggtcctggcaacggcggtggaagtggtggaggaggtggcgggggcagtggccgaaatcgcggtcgcaacaacaacagacgttactaatcgctatcccaccaacactgttttctgccaatctcctttgcatcttttgctttgtaatgctgaaatcaatttatattatgaaaagaaaagaaaagaaattcggtttgtaatatattatacgtgttgtgtgtaattttccgactttttttaagagttttttacaatggagtctctggaataggaattttacttacatggatatttgtttctctaggaataatcaagatttaacattttattctggttttcgaaccatttaggttgaagatgaaagttagcattttaggtactgtattggcagttcttttaattaattccgataattacaatttgatgttttagtaaatgatgagatactttgcacaaattcgctaacttaattttaataaaactgaaaatacacaagacaagtgtagttggagaacaactttgatttactttattaatggaactcctactaacaacgaaactagtgaatacgtttcagacagcaagtgagttgcgacgactgctgcggctactgatgctgccacgtctttcgctggcttcgccttgcggttcggcgtccatgtggttgctgctgtggctgttggtacgtgggtgtctgaacttctccttgatctcacgctcctcctcgcgcattcgatccttggtgtgctggtcgatggtgcgctgtattttctcggcagaagccaccagcttgtcggcctccaggatgacttctttcggcgtatggctgcggcttctgctgttactgcgactgctacgatgtcggccccggtgatcccggcgggagctagattgcctgcgggagtgcgagcgtgatcgcgaccgggaatagctgctggaacgagatcggcgcgtagacgccagctttcgattcttgcgctgtgacggcgttttgctgcggctgcgggaggatctgctgtggctgcgcctgaaagcaattgaatattcgggaacattaatagtaaaaattaaaaaaaaggtaagcgaaggaactgggaaggtcctttattttaaatttacctggatctcgatgagtaagatgactttcggtagtgggagcgacttcgtgacttcgagcgcctggaacgacaaacaattctatatttttaatagtaatctata

SEQ ID NO: 305 - DNA, 2162 bp, DROSOPHILA
ttcggaaagttactagttatttgcaacgcggcgatttgcaggtcgtttttacctatttagtctaagcattagtacacccaccaccgcgccaatgccaacactctagaaaacacgaacattttttgcagccaagcggaaaaagaggcattggaaaaaacagccgcaacatggacgtatcccagccgccaccgcagctgctcacggcgccctcggccctggccaccaacttcacatcgctgcccccgccgaacatgggcggccagcactaccgtcactaccatccgcaccatgggtccaacaagcacggctacaaccagttcaaacccttcatgcccggcggcttccagcgacccttcggaatgtcccaggacgacttcgacggcaagcgactgcgaaaaagtgtgatgcggaagacagttgactacaacgcgtccatcatcaaggcactggagaaccgattgtaccagcgggactatcgggaccgtttggctttgcagccggacagcatttatgtgccccatatgctgccgccctctgcctacttggacaatccttcgaacgcggtgaccacaaggttcgtgaagacggctaccaataagatgcgatgtccgattttcacactggcctggacgccagagggcagacgtttggtaaccggggccagttccggcgagtttacgctatggaacggactaacctttaatttcgagaccattctgcaggcccacgacatttctgtgcggacgatggtgtggtcgcacaacgacagctggatggtgaccggcgaccatggcggctatgttaagtactggcagtccaacatgaacaacgtgaagatgtaccaggcgcacaaggaggcgattaggggaataagtttcagtcccacggacagcaagttcgtcagcggcagcgacgacggaaccctgaggatatgggacttcatgcggtgccaggaggagcgagtgctacgaggccacggtgctgacgtcaagtgcgtgcactggcatccacaaaagggaatgatcgtcagcggaagcaaggacaaccagcaacccatcaagatttgggatcccaagagcggcattgccctggctactctacacgcccacaaatccaccgtgatggatctgaagtggaacgacaatggcaactggctggtaaccgcatccagagatcatctgctcaagctcttcgacattcgcaacctgcgtgaggaggttcaggtcttccgtggccacaagaaggaggccagctccgtatcctggcatcccatacacgaaggcctcttctgctccggcggctccgatggctccattttgttttggaatgttggtcgcagtaccgacaaggagatcggctgtgtggagacggcacacgacagcatcgtttggactctggcctggcacccactgggtcacattctgtgctccggctccaatgatcatacgatcaaattctggacgaggaacagaccgggagacggataggtccagatctgtatcacccacagtggaggcacgtggggagatggtctccccgcccaccaagaagtcccgcttcgaaccacgtcagcataacgcccagttggtgtgcgttcgagaactaatgcaatgtaaaaagccctttctgcagtcactggtcgcggcgaaagcacagcaacccaacacggagtttgtggatgaaccgccgctggagcaaagggatcgggatcgcgaacgagaaggagatcgcgacagggagcgggagcgcgctcgcgaacgggagagagaccaatccggtggcaggcccaatccctgggcttccaatgcaccctggtcgaacaatggcaatcctggtggcaatggcaatggatccaatggctttagcaacaatggcgcggaaagtttcaacgaccgggatcgcggtggcggtggccaacgtcgccggcgtggcatcaacaactccggtcctggcaacggcggtggaagtggtggaggaggtggcgggggcagtggccgaaatcgcggtcgcaacaacaacagacgttactaatcgctatcccaccaacactgttttctgccaatctcctttgcatcttttgctttgtaatgctgaaatcaatttatattatgaaaagaaaagaaaagaaattcggtttgtaatatattatacgtgttgtgtgt

SEQ ID NO: 306 - protein, 439 aa, DROSOPHILA
MDVSQPPPQLLTAPSALATNFTSLPPPNMGGQHYRHYHPHHGSNKHGYNQFKPFMPGGFQRPFGMSQDDFDGKRLRKSVMRKTVDYNASIIKALENRLYQRDYRDRLALQPDSIYVPHMLPPSAYLDNPSNAVTTRFVKTATNKMRCPIFTLAWTPEGRRLVTGASSGEFTLWNGLTFNFETILQAHDISVRTMVWSHNDSWMVTGDHGGYVKYWQSNMNNVKMYQAHKEAIRGISFSPTDSKFVSGSDDGTLRIWDFMRCQEERVLRGHGADVKCVHWHPQKGMIVSGSKDNQQPIKIWDPKSGIALATLHAHKSTVMDLKWNDNGNWLVTASRDHLLKLFDIRNLREEVQVFRGHKKEASSVSWHPIHEGLFCSGGSDGSILFWNVGRSTDKEIGCVETAHDSIVWTLAWHPLGHILCSGSNDHTIKFWTRNRPGDG

SEQ ID NO: 307 - DNA, 7914 bp, DROSOPHILA
ggcaagtggactacaaatgtggcggcagcttgataagcgagagattcgtgcttaccgcagcccactgtacatccatatacgagtgagcatgccagttagccccctgacccccagtcccgtgactgtaattttcctcttagggcgccccccaagtgggttcgcatcggggaccttgacctggcctccgagaagcggtcggtggaggcccagctgcttcggattgagcaagtgttcgcgcacccaaattacaaaaaaaagatgtactatgacgacatagccctacttaagctggagaaggaagtggagtgggtacccaacaagacagaagtgcgaccgctgtttgctaacacgattctctaagactgacggaatacgttagacctgtccgcctgtgggtctttccagagctgcccactacgatagccttcgcaatggggtacggcgcaacgagcttcgccaagcccatgacgaaccgcctcacaaatcttaacctgaccgtagtgccgaacgctgagtgcaacgccgagctgccgcctcttgctgaaactcccagtggagttctggaaagccagatctgcgcccaggactacattctcaacagagacacttgccagggggactcgggtggacccctacaactgaatttgccgggtcggcgccgagggcatagaatacactatcacctaattggcatcacctcatacggcgtgttctgccgcagtagttacccatcagtttacaccagagtgtcttctttcttggactggatcgaacttactgtttgggcctgacagatgcctacatcaggtttgtatgatgttgatgaaatttaagccaaaatatatattaaaagaaatggtatattctttccatttatatttcgattcttcctatggcatctgtgtgtatgtatatggaccaatctagcccaacaactattttcacaggagatatttaaatacattgctacaacattacactagtgaattgtaaaaataaattgtgctaaacagtggccatattgaaatttattttaaagttatattagataaacataggtgttagaaaggcaaaaacaaacatattttttggtaaattttgctgagaattgaatcattggttttagacttcattgttggcatcaataacaagttgcttcatgtcttcatagctgggctggttctacgagaccaagaaaagggttaaaaatacatagaaattatataaatctattgtgtagcgactttacaattaagagaataggccatcagcattagtaatcagcttactgtacaagcaagcagttaaacgaagacaaactctaggtctggtttggatcacgtacctgccaataattatcgtcccagttggggaacatgcgtttgaaaacccttggttccttgccctgggggacgcgaatgatgctcaccgtgtcgaaggagcgggcggtaggctctaaattaaagtaaagctgtaaatcaagaaaagacgtataattagacgtgatagaaagcgatggtgggaaacgagaaaacctttgccgtgtccagaagcttcccattttcctcctcagacacgccatagccaacccaaaggtagatctcatcgccagcatccagtagcattatgtcgtccgagtccaagtcctcttgctcgtattgagcaacttcttcaaccttcaaaaatccaccagagctcagatgacagtggaaaaggcgcgactccagcagtggagctccatcgtcacccaagctgcggtcgtactggccttcgccgtttaattcctcccagaactcatctggctcggcaccctcctccacctgctcgagctcaacgtcgtcccagtagtcagaaaagcgatcaaccgctgcttgtttttcgaaggcagatgcgcccaagccattccaaatgtagattttgtgggactttcccgaatgaaggacgaaggcatcacttgaggccaaagatgagctgtcggcggccacctcactagcatgaacatcactttcgacggtgccgcgaatgcggaaaagctgcgccgtcaccggaagtgcagtaaaggatgttaataacttccccttaaatatcttgtagaagtggcgcggctcgtggccctgattggtctggacaagaagaccatccttggaacctactagaccctcctcaaaagcacgtttcctagcggcagcagaggcctttactccatgccacacataggttagagaaccagtgtccccgttgttagcctcgtagttgtaagtgagcacataagaggcaaatcccaaaagaggaagtttctcatcgaagggaacggtgctgaccacgatctcatcggaaccaggctttgcaacgtactgtgtgatggtttcaataacgttctgaccgtgatccggcatgaacccaaaggcacgaccaccgctcttctttagctgagtcaccacggagtcgatttcgtcatcgtttaataattcatcggagccgatacccagagccgagcgaataaggcgactatgggacattccagcatcacgccaggtgtcaaagtactgcttaaatggggcggactcggagccctctacgatgcggtgaatttgggtccaggccgggtacttcttggtgcgtaggaactcctgcgccttggccatggcgtccgtcttctccttctgagtggcgccttttccgacccacacaaaaatgccagatccagtatccaaaataaagcactcgcgagtgtcgagcatagcctgagtgagtggtttttgtccaatgatgtccaccttcagcttgccgctggcgtcgctgaccttgtagagagaaaccgctgcggcatctgtcctctcgaaggcactatcttcgtcagcagttgactcatcgggcacctggtcagcagagcccgatcccagcacgtcgaagaagtgctgcttatcggcatcagtgctgaagtcgtcgacgatctgaacacgggctcgtccgttatgatcctggtccctgatctggtttgcagcgctgatagcctttagcttctcaacgcgcttggcctgggagcctacgtagacatatatatcgctgccggcatccaaaataaagcaatcacccgtgttcatcgacgacacggaaagattcacctgtcggacgcgcacgtttcgcttgcccttgacctggaatagtcgtgtttctccttgggcgtttgtctctacatgcttgaagccagttccgacgccgccctgttcatagcgaatgcctacaacaacattcagtttaatgaaacgtccaaatcggtttgactacttttaccgtttttgaaatagctcagaaacagctgggactcgtggtcctgcacctcgcgatgttgaacagggccaccattcagcaagtcatccaactggacggtgagaatagctgcagctccggcctcatcggtcgaggtctccaatcccagccagaagtgcacatcccaagacagttttttgtctttcttgttttcaattgtctaaatgaacataatgattcgattttggaaaagtttatgtgaggtattgcagaaaaatgtaaagtttattactaagctaagcacagatgcctttttacatgactttgacaaggttaaaaccttccagttgctaaccaagcagttcactccacgcgtttaattaaaactttaacaattcaaatgcatacttacattaagaacaataaacgagtccccagtgtaaaatttgccgtagttagttttgggatatataacgggctcaaaattctgaaaagataaaaaaaactattacctgatttccagagaagataatttccaaaaatgtctgactgtttggtataaacatttattctggtcatcgcctgattgtacacaaacgcatcgcatctcgaacctaataaatttggccgatgttggagttaattaacaagaaggatcagacgtctaatgtatacaagcaatttccatatatcttctcgggaaagatacattatgtatgtatatttataaacacatggccgccacactgcccgaattccagaatagaagcaaatgtctgccgatctcgagctggcgcgtatcgggcgccatccctccgccttcgtacccttctctcccagccttctgggtgccactgcataagcaccgcacctatcccatcgatgtcagcgcgatctgctccttacttacgcttatttattctattccccgtacccggcaagagaacaactaaatcccaaaatctgactcacctcgatgcgccagatttccaggccgggagtacggccggcgttggcgaaggaaggatgcatcacgcgtctggctgcctgcttgctgttctggccgctgggctgaatttcgccggattgtacgggaaacgcaggacgggcgttgagggtgccggctgagcacagactggacgagagggccaaaaacacaagcaggctgaaagagacaagcaaaaagctattatggcagcttaattgaccaaagataacagaactactctaaaaaaatatatattccactaaaggactcttgcgagtctatgagggttttctcttgattagtatcaccaacaagttgttatagccacgtccgtttctcagcccgacgcaaaatagtttatcagtttttattctatccaaatgatgcgttccgaaaagtcttctttgcaatgcaggtagggtatcacaaaatttgatattaaacaggtgttttcttcgatagttctttagtaaacacaaccgaaactatattttttgaaccagaaagatttcagtctgctacacgaaagcgacttttcttttggataatacaggtttcagggaaaaaggacaataggtggatatggcttacaacattcaggcactctattcacaattacgcgcaactccaactgatacaccgctctgtagggtgttcaagacatgaaattgtgctctctctcagcgcaattaaactagatacacctaaatagtacatccgactgtttatatgtgagtcatgaccataaaaggccacaaactaggcacaccacaactgccacatggggcaaacctggcgaaacctagaaatgaacacaaaagtcgggtgttgaatcacaccgcagccacttttacgcacttactctatttgaaacggctgttttctcgaattggtgttagcgatgtcgcgtacgactgctaaagttttgttaaaattcaggaactgagtacttatcaccccagagctttctggacagcgaactgctcgcttgcattacctggagaggactgccattgtggcggcgccggaggcatccatttcgagtctgcctcttctctggtcgacgaccgagggttccgaggagctttgtttattgttgcgataagtatctgtgagtcgcaaatagcgtatatgcccgatgtgtttgggtacgcgatcttttgtattggcctttatttttgtcgtagcgttggtttctagttcaaacagcggcagttgctcttccagatttaagcagagtgtgtggaaactgcaagtaagagaatcatcagggcaataagagaaggaaagatgttaatattttcgaacgaatcgctgagcactgatgtttaaccgccaacaagtacgcgtatgttatatacagccacccagaaaacaacgtctttaaataataataattgtcttcaacaataagagcttccccaaactcgtttaagctaaacttcctgatggatttcttaaatgtgagttgtagaatgctaaatgatacttaatatttcccgaaaagttgttctgctcaccagctcctctcttgtatgatatcatgtttgtatctcgagtgcgctgcttgatcagagcataatgttaaggagagcaaaaaaaaagtgccgcaagcgtgtaatcgcatattgtcattcagttaattagtttcacctgcgtatgagatcacgactgttttcgtcaagcggcaagcccatttggcccttccttgcaactgggtcacagccaaaaaaaaagaaatcagtttttattgagaactcagtatgggatggaatcatataagatttttaaattatgtcggcaagcacattagttccaatttgtaaaggcttgggagccagtcaggagtacgtcatacgtacttcgaaatgatacctatttgaaatgaaagtgatgggccacagcatgttcggaataatattccgaagccggccataagttggaccagcttgaattggttggataaaggcagttacccattttccagtgccaaaatcatacaaacggattcttggacaaaccgcgcgcatgggtaacatttaaacattcaaatgtgtatccaattattcaaatccaatccaaatgccaatgaagttggggataatttaacggagataaattaaccaaattttgtaggtaccatcaatttaatttgatcatattatacagtgttatgaatttattttttcaagaacacacagcttggtaaaaagctagtggcttatctaatataaaaccgacctcagttccgatgattgttttcaaagcagtagataagacaaatcaacgaccaatttaacgaaatgaactcagcaaaataatagctttgaaagttgttaatgtctatataatcagccttcaattgaaatcatttaggctagtctgaattttactttatactagagtaacctactattctgggcgatgttattacatattgctgataaaacatcatttaatttttggggcacacttacttgtaagtcaatacgatctgcgcaatttctcacgatcccagtgcgatgattgaataaaagcgcttcgaacgacaagcatgcagagctctgcctcagacactaaacgaaagccaaagctcgtcttcgcttttataatatttttcttaagcccgaaacgcgcgcgcgtccggccgagatcgctctctggggttgctgggacgattgataagcaaagcttcgtgcgataagcagcaaactgaacttaaaacagagtgaaaataaatttaaaagttcccagaaaagtatgtatgtatactaatctatttattactattttaatttggtggtggtagtggtttagtaatccgcagcggtgttagataggtagtcgcgacgtcctatgtttgaagcttgcttgttctgaacagcctcaagttttgggcactccgtgatgcgatggcccagaccaccacagtaggtgcagccatgcgagtcacccaggtccaggtgctggtgttcggtctcaggtgccagttcgtccaagaagtccgggacctcttgcttgccctcgattagcaggtgcttcaggtcgagcagaaccgactgctcggtagtcttgtttatcagcgtcgtagccaatcccttagtgttggaacgacctgtgcggccaatacgatgcacatagttttcaatatcgtccggcatgtcgtagttaataacgtgttgcacgttagggaagtccaggcccttcgatgccacgtcggtggccaccagcacatcttttttgcccacgcggtaagcatcgactgcccgcgatcgttcttcctgatcctttccgccgtgaatagccaccgcctccacgcctttcaacagcagatactcatgtatgcagtctacatcctgcttcttctcagcaaaaatgagcacgggcggcgcggtcttctgtaggcagtccagcaaatataccacctttgcctcttgcttaacgtactcaacctgttgggtgacgttcattgacgcagcacctgcgcgacccacatttattgtgacaggcttcacgagagctgatcgagcaaagttctggatcttttttggcatggtggcagagaataaaagtgtctgtcgctggcctttgaagaaagagaatatcgtacgaacgtcctcttcaaatcccatgtcaatcatgcggtcagcctcgtc

SEQ ID NO: 308 - DNA, 2909 bp, DROSOPHILA
cgatctcggccggacgcgcgcgcgtttcgggcttaagaaaaatattataaaagcgaagacgagctttggctttcgtttagtgtctgaggcagagctctgcatgcttgtcgttcgaagcgcttttattcaatcatcgcactgggatcgtgagaaattgcgcagatcgtattgacttacaatttccacacactctgcttaaatctggaagagcaactgccgctgtttgaactagaaaccaacgctacgacaaaaataaaggccaatacaaaagatcgcgtacccaaacacatcgggcatatacgctatttgcgactcacagatacttatcgcaacaataaacaaagctcctcggaaccctcggtcgtcgaccagagaagaggcagactcgaaatggatgcctccggcgccgccacaatggcagtcctctccagcctgcttgtgtttttggccctctcgtccagtctgtgctcagccggcaccctcaacgcccgtcctgcgtttcccgtacaatccggcgaaattcagcccagcggccagaacagcaagcaggcagccagacgcgtgatgcatccttccttcgccaacgccggccgtactcccggcctggaaatctggcgcatcgagaattttgagcccgttatatatcccaaaactaactacggcaaattttacactggggactcgtttattgttcttaatacaattgaaaacaagaaagacaaaaaactgtcttgggatgtgcacttctggctgggattggagacctcgaccgatgaggccggagctgcagctattctcaccgtccagttggatgacttgctgaatggtggccctgttcaacatcgcgaggtgcaggaccacgagtcccagctgtttctgagctatttcaaaaacggcattcgctatgaacagggcggcgtcggaactggcttcaagcatgtagagacaaacgcccaaggagaaacacgactattccaggtcaagggcaagcgaaacgtgcgcgtccgacaggtgaatctttccgtgtcgtcgatgaacacgggtgattgctttattttggatgccggcagcgatatatatgtctacgtaggctcccaggccaagcgcgttgagaagctaaaggctatcagcgctgcaaaccagatcagggaccaggatcataacggacgagcccgtgttcagatcgtcgacgacttcagcactgatgccgataagcagcacttcttcgacgtgctgggatcgggctctgctgaccaggtgcccgatgagtcaactgctgacgaagatagtgccttcgagaggacagatgccgcagcggtttctctctacaaggtcagcgacgccagcggcaagctgaaggtggacatcattggacaaaaaccactcactcaggctatgctcgacactcgcgagtgctttattttggatactggatctggcatttttgtgtgggtcggaaaaggcgccactcagaaggagaagacggacgccatggccaaggcgcaggagttcctacgcaccaagaagtacccggcctggacccaaattcaccgcatcgtagagggctccgagtccgccccatttaagcagtactttgacacctggcgtgatgctggaatgtcccatagtcgccttattcgctcggctctgggtatcggctccgatgaattattaaacgatgacgaaatcgactccgtggtgactcagctaaagaagagcggtggtcgtgcctttgggttcatgccggatcacggtcagaacgttattgaaaccatcacacagtacgttgcaaagcctggttccgatgagatcgtggtcagcaccgttcccttcgatgagaaacttcctcttttgggatttgcctcttatgtgctcacttacaactacgaggctaacaacggggacactggttctctaacctatgtgtggcatggagtaaaggcctctgctgccgctaggaaacgtgcttttgaggagggtctagtaggttccaaggatggtcttcttgtccagaccaatcagggccacgagccgcgccacttctacaagatatttaaggggaagttattaacatcctttactgcacttccggtgacggcgcagcttttccgcattcgcggcaccgtcgaaagtgatgttcatgctagtgaggtggccgccgacagctcatctttggcctcaagtgatgccttcgtccttcattcgggaaagtcccacaaaatctacatttggaatggcttgggcgcatctgccttcgaaaaacaagcagcggttgatcgcttttctgactactgggacgacgttgagctcgagcaggtggaggagggtgccgagccagatgagttctgggaggaattaaacggcgaaggccagtacgaccgcagcttgggtgacgatggagctccactgctggagtcgcgccttttccactgtcatctgagctctggtggatttttgaaggttgaagaagttgctcaatacgagcaagaggacttggactcggacgacataatgctactggatgctggcgatgagatctacctttgggttggctatggcgtgtctgaggaggaaaatgggaagcttctggacacggcaaagctttactttaatttagagcctaccgcccgctccttcgacacggtgagcatcattcgcgtcccccagggcaaggaaccaagggttttcaaacgcatgttccccaactgggacgataattattggcagaaccagcccagctatgaagacatgaagcaacttgttattgatgccaacaatgaagtctaaaaccaatgattcaattctcagcaaaatttaccaaaaaatatgtttgtttttgcctttctaacacctatgtttatctaatataactttaaaataaatttcaatatggccactgtttagcacaa

SEQ ID NO: 309 - protein, 798 aa, DROSOPHILA
MDASGAATMAVLSSLLVFLALSSSLCSAGTLNARPAFPVQSGEIQPSGQNSKQAARRVMHPSFANAGRTPGLEIWRIENFEPVIYPKTNYGKFYTGDSFIVLNTIENKKDKKLSWDVHFWLGLETSTDEAGAAAILTVQLDDLLNGGPVQHREVQDHESQLFLSYFKNGIRYEQGGVGTGFKHVETNAQGETRLFQVKGKRNVRVRQVNLSVSSMNTGDCFILDAGSDIYVYVGSQAKRVEKLKAISAANQIRDQDHNGRARVQIVDDFSTDADKQHFFDVLGSGSADQVPDESTADEDSAFERTDAAAVSLYKVSDASGKLKVDIIGQKPLTQAMLDTRECFILDTGSGIFVWVGKGATQKEKTDAMAKAQEFLRTKKYPAWTQIHRIVEGSESAPFKQYFDTWRDAGMSHSRLIRSALGIGSDELLNDDEIDSVVTQLKKSGGRAFGFMPDHGQNVIETITQYVAKPGSDEIVVSTVPFDEKLPLLGFASYVLTYNYEANNGDTGSLTYVWHGVKASAAARKRAFEEGLVGSKDGLLVQTNQGHEPRHFYKIFKGKLLTSFTALPVTAQLFRIRGTVESDVHASEVAADSSSLASSDAFVLHSGKSHKIYIWNGLGASAFEKQAAVDRFSDYWDDVELEQVEEGAEPDEFWEELNGEGQYDRSLGDDGAPLLESRLFHCHLSSGGFLKVEEVAQYEQEDLDSDDIMLLDAGDEIYLWVGYGVSEEENGKLLDTAKLYFNLEPTARSFDTVSIIRVPQGKEPRVFKRMFPNWDDNYWQNQPSYEDMKQLVIDANNEV

SEQ ID NO: 310 - DNA, 4296 bp, DROSOPHILA
cagcagccttgggccaggtaaaggatgcaccgggcggcctgcatgcgaaaggatcgatcggagacctccagctggtccaccagcttcatcacgatgccgcgctgggaggcggagtcctgcttctgccagttgggcggcaggtcgtacagctccatctggtcctcgaaggccttcacgttcatctgaaactcgctgaactccgtgtagctatacagttcagcgatctcgttctgatagccatccacgtccgcgtacacgaagtccaggtcgggcccgtcgcagttggcgtccgcatcgtgggtgtcctgctcaaaggagttgtttatggatgtgagcatcattccgccaatcctttttcgccacacagggatctcttttgtgtggaagtgtatgtgcgtgagtgtgggctactcgtgtatgtgtatcctgcggcggtgggcggtgcgcctggcgtgggcgtggttgctcctgctcgctggttttctctcccacttggtcttagtagcacatggacgtactaagcaattcgcactgcatttcactgggtaatttcgactgcaatttgtttctcgccaaaaacaaaaacgcacaatggaaaaagaagaaaattcgtacgaccgtttgctgtgtggtcggaaaataccaaacagcaaatggtgttggccgtctggcaaggccgttcgatcggatgtggcagcgactgatgcaattgccgctgctttaaatttgaaataagggttctgtttgatttgtactaatattaggaatagggattgtttcattttgatattttgtgtttacaaaatgataatcaatagtaatgatatatacaatttgaagctctaattaaaggcttttactttcatgcttaaatttagaaagtagggcttaaccaccacacttggcaactctggaaaagttgtgctcctagtgtgaccagaccagaacattacaagtgctttcacctacacatataaataagggtttttgcaagtcgccggtttcagttttatttacgcttcgaaagtgagaaagtgcccagttccattagtcattgctattacgccataagtaagcccaaacaataatacccagctgtcgagattaagcacagcataatcagcccaaaaacacagctggtcgaggtgacaagaatatatgtatatagagcagggaaaacagtcgaatcgaatctgaactttgctcccgattttcgcccatatcagcgtgagcttgcagaatctcggcattcgcattctatatttgtatccctgcatccgaaactcgcagcagatcgttgtgaaatcgtacacatagtcgatatatagctcagtaatggctggccgctccatcgtccacttttttctggggtccgtggcaatcgccctgggatcgtacatctacttcaccatgcaagtaattacccacaacactaactatcccttcaaattgctgtccaatcaactcgaacaatggcatgcatgtgcaatcagcgacggtaacgaggcagcgtcgtgggttacgtgggccaatcctggccagcttaaaggtcactgtgcgtagccactaggttgcgtgactcacagggtgctgggatatacatatatgtacatatagctcttgactttgaccccgatgaattatgcagcgtcactgtaaccagaagcctgatagcaccctcgtaaatgtctatgaaacaacatacaactattaggaaacccattatcaaaacgtgaaataatcttggatgtttgtcgtcgggttgtcgaatacaatctatacaccacatacatttccacactttcttattcggaaataagatagctttgagctatcttactactttacttactacttgctcttatctacttaactatttcgttaatcagtagaaatgtggacttgatttttatattttcccatttgaattgttttgaaacgattgttgttcgatctgatacacaacgtacacatccacaccagtaattccttcacttgcctaagctttcactaaatttgaacattctgcccggttattatttgcagcatttaaagaatgagtctcaggcagtttcagaacatttcccgccaggccctcaggtgctactcgatgaggcggacccctggccccgtcctcgagctgagtcgcggtcagaggcagtgccttcgcctctgcaccatcatgcttcccgtgagctgtgcggccacgcccatgaacgccatctcctcagccgcccagcactccacagcagctgccgtgagtagtgctgattgctagttgactagatcctaacccgttgactaactcagttgcttgattctgcgcctaactaaacgttgtagcctttgccactgcctgtgttctctgttctctgttctctgttgcctgttcactgcaatgaaccgcgtagcctgggtcgattttgatacagaatatagtgtttcataccccgattgaagataaggctataaatatctatatctcttgatcaaaacatcgacccaagccttcacagccactagtaattacccaattctaactcccactttctattgcttccagatcgacatgtctgctaacggagattacaagaacgccgcctcgatctacgagttcaccgtgaaggatacccatggcaacgatgtttccctggaaaagtacaagggcaaggtggtcctggtggtgaacatcgcctccaagtgcggcctgaccaagaacaactacgagaagctgacggatctaaaggagaagtacggcgagcgcggcctggtgatcctcaacttcccgtgcaatcagtttgggtcccagatgccggaggccgatggagaggccatggtgtgccacctgcgcgactccaaggctgacatcggcgaggtgttcgccaaggtaagactattaaagctgctagccgattgctgtagaccgagtcactaaacttgccccacccccgcaggtcgatgtgaatggagacaatgcggcgccgctgtacaaatacctaaaggccaagcagaccggcaccctgggcagcggaatcaagtggaacttcaccaagtttctggtgaacaaggagggcgtgcccatcaaccgatatgccccgaccaccgatcccatggacatcgccaaggacattgaaaagctgctgtagatgtgccctagacgttagctgctcttttggactgtgttttcgcgtagctttagcttgtaaccgtctggccacagatagtcttgtggccggccacatgcaccgcatggtatatatattgtctactccttactggttttgattcccacccgcaaacataataaacgccattcgtggttaccacactatcacctgggtgtttggcgacgccgggcacgtactttgatcggtagttggaactgtatcaattcggacttaccgtgtcaacgctggcgcgttcaatccgcttgctggaagcagcaatggtgttaagcacgttgatcctagactggatggactgcatcatcgaggatctggcgtttacggcgccacagcttaactggtttttacaagtgtcaaaaaggagtttatttttctgtttccaagccatatatatttgttaggtgactgtgaaatttggagatgtcatattaagggaaaaacgaaattcacaaaagaaaggtatgatgttttcaacggtagagcacaatttttgaaaacttgttcaacttaatgaccacgaaagctcgcattgttttaaaactaattaatctttgaaaggaccttgatcaattagtctgagttttagattttaaaacccatatttgcctttctctataatgatattcaaaacaagtttgctttaatatcctttagatatttttgaaagaaaagttactttttctgtgagtaggcaatatctgttttaaaatattcccccttaccaatttgaccttattggtggttactttaagtgcagaaagaagcaaaagtacttcacattaacctttaccttctttccgaattcgagtgctccgagtgttcgccaaatgctcgccaaacttcgattgcgcaagtttgcctgaccagcacccccaaaaccaacaaatgcgaatccgtcagcccattggggcgccgatctcgagctgctcctcctccagtggagcagttcaacgtctcggccggatttcaagttcaaaccagctgccaatggagcggcgactccgaccttccgacaattacatgaaaatgctgcactcaccatttacggatgccatcgaaattcgcagtggagatcaggcggagaaaaaccaaactgatgagctggagcgaa

SEQ ID NO: 311 - DNA, 737 bp, DROSOPHILA
gtttcagttttatttacgcttcgaaagtgagaaagtgcccagttccattagtcattgctattacgccataaatcgacatgtctgctaacggagattacaagaacgccgcctcgatctacgagttcaccgtgaaggatacccatggcaacgatgtttccctggaaaagtacaagggcaaggtggtcctggtggtgaacatcgcctccaagtgcggcctgaccaagaacaactacgagaagctgacggatctaaaggagaagtacggcgagcgcggcctggtgatcctcaacttcccgtgcaatcagtttgggtcccagatgccggaggccgatggagaggccatggtgtgccacctgcgcgactccaaggctgacatcggcgaggtgttcgccaaggtcgatgtgaatggagacaatgcggcgccgctgtacaaatacctaaaggccaagcagaccggcaccctgggcagcggaatcaagtggaacttcaccaagtttctggtgaacaaggagggcgtgcccatcaaccgatatgccccgaccaccgatcccatggacatcgccaaggacattgaaaagctgctgtagatgtgccctagacgttagctgctcttttggactgtgttttcgcgtagctttagcttgtaaccgtctggccacagatagtcttgtggccggccacatgcaccgcatggtatatatattgtctactccttactggttttgattcccacccgc

SEQ ID NO: 312 - protein, 169 aa, DROSOPHILA
MSANGDYKNAASIYEFTVKDTHGNDVSLEKYKGKVVLVVNIASKCGLTKNNYEKLTDLKEKYGERGLVILNFPCNQFGSQMPEADGEAMVCHLRDSKADIGEVFAKVDVNGDNAAPLYKYLKAKQTGTLGSGIKWNFTKFLVNKEGVPINRYAPTTDPMDIAKDIEKLL

SEQ ID NO: 313 - DNA, 3800 bp, DROSOPHILA
cggaacggttttctagaggggattacccagaaattatccataaagaaacgctaaaagttgatccctattaggctttcgcggtgggtgactatcacaaagcaccaatatttttgttattgttaatcgttagctcgcaaatcattatatactatgtgtaaatattattcatgccagcctgcggaatgcccccgattccattccagtccctgtccggagaatggtcatgtacagtgaaatatgctaaactcgaattcaaatcagtaagcccagttatgaaaaaaatgctaaaaaaaatcagttgaacatgttttccaattgaatagtgatttggctttttacaaggattttaagtaacataagttttaaactgcaaacaaaagaaaaaatatttatatatttaaataaaaggtttacaacatgtttattatatcttagagtaatggtacgcagatataatgacttggacggttttagatatgaactaggttgtacaaaacttcattagttcttgatttgtgaataatttgacccactgttgcatttcgtgattatagaacttttactgtacttgtaaaatgtgcactgtaagcgtcgacgaggcgcgcttccgttaaattcaattgaaatataatggagggcggttttgaattgcgccgcccgtccgatttctcttctccatgctctttggactttaccgcgcaaaacagtaaacaagtgaagtgttttaaatgaatttgggaatgacataaatatacccttcaaatgcatcaggagattaaaagaaaaacccttcaaaacgccatattttagatatttgaatttttgaatatatatagattacttgattttcaaaatttttataaaaccaaatgtatgagccgctgatatacccccttatcagatttcatgggcacagggtagcacaacaaattcgccggcatccacatccgccgtgtcggcatcttcgagtcaacagttgtgagcttccttcgccgtagacatgatcactgctcgtctcctgctctcgctgatgatgccagtgctgctggacgcagctgctccgccacgacggccgaatgtggtgatggtgatctttgatgatctgcgtccagttattggagcttatggcgatacgctggccagcacgccgtatttggataactttgctagaggaagtcacatctttacaagagtttacagccaggtgggcagcctgtgatcattgatgtgcggacctaataaaacacatatatattgaatctttagcaatccctgtgtgcacccagccggaattcgctgctcacgggtcgaagaccggatactctgcatctgtacgatttctacagttactggcgcactttcaccggaaatttcaccactttgccgcagtacttcaaggagcacggatattacacctatagctgtggaaaggtcttccatcctggcctctcatccaacaacacggatgactatccccttagttggtcggctccagcatttcgtccccgaaccgagcagtttatgaactcgccagtgtgtcccgataaggagggcattctgcggaagaatctcatctgtccagtggagctacaaactcagccgtacaaaacgctgccggacatcgagtccgtggcggaggcattgcgctttgtgggctcacggagcaggcacagccaggaaccattttttctggccatgggcttccacaagccgcacattaatttccggttcccacggcaattcctttcgagattcaacctttcccagttttacaattacacggaggatagcctgaagccgccggatatgccggcagtggcctggaatccttacacagatgtgcgggccagggatgacttcaagcactccaacatatcctttccctacggaccgatatccccactccaggctgctcagatacgacagagctactacgcctcggtgtcctatgtggatgatctgtttggcaagttgattgggggattggatctggatgagacggtggtggtcgctctgggggatcatggctggtctctgggtgagcacgccgagtgggccaagtacagcaacttcgaggtggcgctcagggttccactgatcataagaagtccacagttccctgtcgcccaaacgaagtactatcacgggatcacagaactccttgatgttttccccactttggtggatctggcaggattacccaaattggacaaatgccagagctctcaggagttgacctgtggcgagggaaaaagtctttaccatcagctgatgggattgggaaggggtaagttgctttgtatgtgatatataatgtatttaatgcaatcacttccagcggatgagcacgtggctctcagtcagtacccaagaccaggaatgctgcccacaaagcacccgaacagcgacaagccgaagttaaggaatataaaaatcatgggctatagtctcagaaccgatatatataggtataccatgtgggtgaggttccatgcgcaaaactttagcagaggtaagagaatatcaatagattcaattaataaccatattaattatatattaaatataactcccttcagattggcacgatgtgtatggcgaggagttgtacgaccaccgcctggattcgggcgaggaattgaacctgatgcccctgccgcagttcgatgatgtgcgtcagcgccttcgccggcgattgatggagatggtgggcagctagtggagatcggctgtcccttccccttcgaatccctctgattttgaatgaattcataagcaataaaggcagcgcgacaaacgatctcgagacggcgaaatatcttgtcgccataattggaatttaatacttccggttgggcaacaacgtttgcaagccgcgagacgcccagacatgctgcatatttttcgctgtaatttctgcgatgcccccgccttggggaccgcctcacccccaaatccccccgagccgcccaaccaatctatatatgcacaatatacaatccgatccactgcgagccgcgcatgcgtgactggtgtccattgcctttttggcttcgtttttgtggatttttgtgaatgaaatgaatgaaatttcattcaacgttggcggcgcgcgtctcgctgcgttggcgtcggcagcgccgtcgacgcccaaatcgggagaggatggggagaggagagggggctacgttggcgactctttttcgagctttcattttctcttcggtttgttgccatgccagtgaaaagcagagcacagaaagaaattctcttgcaaactatttactgtctttaccaaatttacagatacatctacaggtacagatgaaaggcttgctgagatagatagcatggtaagatacttcttgttatatgcactttttaaaaagcgcctagaagcaggcaagaaataattgcattcttgttacttgttaaaaagacagaaatagcacatcgtaaccactggttttttcctgtgtatttcccagtctggtaattaaatctgcagcccgctgcttgatcaatgtgattcccccccgggtccccccggggaccagccccccagccccccagcccccgccttcggcccactctttctctacgtgctctctaatgtgcatatttggtgtgggctgcgttttgggttcgccatgtgggctgtctcctccggaggtgattaaactgcattttggcagcactttcaaccacacacttttcgaaaaatatgtgccccaagagggcgtggccatttcaactttatgatttttgtcatatttctcgagactttgtggcttttacaa

SEQ ID NO: 314 - DNA, 1620 bp, DROSOPHILA
atgatcactgctcgtctcctgctctcgctgatgatgccagtgctgctggacgcagctgctccgccacgacggccgaatgtggtgatggtgatctttgatgatctgcgtccagttattggagcttatggcgatacgctggccagcacgccgtatttggataactttgctagaggaagtcacatctttacaagagtttacagccagcaatccctgtgtgcacccagccggaattcgctgctcacgggtcgaagaccggatactctgcatctgtacgatttctacagttactggcgcactttcaccggaaatttcaccactttgccgcagtacttcaaggagcacggatattacacctatagctgtggaaaggtcttccatcctggcctctcatccaacaacacggatgactatccccttagttggtcggctccagcatttcgtccccgaaccgagcagtttatgaactcgccagtgtgtcccgataaggagggcattctgcggaagaatctcatctgtccagtggagctacaaactcagccgtacaaaacgctgccggacatcgagtccgtggcggaggcattgcgctttgtgggctcacggagcaggcacagccaggaaccattttttctggccatgggcttccacaagccgcacattaatttccggttcccacggcaattcctttcgagattcaacctttcccagttttacaattacacggaggatagcctgaagccgccggatatgccggcagtggcctggaatccttacacagatgtgcgggccagggatgacttcaagcactccaacatatcctttccctacggaccgatatccccactccaggctgctcagatacgacagagctactacgcctcggtgtcctatgtggatgatctgtttggcaagttgattgggggattggatctggatgagacggtggtggtcgctctgggggatcatggctggtctctgggtgagcacgccgagtgggccaagtacagcaacttcgaggtggcgctcagggttccactgatcataagaagtccacagttccctgtcgcccaaacgaagtactatcacgggatcacagaactccttgatgttttccccactttggtggatctggcaggattacccaaattggacaaatgccagagctctcaggagttgacctgtggcgagggaaaaagtctttaccatcagctgatgggattgggaagggcggatgagcacgtggctctcagtcagtacccaagaccaggaatgctgcccacaaagcacccgaacagcgacaagccgaagttaaggaatataaaaatcatgggctatagtctcagaaccgatatatataggtataccatgtgggtgaggttccatgcgcaaaactttagcagagattggcacgatgtgtatggcgaggagttgtacgaccaccgcctggattcgggcgaggaattgaacctgatgcccctgccgcagttcgatgatgtgcgtcagcgccttcgccggcgattgatggagatggtgggcagctagtggagatcggctgtcccttccccttcgaatccctctgattttgaatgaattcataagcaataaaggcagcgcgacaaacga

SEQ ID NO: 315 - protein, 512 aa, DROSOPHILA
MITARLLLSLMMPVLLDAAAPPRRPNVVMVIFDDLRPVIGAYGDTLASTPYLDNFARGSHIFTRVYSQQSLCAPSRNSLLTGRRPDTLHLYDFYSYWRTFTGNFTTLPQYFKEHGYYTYSCGKVFHPGLSSNNTDDYPLSWSAPAFRPRTEQFMNSPVCPDKEGILRKNLICPVELQTQPYKTLPDIESVAEALRFVGSRSRHSQEPFFLAMGFHKPHINFRFPRQFLSRFNLSQFYNYTEDSLKPPDMPAVAWNPYTDVRARDDFKHSNISFPYGPISPLQAAQIRQSYYASVSYVDDLFGKLIGGLDLDETVVVALGDHGWSLGEHAEWAKYSNFEVALRVPLIIRSPQFPVAQTKYYHGITELLDVFPTLVDLAGLPKLDKCQSSQELTCGEGKSLYHQLMGLGRADEHVALSQYPRPGMLPTKHPNSDKPKLRNIKIMGYSLRTDIYRYTMWVRFHAQNFSRDWHDVYGEELYDHRLDSGEELNLMPLPQFDDVRQRLRRRLMEMVGS

SEQ ID NO: 316 - DNA, 4491 bp, DROSOPHILA
ataataataaccttaccacaaagtcgtctgtgcgtatttcggtttggatcatatgattatcactttttttacttttactctgatcgctggcacttttatatctgccagcattggcaggattcgagttggaattcgggggacccgatgatgggccaccggacgactctaaatgctgtgtactaccattttcgcccccgggatgtccgctgttttccgcccgttcctcgcgcttcttcttgcggcgttccttgtccagcatgcgcatcactttcttgctatgcgacgactttcgcacctggaacacctcgccgtcatcctctgcaaaagaattggggattttggctccatactctttttatattccggtatcactcaccatcatctgcgaagctgagcagcgcctttggcttgctgttgtcctcctgcggctttatggccttccggctcttctctttctccctcttgcccgaaattatgggaggcggtggcgcctccatttcggcgtccggatccaaggatgcgccgtcctcctcttcgtcagcgttgctggagaacacgcgtcgctgaattttcttcggtttgcgaaaaagcgacattttccacgatgttgttgttactctgcgatttgtttaatcaatgaaaaatcggaagaaaagcgaattttcgcaagatctcttcttcttgctgtcgtattgtaatagagatgaaaatctttcgatgtcgttctcgtgctcacgtgagtcacgagcagggctggaacgttaattctcggtcctcggtctagcacttacaaaacttttctgtattgaaaatatgaatagctttacaaattttgaaactattgtaacaattaaataaaaatgtgataaatacattaatttgtatacccagggcagctacacataaaactggtcttattaaaatatcggcaagagcttagatgacttttcatccctagataccgacaacggccatctctaatctctgaattcggcgaccgcagggcgtttcaaaacagaccgaaaagtcgttaacttattggtgccttgagtcacagaatctctaacatgggccttaaaggttgtgaattgcaattggacaacccgtggaacacctactacgccggtcagacggtcaacggccaggtgaagtttacgttcgactcgcccaaaaaagtccgaggtaagtgcgaatccaagtcccaattgtgggcagcgctggagaatgctaattaaaaccccagctgcttactattactcataggagtgacgacacctgtgtaagagtcaatgattaattggaaatttagtaaataaatatacatagcactttcgtcttcaatgtgcaggatgttcactggctgtcgttggtagtttccttgctaacttcttaaaatcctgacgcaaaaagccggcgcaccacccacaaatgtcggttgctctttcggtgcctaaacgaccttgttttcagaaagctggcggttgttaaaccctccaaagaaatgcactttctcctcttttcagttgggcgataacaactataaatagctccaagtgtgaatgaatacaaaagaaagtaaataaatatgtagtacatttgacgggggcatgtaacctatgtggcaaacattccaccataatcaaattttgaggtcaccaaacacgggagacagatgctgcctggtagcgatgatgtcatccgttgagtatgccttagaaagcttttcatattatttatagctaaaattaaagcgccacagtgacgtcgtcgattgtcattccgtaaatacagccacttgtttctcgtaggtattatcattcggttcctgggagaagccaacaccgagtggtcagaggagaagagcgtaaccaccagcgagggcaagaccgagaacgaggtcacccaactgaaggggcatgaggagtactttaagatccagtactatctgctgggcggcaaaaacagtaagtacaaaaaacagaccgggaattcactccccggttgccagaccttagtttatctgaaaagaattggaggatttaattattgaaagtgtctattattaagcataaatttttgtattctatggtgtaagaattggccaagaagatttttgtttaaaattaaatttgtccttatatgaatcgaataaatgggattgcacttcctcgctctatataaaataataactaaatcttgtaattactatacaccttatagcattaataacttctccttttgaaactacaataatttaatgtttttatttagctttattaaataatataccttgacagacccttcctctgcgcgtaagaattgaaaacataataagctataagtgacctttttaaaatgctaaaagttaaatgtatgattttgcaggctctgagacggaactaccgcctggcactcacacttatccattcacctgtgctctgccgcctaatctaccctcatcctttgagggcgaatttggccatgtgcgctataccatcaaggtgacgcttgatcgtccgtggaaattcgatcaggacatgaagatggcgttcacagtaatagcgcccgttgatctaaatctcaatcctcgagtcaaggagccattcaagctcgagctagaaaagtcattctgctgtttttgctgtcgctcaggaccgctggctgtcatcacgaacatcccgcaaacaggattcgtttcggggcaggtgctgcccatcacctgcgaggtggacaacaccagcaacgtaaatcttacggcagtgaagtttgaactgcgtaagctggtcaccttccacacaaaccagccacggagcgagaagcgcgagtccaaggtgatcatagccaacttaagtgttggcccagtcaatggcggcgagtctcgcacgtttacgcaacaaatggagattccggcgctgccaccgaccaacctcctcaactgcgggattatcgctttggactacgacctgcatgtggagtgcgaggtgagcggtccgcaccgcaatctcactggcaaggtgccaatcaccttgggcactattccattggctggcgtacggccacctactcaatttacggatgctccgtcggcggttcagtccgaggatccatcgctggcgcccacacagccagtgagcccggcgagccctcctggcggcgatggcgtgggtggtgctctaggctggaacgtggctgacagtactggtggtggttcactgtatcctaatatacgtgagtattaaaattatggagttttgtggattttcttttaaattataaaagcttcttagtagggttatatatctttatttattaaaatattctattttcattttgcagcgccaccgcagtttgtggagacacagtaccgggcaccaacgatcgccggtagggacgactccgagcatacgcagatgatcggcgacggagccttcgcacctcggtatccgactttccagtttaataatgccacagcaccgccagctagccagtgattgaatctctaagctagacccacaatgatattcttaaactttgatgtcgaactattttcttctggctgtctctgtttctggagggttagctttcgcaatttttatcggctttgcatttatgaaatattagctttccgtccaaatagaaagcataaacaggtgcagtcaaaataaaaaaggtctacctatacaaagtttttgaaatgcttaacttctgtttataattaaatagctttcggacagtaaatacaaagaattgggtctttattattttgactgcatctgtgtttaatttaataatcgtataaatacgcacaattgtcaattccgatttaaactgctcaaatttaattttttctgtttttttttaagccagcaatagtgcctaaaactgatgtacgactataatcgtaataaaacacaaaagataatgaaggtttgatacatgggcatagccaaatcctgggagccaaaaatgtgttgagccttgaggaacttgttttatacggagcattgggagatttaagaacttggaatgatggtgctatcgttccatatttacttcttctttttcttgcagtattcattcagttccctggcctttcttgctttcttctcacacttgcactgttccttcagagctatttttttgcatttggccttgaggatcttcatcttctttttcctttgtctaagcttcttttcggctatttttttgcatatctgaaaaagtccttcgggattggctttcggcttcggtggtgagggtggtgcggctttagatggtggaggggatggattagcagcttttggtggttgggcaggaggcggagatggcgttttagcgatctccttcttcacctccttctttacctcctgtttgatgttctctttgacatccgttttagctactggagcagatttgctagcattcttcttaacttgggctgcttccttgaacttgtatttagcgcatacatcaacttcttttggtttttgc

SEQ ID NO: 317 - DNA, 1336 bp, DROSOPHILA
cagggcgtttcaaaacagaccgaaaagtcgttaacttattggtgccttgagtcacagaatctctaacatgggccttaaaggttgtgaattgcaattggacaacccgtggaacacctactacgccggtcagacggtcaacggccaggtgaagtttacgttcgactcgcccaaaaaagtccgaggtattatcattcggttcctgggagaagccaacaccgagtggtcagaggagaagagcgtaaccaccagcgagggcaagaccgagaacgaggtcacccaactgaaggggcatgaggagtactttaagatccagtactatctgctgggcggcaaaaacagctctgagacggaactaccgcctggcactcacacttatccattcacctgtgctctgccgcctaatctaccctcatcctttgagggcgaatttggccatgtgcgctataccatcaaggtgacgcttgatcgtccgtggaaattcgatcaggacatgaagatggcgttcacagtaatagcgcccgttgatctaaatctcaatcctcgagtcaaggagccattcaagctcgagctagaaaagtcattctgctgtttttgctgtcgctcaggaccgctggctgtcatcacgaacatcccgcaaacaggattcgtttcggggcaggtgctgcccatcacctgcgaggtggacaacaccagcaacgtaaatcttacggcagtgaagtttgaactgcgtaagctggtcaccttccacacaaaccagccacggagcgagaagcgcgagtccaaggtgatcatagccaacttaagtgttggcccagtcaatggcggcgagtctcgcacgtttacgcaacaaatggagattccggcgctgccaccgaccaacctcctcaactgcgggattatcgctttggactacgacctgcatgtggagtgcgaggtgagcggtccgcaccgcaatctcactggcaaggtgccaatcaccttgggcactattccattggctggcgtacggccacctactcaatttacggatgctccgtcggcggttcagtccgaggatccatcgctggcgcccacacagccagtgagcccggcgagccctcctggcggcgatggcgtgggtggtgctctaggctggaacgtggctgacagtactggtggtggttcactgtatcctaatataccgccaccgcagtttgtggagacacagtaccgggcaccaacgatcgccggtagggacgactccgagcatacgcagatgatcggcgacggagccttcgcacctcggtatccgactttccagtttaataatgccacagcaccgccagctagccagtga

SEQ ID NO: 318 - protein, 422 aa, DROSOPHILA
MGLKGCELQLDNPWNTYYAGQTVNGQVKFTFDSPKKVRGIIIRFLGEANTEWSEEKSVTTSEGKTENEVTQLKGHEEYFKIQYYLLGGKNSSETELPPGTHTYPFTCALPPNLPSSFEGEFGHVRYTIKVTLDRPWKFDQDMKMAFTVIAPVDLNLNPRVKEPFKLELEKSFCCFCCRSGPLAVITNIPQTGFVSGQVLPITCEVDNTSNVNLTAVKFELRKLVTFHTNQPRSEKRESKVIIANLSVGPVNGGESRTFTQQMEIPALPPTNLLNCGIIALDYDLHVECEVSGPHRNLTGKVPITLGTIPLAGVRPPTQFTDAPSAVQSEDPSLAPTQPVSPASPPGGDGVGGALGWNVADSTGGGSLYPNIPPPQFVETQYRAPTIAGRDDSEHTQMIGDGAFAPRYPTFQFNNATAPPASQ

SEQ ID NO: 319 - DNA, 2877 bp, DROSOPHILA
ttccaccgtaactctcgcagaatatatgcagcggcacctcctcgaactctggatgcagggtatagaatcccttcatcagctcaaccaaatctagagcgatctccttattggtggccgtgtaaaaggccgtgttgtccacgtagctaaaaccactgcctacggggttgtcaataaagaggacattcatgtccttcacccaggtccagctgcgccaatctccgtacaaatcgacgggcccaagttcttcaaagtttccataccccgtcgaagaggcaccgggacctccttggagccaaatggctaatggtctttcggtatagctcgaaacattggcggtggtgtagtacagccagtagaacatgtgggcaccgggacgcacatctacgtagccccagtcctgctctccgggaccgtatccgggtttgcctaggatgcgccattagttcatttaaagattaccacatttcagagatagcgctcgatttacgattcttaccatgcgccaaggcggcgaacaatgccaggagtgctaccaaccgaatcgacattttcaactgaaagtgatactcaagcgcacgggcttatttaacgggtacagcactatcagcagaacttgacatcagataatagtttttcaaaaatgataacttctatcgatctggttctttcaatcattcagaagagggatgataatcatttttgaatttgtatattcccttttaaaaagaagttgaatatctgtttatgtacgtatatttaggtacaactaatgttgaaacgataacttcctccataaataatccctttttcataaacaattttacaatattgtatattattattataatgggtggaattgttttgcctaaactaaaaccaaatgcagatctcaactgataagaccatttgaattcgaataactcgaattatcggttatcgatagcgttcaaatggctggcaactctgcgatgttggctgtttttgcacaaacagctgttgtcgcactgttgttgtcgcctttgtgtctgcaggtgcaaaataatatattaattggattaacttgggattaatcgagcgatcacagccatggccacgatgcgcatacccaaacaaaaggtgatcctgtgcggcgactacggagtgggcaagagctccctgttccggcgcttcgccaccaacaccttcatcacggatacggacaggaaatccacgttgggactggaccacatcgatagggaatacagtgtgaatgaaaagcagatcaaggtgggctcgggaacctctaaaagggcgtgatggctgagatatgaatccttaagctctttagttcgatttctagacgaaagccacagttcttcagacttacaacttattgcgttgtgagacacttatgtatataccgtcttctttgacagctccaactctgggacaccggtggcatggagcgtgtggcctcggtcacatcctcgtactacaagttcgccgagggagccatcctggtctttgctttggacaacgccgcttcgttccactcgctgtcgcagcacttgctggacattgtgacctatgcagagaatgccaagatcttcatctgtggcaataagagcgatctggatggcagggagccggaggtcagcgatgaggaagtggaggccttctgcgagcagtgccactcactgatcagtgccacgtacaagacctcctgtcgcagcggcgccggtgtggaggagatgttccgtgacatctctaggcaactggtccacgccaatcgctccaaaatggaactgcaggcactggagcacaagagcttccaggtggacactgcgagcagcggcgcggcgaccaacgaggaggacgcctcctcctgcggctgctagcagttggggaacattgagttcggctaggaacccttattcccgccaggctcaatgctcacgcagagatgcatttttactgtttcctttatttattgatagctttcggctatgttatgatttttagatacgtacatgttcaattcgaatttttacgaaaaatacgtcccgaacgcgaacacgagtcatagagtaggattagtttctattaaccaggcgccaaacattaaccacttaaactttgtacacgtaagctaggatggcggatacgcgagtgataggttagaaatctgcggtaagaattaaaaagtaataggaattccatcgattaacaagaaggtcaatttaatcttaaaggtaaaaggacaacaaaatatatagacatcgattgaccgcagataactactctaagcttcgactcttattgcacgtaatactccatcctatcttatatagattagtgcgtaatctgcagctttcttccacagaatatctcgtaaaaataaaatatactaaacaataaataatcaactcacgaaattggaatggacaggcttctataacatttgaatttgggctaagatcattggctattggtttgctagctaaaattactacgacgaggcggtgctgcttgaactgggtgcgaaggtcagatagagactgacgcccacggccaccacaaagcagacacccactccatacaagaccaccttctcccgcagggctcttaacatcatggtattcagagtgcgagaagctcttcccagctcggcattggtttctcgaagtcgagccctggctccctgtagagtttccctttggtggtgcagatcatttaggacctgggcgcccagttgctccgtctccaaggccactctgtacccttcggttaacctgttgcccgtccgttcaatcctttccgagttgtccaagaggcgttggcgttgatctgtacttatggacacatcctcatagctgtcacccaagtccagagtggtga

SEQ ID NO: 320 - DNA, 728 bp, DROSOPHILA
cgcactgttgttgtcgcctttgtgtctgcaggtgcaaaataatatattaattggattaacttgggattaatcgagcgatcacagccatggccacgatgcgcatacccaaacaaaaggtgatcctgtgcggcgactacggagtgggcaagagctccctgttccggcgcttcgccaccaacaccttcatcacggatacggacaggaaatccacgttgggactggaccacatcgatagggaatacagtgtgaatgaaaagcagatcaagctccaactctgggacaccggtggcatggagcgtgtggcctcggtcacatcctcgtactacaagttcgccgagggagccatcctggtctttgctttggacaacgccgcttcgttccactcgctgtcgcagcacttgctggacattgtgacctatgcagagaatgccaagatcttcatctgtggcaataagagcgatctggatggcagggagccggaggtcagcgatgaggaagtggaggccttctgcgagcagtgccactcactgatcagtgccacgtacaagacctcctgtcgcagcggcgccggtgtggaggagatgttccgtgacatctctaggcaactggtccacgccaatcgctccaaaatggaactgcaggcactggagcacaagagcttccaggtggacactgcgagcagcggcgcggcgaccaacgaggaggacgcctcctcctgcggctgctag

SEQ ID NO: 321 - protein, 213 aa, DROSOPHILA
MATMRIPKQKVILCGDYGVGKSSLFRRFATNTFITDTDRKSTLGLDHIDREYSVNEKQIKLQLWDTGGMERVASVTSSYYKFAEGAILVFALDNAASFHSLSQHLLDIVTYAENAKIFICGNKSDLDGREPEVSDEEVEAFCEQCHSLISATYKTSCRSGAGVEEMFRDISRQLVHANRSKMELQALEHKSFQVDTASSGAATNEEDASSCGC

SEQ ID NO: 322 - DNA, 4652 bp, DROSOPHILA
tgcgcttaacatggaacaagaagtatttgtattatataggattctgaggtggagtcaagatcaatatacaatcaacaccaatagccgtaaatattgcctaccttagagaccatggctacatccaatccatagtgtccaaatatcaggttgcccagaaggacaaagaaggtcattgtgtatatggtgtccgtgctgatggcctgcgttagggtgtgcagcatcggtgagaataagtagccgaagaggaccactgtgaccagggttttggaatcctcgcccagcagggcccagctgagactccttcctcggtagcacaggtatccaatgcctgtgatcccgcaactgggtaccaggatcgtggtgggcgacacgctgtcgctgagcataagttggtagagtattaggaagccggtgatgcaggagatctgattattaagcactgtaataccggcaattgcttcgccgaacgtgtatattctacaatgtagattcgtgcgcagatccttcagaaagctggcatccgtgtagttgtccggatattcccggttggagtacaggttcttcacccatggctgccgtttcgattgcccattttttaccattcttaaatttaaaaattgtttgtttacaattctattagtgctgggttatcagcgttcgatagtatcagttactatcgacatatcgatattgttttatccactgaaaagtattgaaagtaagtgctggtcacactgtcatagtgatgcatgtttcacttgaaatatcgatgatgatagtttaatttgaaatattaataaactgttcattatctaaacaaggggttttacagcaagctaataatatacaaatcttattctgaaaattatccccaagcagaagtgactcgcctacatcgataagaacatccgctggtgttgcgcaaaacagttactcgagctatcgatacttgttcgagtggttgaaccaccactaccttgaattcggaaattttttgacgcacttgtttgttttgtttacaattacgccacgaaagtaaatcggcagctacgaaaaaacattagggattcgtgcggcgggtaaacgatcagtggacagtgaagcagtccgtccggggagaacgccccatgagcagttttacaaacaaatcgccggtcgcgtgttctctcgccagagaaaccccagaatttccgagaatagctatttatggcttcgaatgcgcaactcgggaaaatcattttgatatctgcaatcgccgtgttcttctattacttcttttgggtggccgtcctcccgtttatgctcatcgatgaaggtgagttttccacggcttccgttattcacccgctaatacataagttttattgaataatctcgcgcttttgtatagtaattaaagtgacgccgcggcgtaaattggtcacgatgttcaattatatatagttggcagtgtacgaggatgaacccgtgtgttttacagaggtgaccaccctaacacgggttacctggaatgcggctgtacgatgctctaagctcgggtcaaggtcaccgacgactagtgatgataggagtacagtattcgcccgatatgtgcacagtcaaactagttagctattgtagagtctaggcatgtacaatcagcgataaaaacgaaaacgtgcttaaccagtggtaccactgtattatgtggttccaaatctgggtgtgtacttagctaattattttcggtagtttttccgcctggatattggctcttcactttatacgtaaatatttcatgatcgtagttttgccgttccgtgacaattttaatttgttgctattaagagtaatcataaaaacaatatacttacgtattttctttcctggcctgttatcaaatgaaacacttgtgaacatgagtatactttacaaacttttacaggcaatcccattcggctgttctttccaccgctgaagtacgctttcattgtgcccaccgtgttcggggtgatcttcctcggcggcatcgccgcgttctccttttaccacatctggagcctgagagtgaaacgtgattaagggggttatccggggggttatcttgctcggtgcgaacgcgaacgtacgattccactgaaaaacaaggaagagcgatagtcagtcgtggacaagatgccgcagtggctggtcattggtatctcgggagtcacctgtggtggcaaaactacgctagcccacagcctgcacgactacttcaagggtctgagaggagcgccgctgtggaactcgccgtacaccattggcgaggtgcgtctgatctcgcaggatgactactttctgcccgtggaggacaagcgacatcagcgaaatgaggcgctcaacgccatcaacttcgagctcatcacctcgctggacatggccaagatgctgaacgacatagcgcacataatcaaggggcgccatgtggctcccgagccacaggagcaccttgtgacgtatgccaacttcgagcactacgcccagcagttccagcagcagtaccagtacaatgcgaactactacaaacaggccaatggcggggtctatcaatatccgccacagcagcacccgagacatcacccccatcaccagcagcaccaccaccagcaccatcaaatccagcagcagcagcagcacattatgagcatcaatgcgcagattgccgcccagctgagggacaagaaggtcaatttcctcctggtcgagggattcatgatcttcaaccagccggagctgctggccctgtgcaacattaagtaccacttccatctgccatatgagaagtgcttcgaacggcgcagtaagcgcacatacgatccacccgatgtcacgggctacttcgagctctgtgtgtggccgcactacgaaaagaacttcagcgagtaccgcgactgcaaggacattacattcctcaatggcgagatcgccaaagagaagatcctcgcgttcgtccttcatcgcatcgtccactacttcaaggagcgctgcgaggttccagctcctgctcccgtcgtctgcccgccgcagcagaaacggttcggtatgctctacatgggtccgagcaataacaacgtcatgccgtcggcgtgtcccatggagcaatagtttgtccttggattcagagtacaataattgaatattgtatagtagtaggatgttaaacggttcaaaattgtttggattacttctccgaatcgtggctaaaattcccatattacgttatagttgtaagctactctaagggtggttcgattttaaattgttaaaagtatgatctaaaatcaattatttaattcaaattaaaaatgtgagtttttggaacttgagcaaatgttaagcaccgcaaagtccaaagaaaagtgcagtattgtttagagaatattttgattgtttgattgcccaacctacaacttccacgaccaatttgcttacagtttctagcttctttttacggaacaatcgaaacaaatcgacccgccctagaatacaactattattagttagtctttatttcgtattaagatagttattatgggtgacatggtctctcttgtggagaatgctcttgtaaccagattgtgaaatgaagaaactcggttcaggaattcatatttagctgtgctaactattatattgtattgtttactattacgtcatggaatttagaaaaaccccaacgaggcatttggtgtggggcgtttttatggagtcgaaaagttattgtactatataatggatatttatatatgcaccttgtaaataccgtagtgtatatttaccaaattaaacctagctttaagactatgacctaaaagaattatatatttttttcttgtgcgaaacaaaacacacatacgaataaacagacatttaacctcaagccaagtgtcgttttcgaactagcaaatttgtttattccgctacagaagccgattgccgcgatccgtttcaagggctcgcagaacaggtaaaataataaatatataaattaaaaaatacaatcattacatatacaggcttgtcatcgctatgggtatggtattcgcgtatgctagttagtgaagaggagcgcagcggaggcccgtggcttgccaaattattgccaattcagtgagtagttggtgtttcaatcgtggtcgggctacatggattatatcaatgtacttcttaatgcttacaattacgttaataacttcttgcttttatgacgcgcatgtggatattagagcagctgtaattcaaaaaggaatcacgtaaataaaagtgtgacggggcacatgcggtatgcagttgctcaccgatggcagccctgccctagagggcgtcccagtcggtctgactgttgtagacctcctcctccagccagaccgcgtaattggccttgaagtaatccgtcagctcgaccttgcgatcccaccaacccgagtgaccgaagaaggcaaagtccgagtgggtaaggatctcgtcgctgggaaagccaccctccacaccatagtcgttgagctgctgctgctggttgtggccgccattgccaccgccaccgttgtttccatagccatttgcgtcgccattattgccacatccattgttgcccgccatcatgttggattgctgggcgttctccgcattct

SEQ ID NO: 323 - DNA, 1888 bp, DROSOPHILA
cacttgtttgttttgtttacaattacgccacgaaagtaaatcggcagctacgaaaaaacattagggattcgtgcggcgggtaaacgatcagtggacagtgaagcagtccgtccggggagaacgccccatgagcagttttacaaacaaatcgccggtcgcgtgttctctcgccagagaaaccccagaatttccgagaatagctatttatggcttcgaatgcgcaactcgggaaaatcattttgatatctgcaatcgccgtgttcttctattacttcttttgggtggccgtcctcccgtttatgctcatcgatgaagtacgctttcattgtgcccaccgtgttcggggtgatcttcctcggcggcatcgccgcgttctccttttaccacatctggagcctgagagtgaaacgtgattaagggggttatccggggggttatcttgctcggtgcgaacgcgaacgtacgattccactgaaaaacaaggaagagcgatagtcagtcgtggacaagatgccgcagtggctggtcattggtatctcgggagtcacctgtggtggcaaaactacgctagcccacagcctgcacgactacttcaagggtctgagaggagcgccgctgtggaactcgccgtacaccattggcgaggtgcgtctgatctcgcaggatgactactttctgcccgtggaggacaagcgacatcagcgaaatgaggcgctcaacgccatcaacttcgagctcatcacctcgctggacatggccaagatgctgaacgacatagcgcacataatcaaggggcgccatgtggctcccgagccacaggagcaccttgtgacgtatgccaacttcgagcactacgcccagcagttccagcagcagtaccagtacaatgcgaactactacaaacaggccaatggcggggtctatcaatatccgccacagcagcacccgagacatcacccccatcaccagcagcaccaccaccagcaccatcaaatccagcagcagcagcagcacattatgagcatcaatgcgcagattgccgcccagctgagggacaagaagcgcacatacgatccacccgatgtcacgggctacttcgagctctgtgtgtggccgcactacgaaaagaacttcagcgagtaccgcgactgcaaggacattacattcctcaatggcgagatcgccaaagagaagatcctcgcgttcgtccttcatcgcatcgtccactacttcaaggagcgctgcgaggttccagctcctgctcccgtcgtctgcccgccgcagcagaaacggttcggtatgctctacatgggtccgagcaataacaacgtcatgccgtcggcgtgtcccatggagcaatagtttgtccttggattcagagtacaataattgaatattgtatagtagtaggatgttaaacggttcaaaattgtttggattacttctccgaatcgtggctaaaattcccatattacgttatagttgtaagctactctaagggtggttcgattttaaattgttaaaagtatgatctaaaatcaattatttaattcaaattaaaaatgtgagtttttggaacttgagcaaatgttaagcaccgcaaagtccaaagaaaagtgcagtattgtttagagaatattttgattgtttgattgcccaacctacaacttccacgaccaatttgcttacagtttctagcttctttttacggaacaatcgaaacaaatcgacccgccctagaatacaactattattagttagtctttatttcgtattaagatagttattatgggtgacatggtctctcttgtggagaatgctcttgtaaccagattgtgaaatgaagaaactcggttcaggaattcatatttagctgtgctaactatta

SEQ ID NO: 324 - protein, 283 aa, DROSOPHILA
MPQWLVIGISGVTCGGKTTLAHSLHDYFKGLRGAPLWNSPYTIGEVRLISQDDYFLPVEDKRHQRNEALNAINFELITSLDMAKMLNDIAHIIKGRHVAPEPQEHLVTYANFEHYAQQFQQQYQYNANYYKQANGGVYQYPPQQHPRHHPHHQQHHHQHHQIQQQQQHIMSINAQIAAQLRDKKRTYDPPDVTGYFELCVWPHYEKNFSEYRDCKDITFLNGEIAKEKILAFVLHRIVHYFKERCEVPAPAPVVCPPQQKRFGMLYMGPSNNNVMPSACPMEQ

SEQ ID NO: 325 - DNA, 11419 bp, DROSOPHILA
cacttagacttttttaagaagcagaacatccgcgggacgggtgtgtccaaaacacaagatttcaattaccatcagttgaagtacaagcaggcgctctacttggccactttgggtggcgccaaagcgctgtccctcgatcacttgaccggaaactttgctctagggaaggatttcgatgctttgttggtggatgtcagcgtcgtcgataaacccttgcggaggctgagcgtcgatgagctggtggagaagttcatttacacaggcagtgaccgcaacattgtagaagttttcgtggccggcaagcgtattaaacagggataccaatgagtcacagagcagttctacctttaacagtggcatttcacaaggaaacgtatagagaatttatttttatagtggcaaacattaaatgctgaaacggaatttagataacctctaatatgcttatttatgtacacagctaaaaagtaaaagcaaatggttttttactagttttacattttatattcggaacagctatgtacaaatgccatactttttgcttccatcactttatagattaatcatataatcatatattgactaatcggtcaagggcataccgcaattaatctaattacagcgaaaaagtgtatattaatatacacgaataattgatctctattgtttgatggataaggcgtgaaatcattgggtagtcgccgaagtctgaaggctttgttcttaactttccgacgttatttttgggcggactgttgttggatgcaatgggaatgttggattcgggttttctgttacgcaaattaagtagaatgtcctcgggcgttcataatttttaaagtttgtttgagctatctaaattgcatacgcatacatatgccaatacttcaactttaaagattaaagctcacacttttacatgaatttacattagattcagctaagagtacgaaaatacgggctaactgtgatatatatatatgtagatataagacgcgttttacgcattaaacatattttgctgcgtggcatcgttttcaaaatctgtccatgcgttgtttagttccataaatataagcttggcaatctcttcattctctgttccattatgctaaaaatagattgcattaacataaaccacctagtttttgcatacatcttgtcacataccttatcaggatgcactgctaggcaggcgcgacggtatgctttcttaacctcggtcggtgtcaccatggtggacatctcgcagcgctgccacttggcattgtcccacaacactgtgtgcatagagcagagaagcgcacggatgttgtttttcttaccatcagtctgcaaattagtttagttttaatttactaacgacgaagtttttttcttgtaagttttcgtttgcacatacccattccataatccgcactttcttcgggtccatatccttgaacaaatcttccttgcgcatttcattgatggatcgtggacactggttcattttgctgccaaaggagtatccttgttggcccagaatgtcagcaaatatgtcagagttcttggacccgccagtgcccggttgctgggctgctttctgagaatcaaagtgaagtcgactgtagtctggtcttgattgagcaggtaccgcctgtggctgcgtcggcgtcctgatagacgatgtcgagggcagagtctgcggtgtcggcggtgtatgcataaacgttgcttgtggttgcgaggatggcgatggcttgtgagtggggcttgagaactgagtaggctgcggactagtgttgacgggagactttccacttagcgtgctgcggttaaagtttaagttgagccctgtcgccaggtcggcgatgttcgcaaatggatctgcagatgcccttgccggatgagttggtgaaggattggtggtagccgctggctgagcaacaaaagttggtaaggagccaacgaaaggtggaaagcctgatggcttcatgctgggcacgccaccttggtccacagatccaaatatgtcgaatgggtcattgtttatttttggttgcggctgctgcagtggcggtggtggcagtatgtcaggaattggcgcagatcctatgcccgtagagtcatcatcaccgaaggcccctagcaagtcaaagctggcatctgtgctgggcttagcgctggttaacggatctgctgctggtacgtcactgggctgctggtttaaattgagcaagtctatgggcggagatggctctggcatgggcgaaggcagttcgtgggcggtctccgtgacgtcgggcaaaacgagcggagagctgacgcgatcactcttgcgggcacctggtggtggtgaggaacgcgtgctaggcttggttactagaacacgcaacaaaattaaccataatgcacagagccaacgagcacacgcacttaccaaaattgtcgagcatttctgcatactccaaatctgagctgaacaaagcggcgggtgaccgcttgggcttggctggcatccatggtggcttatggctgggaggtgattccgagtcagtaacagccagagaaagtgaaacgcagaaccgaggtgtcacctgctcagggtctggcagatcatccaagtcctggtttgtgaatgtaatcaacgtttctggttcggggatgaatcccgtgttgaattggaactgacatatcttgaggccttgtggtcgcaccattcctttgcgggcgtgaaataataccactgtcacatcaccgcatgcggtcaagttaatcggcagaactattttgccggggccggcctgatacaacctgcaagagttggtcaaccaaaagtaatttacaaatatgtcttgctctaattcttaccgcattttttcatagtcctgtagagtgctgagtagcaagtttccattacaataaacctccatatagatcctacagccgtcgcgtgccttggtcattctgggcacaggctggcagctgagtgaaacaagggttgtgttcttatagtgcggcagcaggggcgtgggccgcaggatgtcaccgaagtaatacaggtaacggaactcggaggggcggaggttaatggtatgccgcttaacggcgaagacttgcaccgcgtcctccggctcccgcagcaaatctgcatacataagaagcgcgcatataacggtggcagcagtgcatccacccgagtctccagtctgcacgataacgacagatttggggtccgcatttagaaaattgtacatgtcggctgatacggtaaaaaggccctaatgaaaaaatcaagatttcatttgtatttcattatataagagtccttaaatgtaaaaatgtttttcaagcgcgaagaaaacaaaattttttcttttcgatatacaccaaaagttcgggcacatacatttgataccagctaaaacataaacccaactgttttcggtcatgatatgtacatatgtcaaaggttggtctttacacaataaacctactgctgtgttcataaaaataacagtgcgagggaaactatgtaatacaaaggtatttttgaatgtcccttttgggaatcgactttttattccacttattagtgtaaaatggaatggaacgttaagtcccgaaattttcaatgttttctaaaaagtgagggaaataaattaaaaaaattatattttagtgggtagacaacagaactgctcccaggagaaaagaatgttaattcttaagctaagaaaggacggaaaaacatataaggacattaaaaaaacccttcaatgttctgccaaaatggtattcaatgccattaaatatgaaaggaagcccgaaaaccgtggctccaaacgtaaaaccacagatatagaggatccacgcttagttcgttacagcaaagtctatcctttcgcatcctctagggtcataaagtctgagctgaacttgggaatcagtgacgttacagttcggggacgactacttaatcaaaatttaagtgcgagaagtccacgaaaggtgcccctacttagcccaaggcatattcaggcaaggttaaacttcgctaaaacctaccgaaactggtcagtcttcaaatggcgtaatatcttttggactgatgggtcaaaaatagttatatttggtggaactggttcactacagtatatctgacaaccaccaaacacccaaaaacgattgaaaacctgtggggggacgtctaaggttcagctttggcaagttgtgcaggatgcatgtgcaaaaattacccccaaacgttgccaggaccttatgccgcgtaggtgtaaggctgtgctggctaacaaaggcaatccaaccaagtattagaccctaattaacacattaaaaataaaaactatgttagtcacgttgaattttgttactattttttcatagcactgctatttcattgaacaccagaatttctgcctattatgttgttttaatctatatttttgaaactattgaagaaataaaaatgaaacatttgttgaattgtatgaaattaaatacctaatgatcatataaaaaaaagatttcctattaaaactttgaatcataggattttttatcttaaactcgcaggacccaagcactgctatttttatgaacacagctgtacatggtcttaaacttatctcaagccgtgattaaattcctgcctgaaacttcacatacctgcagattaggagcatgtgcctgtgggcacccataaaccgaacctgcctcaactgttcgcacgggtggcggtagccgtggctctgttcgttggccaaagttgtaaatgcttaatttttgtgggacaaatcggctctccagagatagtcggacgtcttcgatgttgttcgtcttgtacgtcgactcgaatccgtcagaggggcagggcattaccaggatgcgagaggtaatgtggcttatatcaagatcgttgcgagcaagagattgctgcattgtttgcatcactttggtggacgtatctttaatgttctttaaaagcgttccagcgccaccacgcagtgacgacagaagactgccgtgtccattataagatgatggtatggcggcagaaagcggttcggtgtaaacctcagagtaagcagaacttttgagaggactttcggccggaagggactcgatgggcattatatgaaggtctagaggtcctttgagcgaccaattgtgtgtctcagcgagggctgcaaggccctccagcaccatagtaatatccaggcgctcgaacgggttcacttttaaacagccacggattatatcgctgaagcactggtactgaggatctggcggaagcatgtaattggcgttaatgatccgcagctttccgccatcctcgtagggatgcttgcggtagcacaggaagtagagaatgcatccgagagcccatatgtccactttgggcccaatcgggttgttggaccaagtgtcgagcatctcaggggatcggtacatcggagtagtaacagtgtttagctggtcctccagcatgctgcgctggttggcgctccactcaaacgtgggcgacaggacctccgtgctggcggacccaaagtcgcacagcttgatctgtttgtcgttgccaatgagaaagttctcaatctgcaatcaaataggattagggtattagtctgttacttccagctatggttggagaccaacctttatatctcggtgggctatcggcggtgactgtgagtgcaagctggccacagcccgcgccatttggtagaagatgcgcagaacacaagtcggattgaatggagcattgtttgttctgaagcagtccaccagagatccgcctgacaaggatagaaatccatgtgctcaaatgttcacgtagtatgattggacgccctagggcgtcccttacctttacacagctcggtgaggagcaagtactgggctcccaattgagttgatggggcggtataactggaacccacaaaggcgacaatgttctcgtgccccgacagctgcttgtggatgttgatctcgttgatgatggcggtggaggcttgcatgtcagccccgatcagacgcttgagggcgtattctgtgccagtttgcacatcttgggctacatacacgaaggcgtatccgcctgaaaaagggggtggaagcgagagacaagtagataacgaggcacagataaggccctgcctaagtgctaagtgcggcacgctcggaggaaggggttgaccggctggtagcctgctatatatttacgaattctgtcttccagctccctgcagagctacgaactttcagccaccttcaggccactgttgttcttatataagaacttgttaaaaaaaaacccgatcggtttaatgtgccatggctcgcaggtgggcaccagcggtaacgcgtaaccgtgatggtggcaatgcactatcgccacaattcgtccgttggcttggctcaagcagagctgcgcctctcgagctcggaaagcgcaaacaagaagcatttaagttcttggatcggcctggtggcttcggcttcacttcctattgatttttccacccacgttcctcaccttcggcgatgacacacttgatgcgcagcctgtgtccagcgacttcaacgacctggcccacgaagtcattgtccagcctgccaccgagggcctctggtgctccgtttcctgcagctccgttgacctcgctagaggagaagtagttgaggttgagcgacttaaagaactcgcccattttggtggtggccaatgctagaaggctgtaatcgacaagtgatacacctaaaatatctggcgcccgttaactgaactaaaacattttcgtagcgccgtggccacaaaaaaataaaaagaatccagggctgcggaggagcaggttcctcagcagggtggagcggaatcagtttgctccgatagcttgatcgcgcaggcctggctcaccatcgatatgtggcgctgtgctcttatcgatatttgacgctgggctcttatcgatgtggcgcgcggataactagattatgaatttcgactaaatttagagtgcttttaagcaaacattttgtatgttgactcttcaaaattcagacgtttaatcctggctttaagattgcacctgaggtgattgtattatatttaaaatgcgtgcagtgccaacgcccttgcgaggttttaagagatcacagtttttgtacgagcagtcatgtcaagatatatgctctaaagagttccttccgctagttcatactcttcaacaagtacccatttagcttgatacggttaaaagagcgcacacaaccacatttatcagaggtctagaggtattgcatttttgactggggctgtgacagctttgaaagaaaataaaatgtaattgaaaggttaaacacttttttcgaaaagtcattcccctttgagtcgcctgagtaaattcccgcatttagctgtgcatcaagcgtgcatgtgtctttgagccaattcaaggtccagctctgaagtttgagtttcctatgtacattgtgccaggtagagttggctgattgaagtcaacagctaaggggaaacccaggggacaaccgctgcaacagctggccgtcggaatgaagaaatggagtatgactagtaagcctttggggcacctcccctccgtggaacagcaacaagttggtaacggcagtatatttacacatctgtctttggataattgagagctgtgttgcgctacgcttgggccgctggcgaatacggatagttacagatgaccgatatggccgtaagtttgcgcaaaccgagctccgcttattttggacattgaagttaagcttgcaatttgctgtgtgcacctggccagtttcacgtaacgcgtggagatttgtcgaatgcaaaatacacaaccttatcagtgtactaattaccaccgccctactcccacgttgtatcgatgcccccgatctagcattgacacaattttcagggagccgcattcggccaaagccgtttaatgtaagacaataaaaataaacattttccgcgccatttggtgcgcctgcaaagcggtcggggtcgtggaaaacccctctgtaggcaaacagcgggagcattctgtttgcacaactgcagccgagagcacgctatagaaaaaaccccgagacccctggatctggactttgaaactatagccaccatgtgccggcgactaagaaatatccccggactgatctgcctgctgacgacggtcgtcgtgccctgtcggacggagttctacgctctagacgcgctggggcgggatccgagtcccgctgattttccgggtgcagtgccacgactggttatctacaacccctttagtggccaacagctggagccgctgcggtactcggctgtttcgcggggcagacggcagcccgtgaacggtaacatcgtagagctaccccagctctggcagccctgctcctgcgtcgagttctcttgccggtgctgccttggcctggctctgggactcggcgaatcagccaaccagcggttgtgcgccgccctcgactacacccgggcggatctaggtctgcgcctcagcgtcgagataaaccagcgcaaggtggcaaccttcgggttctcgactcgaaatccgcccgaatactgcgtgccgctgccgctctccagctgcctcagactctacgacatccgtgcgttcggcgagggcaacatgcagatatgtctgtcggtggtctttaaagttctggccagccagttcttcgagtaccgcttcagctgcctgcgctttggcgccagaggagtattcttcgttcgcgacgcactgcaggatcaggggcaggatcaggaagcactggaggtggggtctaggtccgatgcgtggcagtatacgccaaagaagctggctgacaggagcatcttcagtttctacggcagataatattggtctttcctctcacgcttcaagttgtcatgttccgtggatgcctcgcaatgttacatgtttaatgaaaaagtgaaatttacgttaattaaaaagcctttaactctaagaccccgcccagcagcacagacgccatgaatatggcgaaaattggcagtaaactgtggcctcccttggtctggtacgggcgatgatgcgactgcttggatcttatcccacttacgaatgtaccaacggctgtaatcgttcttcaaaccacttttttttaacgatagcgcacacagcaattacttctctgtttacttaagattcaaatatgtagtgagaggcgccggcccttgaacctattaggctgcgaatgattatgaagtgaccaagggtctcatattataaataatatattagttcccccacatatgactgttgttatttgatgttatttgagttttaaaaatatattaaatgaaataaattttagtgcaccatagaaccatgaccataaactggcctcataagactaagatcttaaacaaacaattacgattgttaaaaatatgtttaatatatatgactatattctttattctcttgctgagggtatattaaatcatttaaagtatatatgtacatacattcgtgtctgcccatccggatgttgcaaactttccaaaagccttcttcttccttagtacaagtatatctgtaagcgggaaagagcagattctacaatcgtatggctaccagttaaatatatttaaatgtagacataattctaacatttattaatcttactttattgtcatttggagggttttaaaacaaagccaatacgtatattttaaatattttcgcactgttgttatttgaaccacaaggaatagttggcacggtgcattcaagcagaatgtaacaaaaagagtatatttttagtttttcaaaattattaaaaaatgttcacttttactttctgcagtttcaatcagcatggaaatattgcagtgcactccactatcggtgctattcgtcactacgcgtaccaaaacttacaaatctaaatgttaatgtttcttggtaaaaatgttgtacttaataattgaatatttaagctcacggaaacgcaccacgaaccgattcaaattaaatatataaatatatttatatatttatatatataatatatgtatatatatatatatatatatatatatatatatatatacatatcctaagttaaacgcatgtttagttccatacaactttgcttcatatttatttattaattgacgatcgaaaataagttgatatgcaagaacatttcatatttaatgatacatcaatttaatattcaaatgattatacatacttaacaaaatacatacttaatcaacataaggcgaaattttcttggtcattagaataggcgcactttgtctttttaatttttataagtaaagtattagatccacttaagttaaattatgagttggcattactatttcacttcttttaaataaaaaagtaattttagtaatgagtactgttagtaataactatataaatccggtcctttatagcctggtacaagacatctaggatggaaatttcaaggaaatttcgctcaaagcatattaaatagctctgctaatgttttcttatattcgtattgcttttctcctgtgtataccttctaatgttagccagcccgaaaaaactttttcagttacgttaagatctggagaatatggtggccaggtcatgatattaacgttttgactcgaaataatgaatacgagcattgccttgtggaaaaatccaaggaatttgtcgaaagagatctttaaattttggaaatacggactccagcaatgttttgaagcgatcgccattcatctttcggtcgataaaaatcaagtcaattgtttcataaagcaccgcacgtcattattcctcttctccgttatgatggcgacttaaatatagctaatctttccgcaaatcgtgataataatattaaaagccatcagggccatctaaataaaaaagtttttcatcagtaaagacaactgaacgccaatcatttagtcgagtgtcagattggaatatatatatttttcgcgaattgaagccgctttccttgcgtgatgcattcaaaggggctttttcttgatttttagacgcttcaggtgttctgcatttctgatcgcgcctttactccgaccaattccttgatcttagcagcagagttagtcgaattcgaatcaattctagcaaattggcgcactgattgttttgaaagtggctttttccccgctttttcagtccgttatttatcttttcaacacagtaaacacgtattaaaagatttacgtatgtaaatgacaaaaataaattctttgaaaatctacatacatatgtatgaattcagcctcatttgtaaacttttttcgaatttctgagttggaataagttttgctctttaataccaaaaagtgcactcaaccttc

SEQ ID NO: 326 - DNA, 3691 bp, DROSOPHILA
gaagtgaaatagtaatgccaactcataatttaacttaagtggatctaatactttacttataaaaattaaaaagacaaagtgcgcctattctaatgaccaagaaaatttcgccttatgttgattaaatatacttgtactaaggaagaagaaggcttttggaaagtttgcaacatccggatgggcagacacgaatatgggcgagttctttaagtcgctcaacctcaactacttctcctctagcgaggtcaacggagctgcaggaaacggagcaccagaggccctcggtggcaggctggacaatgacttcgtgggccaggtcgttgaagtcgctggacacaggctgcgcatcaagtgtgtcatcgccgaaggcggatacgccttcgtgtatgtagcccaagatgtgcaaactggcacagaatacgccctcaagcgtctgatcggggctgacatgcaagcctccaccgccatcatcaacgagatcaacatccacaagcagctgtcggggcacgagaacattgtcgcctttgtgggttccagttataccgccccatcaactcaattgggagcccagtacttgctcctcaccgagctgtgtaaaggcggatctctggtggactgcttcagaacaaacaatgctccattcaatccgacttgtgttctgcgcatcttctaccaaatggcgcgggctgtggccagcttgcactcacagtcaccgccgatagcccaccgagatataaagattgagaactttctcattggcaacgacaaacagatcaagctgtgcgactttgggtccgccagcacggaggtcctgtcgcccacgtttgagtggagcgccaaccagcgcagcatgctggaggaccagctaaacactgttactactccgatgtaccgatcccctgagatgctcgacacttggtccaacaacccgattgggcccaaagtggacatatgggctctcggatgcattctctacttcctgtgctaccgcaagcatccctacgaggatggcggaaagctgcggatcattaacgccaattacatgcttccgccagatcctcagtaccagtgcttcagcgatataatccgtggctgtttaaaagtgaacccgttcgagcgcctggatattactatggtgctggagggccttgcagccctcgctgagacacacaattggtcgctcaaaggacctctagaccttcatataatgcccatcgagtcccttccggccgaaagtcctctcaaaagttctgcttactctgaggtttacaccgaaccgctttctgccgccataccatcatcttataatggacacggcagtcttctgtcgtcactgcgtggtggcgctggaacgcttttaaagaacattaaagatacgtccaccaaagtgatgcaaacaatgcagcaatctcttgctcgcaacgatcttgatataagccacattacctctcgcatcctggtaatgccctgcccctctgacggattcgagtcgacgtacaagacgaacaacatcgaagacgtccgactatctctggagagccgatttgtcccacaaaaattaagcatttacaactttggccaacgaacagagccacggctaccgccacccgtgcgaacagttgaggcaggttcggtttatgggtgcccacaggcacatgctcctaatctgcagggcctttttaccgtatcagccgacatgtacaattttctaaatgcggaccccaaatctgtcgttatcgtgcagactggagactcgggtggatgcactgctgccaccgttatatgcgcgcttcttatgtatgcagatttgctgcgggagccggaggacgcggtgcaagtcttcgccgttaagcggcataccattaacctccgcccctccgagttccgttacctgtattacttcggtgacatcctgcggcccacgcccctgctgccgcactataagaacacaacccttgtttcactcagctgccagcctgtgcccagaatgaccaaggcacgcgacggctgtaggatctatatggaggtttattgtaatggaaacttgctactcagcactctacaggactatgaaaaaatgcggttgtatcaggccggccccggcaaaatagttctgccgattaacttgaccgcatgcggtgatgtgacagtggtattatttcacgcccgcaaaggaatggtgcgaccacaaggcctcaagatatgtcagttccaattcaacacgggattcatccccgaaccagaaacgttgattacattcacaaaccaggacttggatgatctgccagaccctgagcaggtgacacctcggttctgcgtttcactttctctggctgttactgactcggaatcacctcccagccataagccaccatggatgccagccaagcccaagcggtcacccgccgctttgttcagctcagatttggagtatgcagaaatgctcgacaattttgtaaccaagcctagcacgcgttcctcaccaccaccaggtgcccgcaagagtgatcgcgtcagctctccgctcgttttgcccgacgtcacggagaccgcccacgaactgccttcgcccatgccagagccatctccgcccatagacttgctcaatttaaaccagcagcccagtgacgtaccagcagcagatccgttaaccagcgctaagcccagcacagatgccagctttgacttgctaggggccttcggtgatgatgactctacgggcataggatctgcgccaattcctgacatactgccaccaccgccactgcagcagccgcaaccaaaaataaacaatgacccattcgacatatttggatctgtggaccaaggtggcgtgcccagcatgaagccatcaggctttccacctttcgttggctccttaccaacttttgttgctcagccagcggctaccaccaatccttcaccaactcatccggcaagggcatctgcagatccatttgcgaacatcgccgacctggcgacagggctcaacttaaactttaaccgcagcacgctaagtggaaagtctcccgtcaacactagtccgcagcctactcagttctcaagccccactcacaagccatcgccatcctcgcaaccacaagcaacgtttatgcatacaccgccgacaccgcagactctgccctcgacatcgtctatcaggacgccgacgcagccacaggcggtacctgctcaatcaagaccagactacagtcgacttcactttgattctcagaaagcagcccagcaaccgggcactggcgggtccaagaactctgacatatttgctgacattctgggccaacaaggatactcctttggcagcaaaatgaaccagtgtccacgatccatcaatgaaatgcgcaaggaagatttgttcaaggatatggacccgaagaaagtgcggattatggaatggactgatggtaagaaaaacaacatccgtgcgcttctctgctctatgcacacagtgttgtgggacaatgccaagtggcagcgctgcgagatgtccaccatggtgacaccgaccgaggttaagaaagcataccgtcgcgcctgcctagcagtgcatcctgataagcataatggaacagagaatgaagagattgccaagcttatatttatggaactaaacaacgcatggacagattttgaaaacgatgccacgcagcaaaatatgtttaatgcgtaa

SEQ ID NO: 327 - protein, 1165 aa, DROSOPHILA
MGEFFKSLNLNYFSSSEVNGAAGNGAPEALGGRLDNDFVGQVVEVAGHRLRIKCVIAEGGYAFVYVAQDVQTGTEYALKRLIGADMQASTAIINEINIHKQLSGHENIVAFVGSSYTAPSTQLGAQYLLLTELCKGGSLVDCFRTNNAPFNPTCVLRIFYQMARAVASLHSQSPPIAHRDIKIENFLIGNDKQIKLCDFGSASTEVLSPTFEWSANQRSMLEDQLNTVTTPMYRSPEMLDTWSNNPIGPKVDIWALGCILYFLCYRKHPYEDGGKLRIINANYMLPPDPQYQCFSDIIRGCLKVNPFERLDITMVLEGLAALAETHNWSLKGPLDLHIMPIESLPAESPLKSSAYSEVYTEPLSAAIPSSYNGHGSLLSSLRGGAGTLLKNIKDTSTKVMQTMQQSLARNDLDISHITSRILVMPCPSDGFESTYKTNNIEDVRLSLESRFVPQKLSIYNFGQRTEPRLPPPVRTVEAGSVYGCPQAHAPNLQGLFTVSADMYNFLNADPKSVVIVQTGDSGGCTAATVICALLMYADLLREPEDAVQVFAVKRHTINLRPSEFRYLYYFGDILRPTPLLPHYKNTTLVSLSCQPVPRMTKARDGCRIYMEVYCNGNLLLSTLQDYEKMRLYQAGPGKIVLPINLTACGDVTVVLFHARKGMVRPQGLKICQFQFNTGFIPEPETLITFTNQDLDDLPDPEQVTPRFCVSLSLAVTDSESPPSHKPPWMPAKPKRSPAALFSSDLEYAEMLDNFVTKPSTRSSPPPGARKSDRVSSPLVLPDVTETAHELPSPMPEPSPPIDLLNLNQQPSDVPAADPLTSAKPSTDASFDLLGAFGDDDSTGIGSAPIPDILPPPPLQQPQPKINNDPFDIFGSVDQGGVPSMKPSGFPPFVGSLPTFVAQPAATTNPSPTHPARASADPFANIADLATGLNLNFNRSTLSGKSPVNTSPQPTQFSSPTHKPSPSSQPQATFMHTPPTPQTLPSTSSIRTPTQPQAVPAQSRPDYSRLHFDSQKAAQQPGTGGSKNSDIFADILGQQGYSFGSKMNQCPRSINEMRKEDLFKDMDPKKVRIMEWTDGKKNNIRALLCSMHTVLWDNAKWQRCEMSTMVTPTEVKKAYRRACLAVHPDKHNGTENEEIAKLIFMELNNAWTDFENDATQQNMFNA

SEQ ID NO: 328 - DNA, 7865 bp, DROSOPHILA
tactgataaattcaaaccacaatttgcttttatgggctgatatggtgtaggaaatcgtttggaaatgcacaagaatttacacaaaattatttatttacttgcatttgtattagtatttgacacctacgacatttacttcaaacataattataacttatttaccttgactaacactcattttaaatctaactttacaagccgatccattagtgtttgaactaggcgccacaataatcgattgctgacgttcgatagctggacaagtgaccacgaacaaaatcgtccagtctggcatcgcctgagcagttggtattttttagtgcttcgttaaattggcaaaaaagaggctcgtctgcggtcgcaaagtgataaaaccgcaaaaaagtccataaaatgttgtttatccagcaaataaagtgctctgactcaatgtcggatgcctagtctaagcgttcgcgaccaagtcagctggaactaaagttggggcagtgctaatgtgggtgagtattttcactttgccggcacgtgtttacttattttctatttattacccaataaagttggtaattaatgcttgtagagtgaagtgttaattactaaacaagctattttattaattaaagcctaaagcacagtgtccagtggtttagtttagtgcgctttagcaacgattacgtagctttgttgtgcttttccactccgtgacgtcatggggcgttggaccaatcggaatgcagcttgcgaggggcttgtccaccgatgacgtaggcgtaggcaacagccgacgtctagtcggaaaattgattccgttgcttgtgcagcgaaccacgtgagttggccacgtttgctctccgccccctccgatcgtcgagcgatgtgtatacgccgtgtgtgcccttcagttcgatggatattctcattcaatagccaactatcgtcgcagctagatcgcaaatacggaagcagatagtgcagcttattttctaaatattgctgctggctgtgcagtgcacatttacgtaactaattgcgggcaagtgctaagaatattacatgtttgcatagtaggtgtggccgagaaaactatttgcatccctcattgcaaggtgaatctaactgaaagcaatccattctaagctgttcttctcgcattttgcatattaaaatatatctggaagtcaaaagaaacttctaaatatattattttatctataaaataattagagcttccgttctgtagtcaagtataagaaccattttcctgtaccgctggcatttgattcgcctgaaaagctcttaagttcctttatcaacaacgcgagtgtttgcacattataatgaatgcaactagaagattaaacaacggccggcgcctgaggagcttgctaatcgagtgacctttgacctggcctgactgcgaaattcattacatgttcaataacccgcatctgcccccttttgcgctgcaattgtcagtcggcttatcaaaaacatcgcacacccagcaattaaatgcaatcgcaacagaaacacgctttatcagcgaccgcaaatattttagcaatcgctacgggtgggaaatcaagtcgtacgatacgatatcgctgtgataagcgagctattcatagtccacaggtcgtatgcgtaatttaatttatgcatgtagttgcaaaagttgagtgaacctttgcacccctgatgtaatcattaatcgcactgcccgcactcgaattacaccactagcaacagagaacaaggcagcataaagagaaatcaaagtgacgatgtcgcactcgttcacttatttacttcaagtgcaattcaaaaccggtgactgaaattacaggtcaataataatacgataatttgtacgatgactttaatgggttctaccaatgcacacactcccacattgtgcatatagtatgtagctgtatgagcgtaaacaaaattcgcacatcaaggaaatacaacgctgcgcagtgatcaagtcgaattgtgaataccctgctaccatgggtttgaatttgtttgaaaactctgttttcaacttgtattgttattactcgaacccaatagattgattattgtttttatttcgggtacttaaacaagtccctagtacttatataccccaatccaggcatcatttccctattaaaggccatcattcgggccaaatgactctcatttgtgggccaaccactcatcacatgcatataaatatgttttcacagcgacatttggctttaacgaactcgccttcgttgaccaaaacgatttcattaacttcgtttatataacgaacacactcccccttttcgcttaatggatgcaaatatttaaatgccatcatttgcatttggctctatttcgttttgttggcctgctcttgaaaatgtcacagaagcagcgtttggtttatttggttgtccctcaatggaatattttcaatatttgttgtatctttaaatagaccagcctataagtatcagctgaatggacgcccacacatgagaagattgcgtatacgaattgtctttgaaaagctgaagaatttatgtgtgggataattttggtggaataatttccgcccgtgaaatgggacattgttgcgtacgtgcacataattgtggggaaatgggagtaaaactgatatatatacagtataattcgcttagctgcatcgatagttagctgcatcggcaagatatctgcattatttttccatttttttgtgtgaatagaaaatagaaaatagaaaaaaaaaaattaagttagctgcatttttaagttacctgcatcgaggcattgtgcaaagtactcgaggcagctaagcgaattatactgtatatatataatacccatttatatacaagaggcgtgagaatctcggtttttttttacagtggttagaggttttatttccatgatcattaccattgcacatgatagtccgtaaggtgttttacgtctaggttagcactatctttttcaaaatttcttgagattacaaccagacaaatttgtagttttccgctcttgatagtgagaattcgagtaaagcattttcgtgttctcaaaatttttaagatattttgcgctattttcagatttatgtgttggaccttctttatgccaacaatcttcttgatttatatgactttttgggtgactgaaagtgaactacttttctgacactacaattgcaggattcctatacgattgacccactgtgctggaccgatatccgtctggggcgaatgcaaatgagtatttttaaatgccaaggctgtcgcaaccagttggcagtttattgcaccgcaaagtgtctaaggcagcgcaatcctccagcccacctccgcccaatggacccctagtccacccgccgagccagacatcgcagcgctttgccggcttgtcttatcagctatcggcaattggtgctactgccggtgccatttggtcggttgatttacctagtcccatgcccgtccactcaccaaactcgaccatttaccagctctatgaaagctctatgtgcgggtatttcactgcgctgccgcgccttcgaatcgtttgattttcaacgttcagatacattttggcgctcgacgtggtcggttgtgttttgctcgtcgcgctctgtcctgctcattcgatcgatttgctgcctctctttcgtcgcgaactgtcgcctctttgggatttgaaaatatttaaacaagtgttatcagcggccataaacaacaatcgaatacaaaaagtgaggggacgagtgtacaatgtcaaaatactcatcaaatatcgttcatcgcagttatcgtagttggttattggtaatcgcagttatcgcaaaatatcacttgtaatagaagccatcgtaaattatcccctttaattctttgagggctttcgctttgcggctttgctcgagagttcgagcaagtgggggaaggcaaatattggtcggatcagcccacaaagtgctttccatatcttatctgcgatttctggtaacatacagtttatgggccgtgtatcgatggggccttatcagtgaacagtgcctaacaaaggtactcagccataaacaggcgcatataaaataatgagcggaatgccgactttcaacagggtcgccggctaatttgaactgattaccagatgaatccgaaaagcgcggaaactgtggaaagtttccgaacgtaaatgccgatgaagccaaatcgaattaaatcgaatggatgtagtcacccagtgcactcggtcattaggctcttatctccgttccgagcacttgaccttgtcgcagggatcgcaatcggtagttggaaccagtggcttaacataatttatgtattctagtccgcttctgggcaacaagtgtttctgtgtatatgagagtgggaagagggctcgaccaccaacaactcggagtgggaatcaagccccccaacgggccaagcgagtacaaagtcaacaatggccaaacaagtgctcgagcagggcgtactcttgtatgtacacaagtccattccagatgatatcgctggacaggtccacatggaagtgcgaaaggcaaatatattcttcccagtttttcgactttatcttagattgctatcgtagattgattttatggttatggttattgtattgaaatattggttggcggccctccccactggaataccttgagtgttacgttcgctttttgacaactaataaataaactgaactgatttcaaacattaattaataatgtaatgagtccctaccaaaatgagtttatggtacattgtaaagcctgcttctatagatcatcatattatcattatcatatcattagtatgttataaagaagccaacccatttaattgatacatatatgtacatcccattattatgcaattactacccaagactgactggcttatctaatctgcgtcctatcttgcaggcagcatgaccgagggcaagaacttaccccactctagtgcggatgtgccgttccgcagcaaggagctgcgcaagcaatcgctcatccagcacaccggcctggtcggagtcatcgatgagggcaccaagaccatcggtttctccatctacaccacgccggacttcaaggagatcgccgcacaccgggtggagctgagcgtgatcacgccccaggatggctggtatgagcaggatccgctggagatgatggcctcgatcaacaagtgcgccgaggaggccatcaagcagctacccgaacagggtttctctgccagcgacattgtcaccgtgggcataaccaaccagcgcgagacgacaatcgtctgggatgcggtcaccggcaaaccgctgtacaatgcgctcctgtggaaggacatccgcactagcactacagtggagcagatcgtggccaaggtgcaggatccgaaccacttccgcagcagcactggcctgcccatctccacgtacttctcggccctcaagatccgctggctgcgggacaatgtgcccgaggtgcgacaggccatccgggaaaggcgatgcaaggcgggcacagtcgacagctggatcgtctggaacttgacaaacggtatgagaagtttaggattacaaaatttgtagtctaattacttaactgaattgatttgtttctctccaggagctctccacatcacggatgtaacgaatgcctcccgcactctgctcatgaatctggagacgcaagcctgggatcctgttctgctcaagacgttcggtatcagagaggagatgctgcccaccatccacagctgttcggagatatttggcaagatcacttcggagcgaagtccactgcgtgggatgaccctaagtggaataatgggcaaccagcaggcctcgcttctgggccagatgtgcgtgaagccgggtcaaacgaagaacacctaccgatccggctgttttctgctctgcaatacgggggacaagccggtcttttccaggcacggtctgctcaccaccgtggcttacaaactcggtccccaggcaccgacgatttacgcaattgagggagctgtgtcggtggccggacatgcgctgtcctggctgcaaaacaaggtgcgtatcctgccggactccagagatgccgagaaatatgcggagatggtgcccacatcgggggatgtgtacttcgtgcccgcctttacaggactatatgctccctactggcggcagaatgctcgcggcatcatcattgggctcacgcagttcacccgtaagaatcacatagtgagagctgcactggagagcatctgcttccagacgcgcgacatcctagagtgcatgcatcaggagtgcggttacgaaatcaataagcttcatgctgatggcaagctcaccacgaacaacctgttgatgcaactccaggcggacaccattggcatgcccgtcttccgctcccagctaatggactccaccgctttcggggcagccatgtgcgccgcccaggcagatggtgtcaatctctgccagttcgagcctgagaagcgatactacgagaacgtgcactacgacaccttcctggccaccaccacggatgtagagcgaaaggagcgatacggcaagtggaagcgggcggtggagcgcagtttgggatgggtcatcaagcagaagaagacgcgtgagtacacggaggagaactaccgcatgctgtcctctctgccagcgagcatcttcctcatcagcagcttcgccatgctggtgcattccctcgctgcgagtggccagtaaatacgacagtcgcctgacacttagatcgattctaggttgtgataataattatttgtccggatttcgtttggatcttatacacacactctgtacatagtcctcgaaggacagtgggtggttgaacgtgctttaaaccctgtaaatagctggactaagctccgtactactttaagtatcccgtatcctgactatcttaacgtgttttcgttgcatattctgtacgtcttagccgtagttccattgacgttggctggacttccgcgcgccacgcaggcccatatcagcggaattgtatatagccaaagtgcaaacgacatttctaatttaagtaggtcccgtactcgtatgtgtatgtatatgtatgtagtgattacgccccttaaacaataaacagatataatacgaatcgaaacttggagtctgaatgcgaaataccaggaacttttgtgcaatatctgtgagatcgctgattaagcggtcatttattggggcaattgtgcgtagaaaaataaagagttggttgcttaggtaggaccattagtaaatcattagcatgttatctagaaactcattgaattctgcagtaaaataagcaaaagttattagtttattacttgaaagaatcatagcacttgtacccctagctagagtatcccttggtgcaatctcacactatgtggggtatgttccagtatcagtttcgttatcatggagcggaaatgtcaggtatcagttaaatatgactaaggtaatcgattgattaatagctggtgggtgtgtttgttattggtgtttaacgttcttaagacttttgggtgtgtccgcggtaagaaaacagatatcaagttactaaaatagatggaaccacccatggactaattaaatcgtttttactgctgattttgaaataaaagctatcgtttatatttttaaataatcttttgaaaactttaattgaaaatcactgaatgaatttagttcaaatgtatgttatatttcttgtgtatttagtaatatcggggtcaccaaacatatcaatggagtttggaagagcctgtggtggatccctgctgagcgacactaatttgaatagggga

SEQ ID NO: 329 - DNA, 1934 bp, DROSOPHILA
ctgtgcagtgcacatttacgtaactaattgcgggcaagtgctaagaatattacatgtttgcatagtaggtgtggccgagaaaactatttgcatccctcattgcaagatgaccgagggcaagaacttaccccactctagtgcggatgtgccgttccgcagcaaggagctgcgcaagcaatcgctcatccagcacaccggcctggtcggagtcatcgatgagggcaccaagaccatcggtttctccatctacaccacgccggacttcaaggagatcgccgcacaccgggtggagctgagcgtgatcacgccccaggatggctggtatgagcaggatccgctggagatgatggcctcgatcaacaagtgcgccgaggaggccatcaagcagctacccgaacagggtttctctgccagcgacattgtcaccgtgggcataaccaaccagcgcgagacgacaatcgtctgggatgcggtcaccggcaaaccgctgtacaatgcgctcctgtggaaggacatccgcactagcactacagtggagcagatcgtggccaaggtgcaggatccgaaccacttccgcagcagcactggcctgcccatctccacgtacttctcggccctcaagatccgctggctgcgggacaatgtgcccgaggtgcgacaggccatccgggaaaggcgatgcaaggcgggcacagtcgacagctggatcgtctggaacttgacaaacggagctctccacatcacggatgtaacgaatgcctcccgcactctgctcatgaatctggagacgcaagcctgggatcctgttctgctcaagacgttcggtatcagagaggagatgctgcccaccatccacagctgttcggagatatttggcaagatcacttcggagcgaagtccactgcgtgggatgaccctaagtggaataatgggcaaccagcaggcctcgcttctgggccagatgtgcgtgaagccgggtcaaacgaagaacacctaccgatccggctgttttctgctctgcaatacgggggacaagccggtcttttccaggcacggtctgctcaccaccgtggcttacaaactcggtccccaggcaccgacgatttacgcaattgagggagctgtgtcggtggccggacatgcgctgtcctggctgcaaaacaaggtgcgtatcctgccggactccagagatgccgagaaatatgcggagatggtgcccacatcgggggatgtgtacttcgtgcccgcctttacaggactatatgctccctactggcggcagaatgctcgcggcatcatcattgggctcacgcagttcacccgtaagaatcacatagtgagagctgcactggagagcatctgcttccagacgcgcgacatcctagagtgcatgcatcaggagtgcggttacgaaatcaataagcttcatgctgatggcaagctcaccacgaacaacctgttgatgcaactccaggcggacaccattggcatgcccgtcttccgctcccagctaatggactccaccgctttcggggcagccatgtgcgccgcccaggcagatggtgtcaatctctgccagttcgagcctgagaagcgatactacgagaacgtgcactacgacaccttcctggccaccaccacggatgtagagcgaaaggagcgatacggcaagtggaagcgggcggtggagcgcagtttgggatgggtcatcaagcagaagaagacgcgtgagtacacggaggagaactaccgcatgctgtcctctctgccagcgagcatcttcctcatcagcagcttcgccatgctggtgcattccctcgctgcgagtggccagtaaatacgacagtcgcctgacacttagatcgattctaggttgtgataataattatttgtccggatttcgtttggatcttatacacacactctgtacatag

SEQ ID NO: 330 - protein, 576 aa, DROSOPHILA
MTEGKNLPHSSADVPFRSKELRKQSLIQHTGLVGVIDEGTKTIGFSIYTTPDFKEIAAHRVELSVITPQDGWYEQDPLEMMASINKCAEEAIKQLPEQGFSASDIVTVGITNQRETTIVWDAVTGKPLYNALLWKDIRTSTTVEQIVAKVQDPNHFRSSTGLPISTYFSALKIRWLRDNVPEVRQAIRERRCKAGTVDSWIVWNLTNGALHITDVTNASRTLLMNLETQAWDPVLLKTFGIREEMLPTIHSCSEIFGKITSERSPLRGMTLSGIMGNQQASLLGQMCVKPGQTKNTYRSGCFLLCNTGDKPVFSRHGLLTTVAYKLGPQAPTIYAIEGAVSVAGHALSWLQNKVRILPDSRDAEKYAEMVPTSGDVYFVPAFTGLYAPYWRQNARGIIIGLTQFTRKNHIVRAALESICFQTRDILECMHQECGYEINKLHADGKLTTNNLLMQLQADTIGMPVFRSQLMDSTAFGAAMCAAQADGVNLCQFEPEKRYYENVHYDTFLATTTDVERKERYGKWKRAVERSLGWVIKQKKTREYTEENYRMLSSLPASIFLISSFAMLVHSLAASGQ

SEQ ID NO: 331 - DNA, 5024 bp, DROSOPHILA
attttttttattggattttgctgctcagcttgcccctggcaaaccggaattcgccgttcatcacgagattagaggcgagtcgaaaaaacgcgggtacgaaatcgaaatcgaaaagtagaggaaaaaatccaggccgcgaacccgagaacaaacatcacttggggcggagatgggctctcagatggattgctggccattttcgcacttggcggctgcgcatgcgcagcagaggaagtgggaagccacttaaccagcacacaggcacactcacagacgagctaagaaaccatcgggtgacataaaaacaagtacattcactgtgctccctggtaagtagctgcacatagggcacatatgtggaaccgtcaacgtgcccagcgtatcgagttcatatcgctggctctccgcaccatgtttcatttcattacccgatctggagttgtttttccgctttagcgaccacgaaactcttagcaccgccctcgaagccagctcgcttataactgaactcgtctctccgtcttcggtctcatgcgtatataatcggctccgtcgcagctctgtggagccactcaagccgaacccgatccaccggcccaaccacatgccactctcagcgaagtcatccaagaggcgaaatgccaaggtgttggagcggggaagtagtcgtgctcagcataaagccaacagagaagaacaacgaactaaaaaggttcgaagagatggcttgctaagtgtgaataccattgaagagacctgccatgcttgttgaaaataaatatatttataactataatttaagagtatacattaaatatagtataatcaaatatgggggtgcaatttcttgcttatttggatactctatatacgagtttctctaagaaaaagagtttccaacttccctactagaatctagaaaatgcacatctactatgccttgagtttgttttcttctttcgtttatattgaaagcaaggcatttctacagttcaccaagcctcgtgtgggagggaagtcactgatcgtatttaaaggctgaagccacacatcttaggcgtaagcaggattatactccatccacagactttcaaactggccgataagtcgcgccaaagctatcggtcaatcgggcttttgcgcgtgaggcaagtgccatctctgctagttggacgtaaacaacgtaaaatcgggaaattagggaaagtccagcggggcgggaaagaaggcagattctgatctgagattgtagacgtgctccaccggcgatggacgtggaggattccgtggcgagcggagcggcatccgcctgcaagcgccaaaagcgaaacacagattcccagaacgatggcgagcctgaagacgcggcgcagattgggtaagtgttgtgtcttgggttgagcatgctctgcggcttggataatccattgatttttcgcccgtggggaaccagtgaggagaacactgtcgccgaaagccagcctttaattaacttcgacacaattgtcactcacaacaataacggagagagcgatatggagggcaaggaaaaccagctccaggatgagagcgagcagtccgaggagcatcttgctaataaagttggacctgaggagctgccggaaatagaacaggcaggctcctccaatttagcgcatcaattatccccggaagcagcctccaccgtgctggcttctgatgagccagatgcttccaccggtgtcatcgagcctagcgacagcgaagactatccacctacttcaccgacgccaattgaagcttccgaagcggtcagttcaccccgcttcaatccacgcaacataccacccacgcgctcctatcgccgtatcagcatagagctagtgggctcctactcggacacaagcgattcagaagaacatgagctggaggaggggaccgagcacgcagaagagtacagcgatgatgcgcctgaaccgcatatagccgagtccgctgacgacagttcctccaacgacgacatgggaccctattctctttccagtgaagatgaaacaaccacagaggtaagttgttaagccttaagtgatggtaagaagggtagatcatgaggttacaaaattaagcttttagggataagttgagcttcttataaatccttgctaacaggttgagaacttgcaggacgaggtggagtttaacgaggacatcaaccccgctgaccgcgagaaagtagactacgccgttaatcaggtgatgtgcaagtgcaagcccaaatacacttggaactacgatcaggagctgttgcaaagggagcacaacataatcaaccggattgactggcgtggcggccacacttcggcctctagcttcggccagggctactacggttcccgccaagttgtggaacaaatgacgctgctcagttcgctaaacgtccaccacggctgcgtcaactccctgaacttcaatcgggcaggcgacttgatttgctccggctccgatgatctcaccatcgtcgtctgggattgggcgaaagaaaagcagctgcaccgctttcgttccggccacaacatgaacatattccagacaaagtttattgacagcgccggctgcttggacatcgtgtcctccagccgtgatggccaggtgcgccggtccgtcattccgccctccggaggcgtcataaagcccatccgtctgtacacacacagcgagtccgttcacaagatcatcgtggtgccccacagccgccacgagctgatgagcgccggcgaggatgcagctgttaagcactttgatttgcgagccagcaacgctgccaccacgatgatgcgttgcgtgtacaacgacgaaaatgagcgtggccgggtgcgcctattcagcatcgctcatcatccttacgcgcccgagttctgcgtcagtggatccgacgacattttgcgcgtctacgacaagcgcaacctagcgaaggcaatccaccagatggcccctaggaatttgctcgaagtaagcatgtgccgcgacccaggccaggcagtctaatctctgttttcttctcgtgtccaggcccagatcacgcaaattacttgcgctgtgtataaccacagcggcagcgaaatcctagcctcatacagcgatgcgggtatttacctgttcgacagtcggaactacaacagaggcgactatttgcactgctataagggtcacatgtaagtaagccctgtttcccccaatgttctgacactgacaaatatcatctcctctttcccacagcaacagccgcaccataaagggtgtgaacttctttggacccagatcggagtatatagtaagcggcagcgactgcggaaatatattcttctgggataaaaacacggaggcgattatcaactacatgaagggcgaccacgtcggcgtagtcaactgtctggaaccgcatccctggatgccggtgctggccacctctggactagagcacgacgtcaagatctggacaccacagggacctgaaagggtagggtcaacacaaaaatgggtacaagcttaatgtatgtaatgaaatccactctccgcagaaactccccgaggatttactgaagcagacgctgcagcgcaatttcaggtgcaacattgtggagagtattgacctcgacatcaacaatttccagtactttatacgcggcttcctgcagggctccggagcatcgcatctgcgtcagagacatacgtcttcgctaggtcatcaaatgcgggacaacagctccagccgcagcaacggctcgaatgcttccaacccgacttcccaccggcgcaacagcaacagctccgacgacacaaacgacgagggagcagacgccgacgctgcgctggacacgctgcactgccgcacgcagtaagcactccccgaggtgccgtagacgggcttcgaaagcagtcctcggcgattatataattttcgatattttaactatgttagaaagcgtttctgaagctgtgaatttgtaaccgtaacacataagtgcgcatattttatttttaaacaaggtttaataaatgctcattgagaataatttcgcgtcaaatacttttataatacttttttgggctcccaatagagctcagtcgctggtctggcagatgagagccacgctccgcttgacccagtgggatgccttaacatgcgtgttcaacagcagagggaccacgtagtttgtggagtgacctgtcgtggacagcgttcccttgcgctccgcggtcttgtagagcgggcagcggtagcgggagccctcgacgacatcgacgagcccgacaggtcggaaaaagatcacgggcatggcatagatgagcaccttggggaactgctctactagcgtgttctctcgccactcccagcgggcgccctccaggtacagtccgttgcagtacaccccgtcgtccggaggcgaagtctttgtctccaccttgagcacatcgtagtcaaaggtcagcgtgtcgatggggatcttgtactttcgggcaaagttctgcatggcgcccgtgaggaaggcctgcgtgaagaagaatccagacagccagaaggttggtggcttgccgtggtgatgccagtcgtggagccagttgaggcgcttgtacagatcctggacgtaggagccaagtggcttcaggcaggggtacgacttggacatccacttggtcgggatgcggttgaatttcatagccgtcattacgttctccaggtctggagtcatcacgatgatgcccttgattcccatagccaaatctcgacaggtggtacggatctccttctgcaacttgagaaagcgttccatctcctgcaccaccactgtgttcatggactcattgtagtctactgggtacttctctgccgctgcctcgatgtccatatcagccggcatttcgcgctcgatttgcttgattgtatccaggattacctgctccacactaactcctgcgccggcggatcccgctgcctcgctgcccagtaaaaggatcatcgagtcgagcagcgtcttggtcgtctg

SEQ ID NO: 332 - DNA, 2661 bp, DROSOPHILA
cctcgtgtgggagggaagtcactgatcgtatttaaaggctgaagccacacatcttaggcgtaagcaggattatactccatccacagactttcaaactggccgataagtcgcgccaaagctatcggtcaatcgggcttttgcgcgtgaggcaagtgccatctctgctagttggacgtaaacaacgtaaaatcgggaaattagggaaagtccagcggggcgggaaagaaggcagattctgatctgagattgtagacgtgctccaccggcgatggacgtggaggattccgtggcgagcggagcggcatccgcctgcaagcgccaaaagcgaaacacagattcccagaacgatggcgagcctgaagacgcggcgcagattggtgaggagaacactgtcgccgaaagccagcctttaattaacttcgacacaattgtcactcacaacaataacggagagagcgatatggagggcaaggaaaaccagctccaggatgagagcgagcagtccgaggagcatcttgctaataaagttggacctgaggagctgccggaaatagaacaggcaggctcctccaatttagcgcatcaattatccccggaagcagcctccaccgtgctggcttctgatgagccagatgcttccaccggtgtcatcgagcctagcgacagcgaagactatccacctacttcaccgacgccaattgaagcttccgaagcggtcagttcaccccgcttcaatccacgcaacataccacccacgcgctcctatcgccgtatcagcatagagctagtgggctcctactcggacacaagcgattcagaagaacatgagctggaggaggggaccgagcacgcagaagagtacagcgatgatgcgcctgaaccgcatatagccgagtccgctgacgacagttcctccaacgacgacatgggaccctattctctttccagtgaagatgaaacaaccacagaggttgagaacttgcaggacgaggtggagtttaacgaggacatcaaccccgctgaccgcgagaaagtagactacgccgttaatcaggtgatgtgcaagtgcaagcccaaatacacttggaactacgatcaggagctgttgcaaagggagcacaacataatcaaccggattgactggcgtggcggccacacttcggcctctagcttcggccagggctactacggttcccgccaagttgtggaacaaatgacgctgctcagttcgctaaacgtccaccacggctgcgtcaactccctgaacttcaatcgggcaggcgacttgatttgctccggctccgatgatctcaccatcgtcgtctgggattgggcgaaagaaaagcagctgcaccgctttcgttccggccacaacatgaacatattccagacaaagtttattgacagcgccggctgcttggacatcgtgtcctccagccgtgatggccaggtgcgccggtccgtcattccgccctccggaggcgtcataaagcccatccgtctgtacacacacagcgagtccgttcacaagatcatcgtggtgccccacagccgccacgagctgatgagcgccggcgaggatgcagctgttaagcactttgatttgcgagccagcaacgctgccaccacgatgatgcgttgcgtgtacaacgacgaaaatgagcgtggccgggtgcgcctattcagcatcgctcatcatccttacgcgcccgagttctgcgtcagtggatccgacgacattttgcgcgtctacgacaagcgcaacctagcgaaggcaatccaccagatggcccctaggaatttgctcgaagcccagatcacgcaaattacttgcgctgtgtataaccacagcggcagcgaaatcctagcctcatacagcgatgcgggtatttacctgttcgacagtcggaactacaacagaggcgactatttgcactgctataagggtcacatcaacagccgcaccataaagggtgtgaacttctttggacccagatcggagtatatagtaagcggcagcgactgcggaaatatattcttctgggataaaaacacggaggcgattatcaactacatgaagggcgaccacgtcggcgtagtcaactgtctggaaccgcatccctggatgccggtgctggccacctctggactagagcacgacgtcaagatctggacaccacagggacctgaaaggaaactccccgaggatttactgaagcagacgctgcagcgcaatttcaggtgcaacattgtggagagtattgacctcgacatcaacaatttccagtactttatacgcggcttcctgcagggctccggagcatcgcatctgcgtcagagacatacgtcttcgctaggtcatcaaatgcgggacaacagctccagccgcagcaacggctcgaatgcttccaacccgacttcccaccggcgcaacagcaacagctccgacgacacaaacgacgagggagcagacgccgacgctgcgctggacacgctgcactgccgcacgcagtaagcactccccgaggtgccgtagacgggcttcgaaagcagtcctcggcgattatataattttcgatattttaactatgttagaaagcgtttctgaagctgtgaatttgtaaccgtaacacataagtgcgcatattttatttttaaaca

SEQ ID NO: 333 - protein, 748 aa, DROSOPHILA
MDVEDSVASGAASACKRQKRNTDSQNDGEPEDAAQIGEENTVAESQPLINFDTIVTHNNNGESDMEGKENQLQDESEQSEEHLANKVGPEELPEIEQAGSSNLAHQLSPEAASTVLASDEPDASTGVIEPSDSEDYPPTSPTPIEASEAVSSPRFNPRNIPPTRSYRRISIELVGSYSDTSDSEEHELEEGTEHAEEYSDDAPEPHIAESADDSSSNDDMGPYSLSSEDETTTEVENLQDEVEFNEDINPADREKVDYAVNQVMCKCKPKYTWNYDQELLQREHNIINRIDWRGGHTSASSFGQGYYGSRQVVEQMTLLSSLNVHHGCVNSLNFNRAGDLICSGSDDLTIVVWDWAKEKQLHRFRSGHNMNIFQTKFIDSAGCLDIVSSSRDGQVRRSVIPPSGGVIKPIRLYTHSESVHKIIVVPHSRHELMSAGEDAAVKHFDLRASNAATTMMRCVYNDENERGRVRLFSIAHHPYAPEFCVSGSDDILRVYDKRNLAKAIHQMAPRNLLEAQITQITCAVYNHSGSEILASYSDAGIYLFDSRNYNRGDYLHCYKGHINSRTIKGVNFFGPRSEYIVSGSDCGNIFFWDKNTEAIINYMKGDHVGVVNCLEPHPWMPVLATSGLEHDVKIWTPQGPERKLPEDLLKQTLQRNFRCNIVESIDLDINNFQYFIRGFLQGSGASHLRQRHTSSLGHQMRDNSSSRSNGSNASNPTSHRRNSNSSDDTNDEGADADAALDTLHCRTQ

SEQ ID NO: 334 - DNA, 3540 bp, DROSOPHILA
acaaattcaacgatggcagtgccattgtgggtgtccatgtgaagtcgcactccacgctgacggtgccattgctggagcaaaccgactcggaggacgagtctggtgcaagcaacaaacagaacgcctccgatgtgatcttcgacgtgctgaagcgacgcgacatgcagcgatgaaagccaatccttgtacagatgtcctgtaaatgttgtaaattcaaactacttttatgtttaccagcaccttggcccacgcaactacttactacactgggattagcaatgcatgtttaagtaagctagttagtttgacactcttcattccttccgtcaccgattccctcaacttcctcgatgcattcccgccttgtgcatttaggggctaggctagatatatgagacgtacgtcaaattgaagtgtaaagagtaacatccatgtttaagttgattcgattgtaacgacacgaaatctaaggaacgaagagtattctttggacaatcaattaacttctaatagcagttagttttaatctttttgcatttgtgaagctgaaaatgtattgagaactgtccaaagtttgcttgagttccgaaatctatctcgtttcttttttgtaaaaactcgatcttaagtcatacaacctatgtaaaaataagaaagccttaatgaccctttcattgttccttaactgacatctttaatttggcattccaaattgaattgtaaacccttatagttataagaatttttaatttgaaagctcccgcaaacgtctgattaaattaaacaaggggcattgttctttagcgaattataaataatgtcttcgttgtttttagttaatgcatcatttttgttgagtttttgacatattgtatttataagtttataagataatttcaaatatatattaaatacatatatattaaagcataacatcacgattattatatgggtgaggttcaactcaattgaacaagaccatatctacgttatggatgtcatttcacttctaagctatttggatttcctccaaatggtaatagtttcgtttttcccttttactaatctttggctacactctccactttggcgtgtttcaatgggtgctggttttcggtatcgtcttcaaagcgcgatcgcttcaaattcgtttgctctttgggaaggaaagtcgatgaatgtggagatggatcctgcagctgcacggtaattatgttgtaggtctctactgtgaccacttcatcggagaccaccaggtttgtgttctcagtgaaggactcctcgaatccggaatcgggactggctaaactctggttggtctgaacagagggactaccgtagtcggtctgaataacatggtaataataatagtcggtcagaacgttcatgtacggctcgacattcgcctcagtataggaggtcagtccaactaggtactccgaccagcgcctgaccccgctgacctggcgaactgcagcaatgcaggcggcagccaaaagggatggcagatcgttggcaaatctggaaactgaatgagtgttaagtggtatccaataccttccatgggaattcgatactcactgtacaatgtataatccgccatgcgaaggagcaactgcgccaaaatggacagcatctcttcgaagcttatatatcgctggtacggctgggtgtgatggttccgctcgtactcatccaacatctcgatgtagttcttgaaatcggagcgagtgagaaaactgcaggcgaagagctccacaaaactggcggtggtgggacgtattagctcgaagttcaggaagcacaggatcttcctttccacagccttgtactcgaatgccgtataggcgttcttgaccaatcggttcatttcgctgtagcgcggaataaacgcatccgtgttttcgatctgcgcagctatatgaagacaagtgatggccaccaggagcaatttgtccggacggattttgtagtaatcaacaaagcgatccatatagtagacggctggagtgaaacgagttacaatgagttgtgcacatgggttttgtgcctgcagcgaggctcctctgtacagtgctcacccaggtgcaaagcacagcgactaagcttgtgggcgctggtcgccagtttgagcaactgcagcattcttcggcgctcgttcagctgcggcgaaaggtaaaacaaaggccgacggctgagttcttgctccctcatggtcaaaaatatatcccgggcatagtcggtgagccagtgcgtcttagccaggcgctacaaattggtatttaacgaaataaagtcgggttcgcaaaagttaagcacatgtccgttcacctcgacatctgcttgcgggcaagttttcttcaatttgcggtcgacgacgaagatgttctgctcggcagccactttctgctccattgtatcgaaattgaatgcaatgccttaaatcaccgattttaaggcaagaacttaacggcggaaaaaagcaaaacaaatgaaggagaaaacaaaaggagcgcaaacatggcgctacaacggttccggccagtgctaccacactgcgaagccaaacgagcagcgttcccagactgcgcttgggagtgttaccattcgctaaaattagcacatatgtacaaatatttaaaacaagtttaatgattaattgtgttactttaattcatcaataacaagtgttttaatttaataataaactgtcatatgtgcttagttcaaatcatctgtagtattcagtgaaggcacgaatgtttccaagcaaacggggacctcatctttctgatttatcaccatttgaggcagatcacagccaaaataggcgttatttttgacacagaacaggattagctggcgccagcattcgtcgacggccagaagatggggattcccgaagatgatcatcatggcacgtgctcgggaaacggccacgttaagtcgcttgctgcaacgcacgaatcccaaggagaagcgggcatccatgcgcaggatctcttctgatgaacgcaccgtggatattagtataatgtctcgttcctggaaataacaaacgttaagtgtgcacgtaatatcgattttagttccgaccccacctgtccctgaaactcctcgacggatccaatcttcggcatgaccacgtcggtgccaatgaacatactccgaagcatcttcacctgcttctgatagggcgtgattataccgatctgatcggcagtcacattggcacggtacagggcgatggtcattaggaacacctccctgacctcttggggattgaaccaggaaggggaatcgttattttgcctgttttcgccaatgattccgtaaaagaacgtgccgtgcgcttgagggatatccttttctgactcaaatacacaccgcagtttacttagtaggcgagattcccttgaatccttttcggaaagaactgggatcagttcgtcatcgtagaatagcctgctataaatgctcataatcgacggtaatgctcggtaattgtacaacaatttggttagcactagtggattgtag

SEQ ID NO: 335 - DNA, 1347 bp, DROSOPHILA
cggaaccgttgtagcgccatgtttgcgctccttttgttttctccttcatttgttttgcttttttccgccgttaagttcttgccttaaaatcggtgatttaaggcattgcattcaatttcgatacaatggagcagaaagtggctgccgagcagaacatcttcgtcgtcgaccgcaaattgaagaaaacttgcccgcaagcagatgtcgagcgcctggctaagacgcactggctcaccgactatgcccgggatatatttttgaccatgagggagcaagaactcagccgtcggcctttgttttacctttcgccgcagctgaacgagcgccgaagaatgctgcagttgctcaaactggcgaccagcgcccacaagcttagtcgctgtgctttgcacctggccgtctactatatggatcgctttgttgattactacaaaatccgtccggacaaattgctcctggtggccatcacttgtcttcatatagctgcgcagatcgaaaacacggatgcgtttattccgcgctacagcgaaatgaaccgattggtcaagaacgcctatacggcattcgagtacaaggctgtggaaaggaagatcctgtgcttcctgaacttcgagctaatacgtcccaccaccgccagttttgtggagctcttcgcctgcagttttctcactcgctccgatttcaagaactacatcgagatgttggatgagtacgagcggaaccatcacacccagccgtaccagcgatatataagcttcgaagagatgctgtccattttggcgcagttgctccttcgcatggcggattatacattgtacatttccagatttgccaacgatctgccatcccttttggctgccgcctgcattgctgcagttcgccaggtcagcggggtcaggcgctggtcggagtacctagttggactgacctcctatactgaggcgaatgtcgagccgtacatgaacgttctgaccgactattattattaccatgttattcagaccgactacggtagtccctctgttcagaccaaccagagtttagccagtcccgattccggattcgaggagtccttcactgagaacacaaacctggtggtctccgatgaagtggtcacagtagagacctacaacataattaccgtgcagctgcaggatccatctccacattcatcgactttccttcccaaagagcaaacgaatttgaagcgatcgcgctttgaagacgataccgaaaaccagcacccattgaaacacgccaaagtggagagtgtagccaaagattagtaaaagggaaaaacgaaactattaccatttggaggaaatccaaatagcttagaagtgaaat

SEQ ID NO: 336 - protein, 386 aa, DROSOPHILA
MEQKVAAEQNIFVVDRKLKKTCPQADVERLAKTHWLTDYARDIFLTMREQELSRRPLFYLSPQLNERRRMLQLLKLATSAHKLSRCALHLAVYYMDRFVDYYKIRPDKLLLVAITCLHIAAQIENTDAFIPRYSEMNRLVKNAYTAFEYKAVERKILCFLNFELIRPTTASFVELFACSFLTRSDFKNYIEMLDEYERNHHTQPYQRYISFEEMLSILAQLLLRMADYTLYISRFANDLPSLLAAACIAAVRQVSGVRRWSEYLVGLTSYTEANVEPYMNVLTDYYYYHVIQTDYGSPSVQTNQSLASPDSGFEESFTENTNLVVSDEVVTVETYNIITVQLQDPSPHSSTFLPKEQTNLKRSRFEDDTENQHPLKHAKVESVAKD

SEQ ID NO: 337 - DNA, 3240 bp, DROSOPHILA
ttgttgctgtgcacttgcttgttaatatttccatttccgttgttttatggcccgattccgaaaggcctagacatcgggaagacaaaggctacacgtgcatatagaatacaaggaggtacaaaatggaagtatattcgagttgagtgccccgctttacaaggacaataacaaggagcaacagcttcaagtgcacgagcaacaaatgaagccattacattcacaggcttatcggcaatgtcaacgagtctacctcgctttttgccaactcccgtccaacaaccaccacccatccattgtttgcataaaattgcaatttacaattatgagaaaaacagcagcgaggaaaatgatgacagagggcctcgcttatctgcggaaattttcgcttagataagctcaaacggcgaaatggaacagaaagaacttgtttgcattagctaaatgagacaaaaatttgataaattactaaagagcgggggttacacagggcaaaaatattacacttattacaattcctattatatagtttgtgcataagtgcggcacgttctaaagttatttttagcacatttattctgtgtgtacaaaaaataacgttaaatcgaagaaagggaatccccagttgcaccaagggaatgaggaaaagttgggaaaatgtaacttgcttccataattagacacgctgctcacacaagatggaggcataaattattgccagtcagtgtggagtgtgagggacttggcatcttatcattaaattagtttcggtggaggagggcagcttaaatgagagattattgcacaagcgagcgataaattacgcaaagccttatgaatgaggcctaaattcgcttgagttttggccagattgcccatagcaaaaatataacaatcaagtgaaagaaaataatgctcttcgttccatattcaaacagaatttgtagcattattttagagtcaaattaggcatagatattaattagaatataaactaactcacctccatatctgcaatttgtcttgtcagcgggtatattgccattcggttcgagtcggtccaagtattcctccgaattgtagccgttgtatggaactttgttaccgtggttgtggtgcccgccatgtccaccgcgatgatgatggtggtggtgatggtggtgcgtcgactcgtcgccatcttcgcgggaaattgaaacctcaattttcaccgtggaaggcgtgcagctttacacggagccaaatcgacagaataaatgaaaattaaagcaagtcctctctgtggatggcgtacgtttctactgttaggatccaaatcacccaatcaacatcctcctggactatcaatctgtcaatcaacctatcgcatcatccagcaatcgacagccatatataatgcaagaggaacttctcgcccgcgcagaagttttgtactataattctatgatactttttagttattagttcgatttcgcagtgagttagctgagggagtttagcagaagacacggcaccaacggcagcattttattttcagtcaaattgcttaaagttagtttagatttctgtagatttctcgccatcctgcagccgcgtcgtaaaggatactcagtttagtcaaagcgcagacacgtttttctgtattcttttgtaagctaacaaaaatttacatttaatggtagcttttagtgagtgaattgcctctgtggattacgcaatattttcgattgcaatgagtgagagataatcatcatgatgtttgatatgctcgtgtgtatttcgttttcattattttttcctttagtttttattcgatattttctacgcgaatgttcgactgcggagtgttgattaaaattgcaaatataaattcaattggttactgctttaatagagtgcaattaataaaaattaatgaattggcggcaatgcgccaaaaaaaaaaaatgaatcaattaatcaaataatgatgtgctcaaaaggtgtacgattatttccaagcaattactcaacttaaaattatgcacattttcaaattaagacttgtttagttctgctcacagctccttttaattgttggattgtataattttgtaacgtttcctttgtcattttaaaatatatcagttcgccgcgctgtttaagtgataattttataactattaaatgaatttatgtaaaaagcaagtaaatcaattattaacaatatgtaaaacaataaatttaaaccatttatacaatttatgtttgatttcgttttttatctttttattttaagttttaagtttttggttctttccacagatttgctgacgtgcggatgatgattaaattcctagaaacatttagtcaaaaatcaaaggtcgggaggaaggctgacggatcataaatcataacattttcgatgcaaacttaagcgaatagataaacaatttaactagcaaagaacgcaaaatagtagaatcaaatttttagcaatcaaccaaaagtaaattcgaaataaaatagccatcaactaaacactaaagtaacctaaccaagtattttacatagagttcgtagcgagaagtatcgaaaccaagcccaatccatttccataatctaagaaacgtaccgtatttggccaaaacgagaggacgcccgccgtattcgggttccacaaatcttaaagagaagttcaaatgagagctaacaaatgtgcaaattgaaatcaaagacacttcacatggttttgaaacaagtaaatgaatcaaaaacgatttgagtagaggaaactaatgcgtagaacaaaatatattatgaatatcgtaaaaatctatgagaaagacgagccaatttgagttgtaggcaatcaaattgctaagattctctgattaagacatgattataaggagatatcaagcccgttaagttagttgatacttaaatagctcgaacaaaactcgattagggccacgttttaatagcgctccaaaaccagattatattttgtagcaaaagtaaaagtcaaatttaaacaatggcgaatggaaaaccaaatatttcaaatgaataaactttttctgtgatttatgaaaaaagtatgcaaaaacacacactgaaatacactacagcaaggtaaacacaacacaaagtaaacaaaaacttaataaagataaagaattaggcactttagaaaacaaacgtagcagctggccagcaaaattgtttagaattgtttgctagccaagaagagcagtacat

SEQ ID NO: 338 - DNA, 2921 bp, DROSOPHILA
agttcacaatcgaacgttcgccgcggctgacgtttcgctctcgctcgctccctctgttcccgtcttattcgcgcgccgtccaccgctctctttcgctccgccagtggctttcaaactgcagatattataatatttgacctcgtttacttgcaacttcggcgtcgccgtctgataaaaaaaacaaaaaagaattgataaacccatatatttatacgagagtgtgtgctgtgtttggagctcatatatatttgcatcggatttgtgacccagtgaaattcccgagtatccaggaaaaccaaagatatgtgtgccatcagcgagagtgttaacccaactaaataatcaattgaataacattgaaataaacttacctgtgcgcctgaaattcgtcttaaagcagaaacatggccgaattaatcagtcagcccactaaaattaacaacaataattttggtgccggcgtcacaatgcgcgagaaaaagggaggagcccttcagaagctcaagaagagactttcgcacagcttcggcagattaacaatttcccgcgaagatggcgacgagtcgacgcaccaccatcaccaccaccatcatcatcgcggtggacatggcgggcaccacaaccacggtaacaaagttccatacaacggctacaattcggaggaatacttggaccgactcgaaccgaatggcaatatacccgctgacaagacaaattgcagatatggagactggcgcagcacggacagcaccgaccaccacgatcgcgtccagagacagctttccgtgtcctccgacagcaagttgctcgacgaggacattcgcgaggagatgaagtaccattcgcacgtggtcatgcgtcccaagaagccgcccagacccaaatccgaggtctttctgaacaaacaggaaacgcatccgcgccggaaacgattcagtgcatttggtggcgactccccatttggcaagcaggaggcctatgttaaactcgagccgctgggcgaaggctcctatgcgacggtctacaaaggatttagcaaattaacctaccagcgggtggcgctgaaggagattcgcctgcaggaggaggagggagcacccttcaccgcgattcgcgaggcctcgctgctgaaagaactgaaacacagcaacatcgtcacgctgcacgacattgtccacacgcgcgagacgctgacctttgtctttgaatatgtgaatacggatctgtcgcaatacatggagaagcatccgggcggcctggatcatcgcaacgtgcgcctgttcctcttccagctgctccgtggactctcctactgccacaagcggcgtgtcctccatcgggatgtcaagccgcagaacctgcttattagcgactgcggcgaactgaagttggccgatttcggactggccagggccaagagcgtgcccagccacacctactcccacgaggtggtcacgttatggtaccgccctccagatgtcctgctgggcagcacggagtactcgacctcgctggacatgtggggcgtgggctgcatcttcgtggagatggtgaccgggatgccgacgtttccgggcatacgtgatacctacgatcagctggacaagatattcaaattgctgggcacgcccaccgaggacacgtggccgggagtcacccactttcccggctacaagccacacaagctgggtttctatcgaccacggaaactgggtcacaacttcccacggctatacgacatcatcgagggcgagacgatagctaacggcttcctgcaactgaatccggagcagcgtttgggcgccgatgatgcactgcagcatccgtactttgcgcagttgccaaagaaactctacgaattgccagacggtgaaaacctcaattttcaccgtggaaggcgtgcagctttacacggagccaaatcgacagaataaatgaaaattaaagcaagtcctctctgtggatggcgtacgtttctactgttaggatccaaatcacccaatcaacatcctcctggactatcaatctgtcaatcaacctatcgcatcatccagcaatcgacagccatatataatgcaagaggaacttctcgcccgcgcagaagttttgtactataattctatgatactttttagttattagttcgatttcgcagtgagttagctgagggagtttagcagaagacacggcaccaacggcagcattttattttcagtcaaattgcttaaagttagtttagatttctgtagatttctcgccatcctgcagccgcgtcgtaaaggatactcagtttagtcaaagcgcagacacgtttttctgtattcttttgtaagctaacaaaaatttacatttaatggtagcttttagtgagtgaattgcctctgtggattacgcaatattttcgattgcaatgagtgagagataatcatcatgatgtttgatatgctcgtgtgtatttcgttttcattattttttcctttagtttttattcgatattttctacgcgaatgttcgactgcggagtgttgattaaaattgcaaatataaattcaattggttactgctttaatagagtgcaattaataaaaattaatgaattggcggcaatgcgccaaaaaaaaaaaatgaatcaattaatcaaataatgatgtgctcaaaaggtgtacgattatttccaagcaattactcaacttaaaattatgcacattttcaaattaagacttgtttagttctgctcacagctccttttaattgttggattgtataattttgtaacgtttcctttgtcattttaaaatatatcagttcgccgcgctgtttaagtgataattttataactattaaatgaatttatgtaaaaagcaagtaaatcaattattaacaatatgtaaaacaataaatttaaaccatttatacaattt

SEQ ID NO: 339 - protein, 509 aa, DROSOPHILA
MAELISQPTKINNNNFGAGVTMREKKGGALQKLKKRLSHSFGRLTISREDGDESTHHHHHHHHHRGGHGGHHNHGNKVPYNGYNSEEYLDRLEPNGNIPADKTNCRYGDWRSTDSTDHHDRVQRQLSVSSDSKLLDEDIREEMKYHSHVVMRPKKPPRPKSEVFLNKQETHPRRKRFSAFGGDSPFGKQEAYVKLEPLGEGSYATVYKGFSKLTYQRVALKEIRLQEEEGAPFTAIREASLLKELKHSNIVTLHDIVHTRETLTFVFEYVNTDLSQYMEKHPGGLDHRNVRLFLFQLLRGLSYCHKRRVLHRDVKPQNLLISDCGELKLADFGLARAKSVPSHTYSHEVVTLWYRPPDVLLGSTEYSTSLDMWGVGCIFVEMVTGMPTFPGIRDTYDQLDKIFKLLGTPTEDTWPGVTHFPGYKPHKLGFYRPRKLGHNFPRLYDIIEGETIANGFLQLNPEQRLGADDALQHPYFAQLPKKLYELPDGENLNFHRGRRAALHGAKSTE

SEQ ID NO: 340 - DNA, 6175 bp, DROSOPHILA
cccttcaaggcattgaatattggacagcaggtggagtgtgtaacgcaggtcgaaaaggacggtctgaaggtgtggaatcggctatatagtgacttaaaatagttgggggttatatgaagtctattttgctataatttttgtaaatattcaataaacgatactgtttagaggaatgatcatgatcaatgtattttctccgattacaccgcaattgtgcccactgtgctcagctttttcggagctttacggcaacgccccactccagtcgaaagatcggtgatcgtgtaaacaaaaataaatcgcgtcaatttgtttgtttacactagttttgccggcacgatcaaaatgttgttgaccccctcggtgggcggcccgcctctttttcccttgattttctggcaagaagccttagaatagtcacttttataggctaagtttacgatagatcagctgagatcgcggcgtagttgcttatggtagaagcataaagtttatgacacctggtttcctaataactgagatacttatctatctcgcagatacttcactagaaacttcacgcaaccaggtagtgtttaaggaagctgtgattttatgcatgctacgtttaaaagagagattttttttcgcagtgttgattagttatgcattcgctaggaggaactgccacgcccactggccaagcttccagccgactgcccacgctcgatgatcggatccagtcatatcagttattccgtttatctcgtcaccgtacttgaaatacacaatttgttgtattctgtcttctttttttgtgtgtttcttctctctctaccgctctccacgctcttcttgttcagtaatttgtattctgatatttgtgttaatgtagtatattttttttctataatattttctttacttgtttttgcctattttgtgggctcttttcgctggccgctcgccgctggaattcgatgtgaaaaagtgtgtttttaatttcagtttcggttcggagctggcgcgatacagtacgcagctcgcgcctattagtatctacgtatagcaagcaaatcgatcggatcgtgtggcggtgctctagtcaatccgatatgaataagaacctcggctttgtggagcgcttgcggtggcgcctcaagtaagtttctccgtcgaccttaattgtgggaaatatttattaaattactggtttttaatgccagagagtgtttttctatactctcaattgtaattgttgttatggttaagcttcggtttcggggttttgtttgctcagctattttttctggctttttataaagtaatatctgctacccactggtaagcatgactaatttttggatggcagaaactaataatgtgtggcttcccaattaagtctgctttgcagacgagagattaagctgtggagcgttatgcaatcgtgatgactataggtaggataaggtcatcaaaatacatcgattaaagcagatatgatataactttattagttgacactgcaaaacttgaattatttattggcattctgtgggaggcaaacatactaaaacttaaccaaaacagcctatcaaaaacattaactgaaaaagtttttacatattcttgtgtaatttcacaaagtttttgttgagggtataaaaccgtcacttgggagcattaatcgaattcataaatctgtattcattgcttaatcagtttaacgctaaagatattttatatttattggccaatttaccagtaatgaaattgctacagcgatatattgtacaaaatgggatgtgccactataggctacttagctatgggatgaaaatcgttggcaaacatctataaaatctctaatgacgactgcacccttacacttgaaagacgagtagctcgtcaatatagataatgttaattaaacattgactctactcgttgtgagtcaataattattagattttcaaagtcatcgtagtctcgtccggttcttatcacgcattaaccttgataatgaagccgattggtaaaaatagtgtcagtttctcgccgttttaccgtgtttcgctttaaacgtaatttctataatggcaacttaaaattttatcccgatgactgcaaaataggtgtgattttattttgttgccgtaacgtaatgtaataaaaagtctgcgctgagctcagaataattatcagcagttttacgcattaaatttgctattaatgttttatagatttaataaatgtacatacaaagaacttaaggggatacagaactatggaatcaaagtgtatttttaaataacaataaaaccaattgaaagtaattaaagcatggcctgagataaccgagtgacacctactgataaggcagaacaactgcttctgctcattaaatattcttaagattagtgccacattttgatgttcattaacggcagtccaagtgcttgtctgaacttcaacggcaaatgatttaagttcggtcctgggcattaaattttgggcagcggactgtgttaatttatcactgacagacgtgcctggttagcaggtggaccgcacagtcgactgcaccaactaaacctgttgttcagcctgatccttcagcattacatagctacgtgcgcactcaacaaaatacttgtgtatattattcaattttgaattcatttacaacttccgtgattcctctttgccttaagaaattaattcaggaagcaagggttttcttatattttccattcaggtcctagacaaaaatttccaattttataatgcaaaataagatattgttgggaggaaatcaagtattcttagctaatttttttctagtgttaacatagggctggtaagtgggttgtgatgcattgggatgagcttgtggatgcgatgtgatgaacatcagcaaaacaatttaaatttaatgcaatgcatgcagtctgcctactggcatgtggctttgagaatgaattaaaataattgactttgtgacaaaaatatcaaattatctgggtgcagacccaatattattatgctaattacttcaaccatcgtgcatttgcagaaccatcgagcataaagtccagcagtatcgccagtcgaccaatgaaacagttgtcgccgacacggagtacggccaagtgaggggtatcaagcgtctatctctctacgatgtgccctacttcagcttcgagggtatcccgtacgcccagcctccggtgggggagttgcggtttaaggcccctcagaggcccattccctgggagcgagttcgcgactgcagccagccgaaggataaggccgtccaggtgcagttcgtcttcgataaggtagagggctccgaggactgcctctatctcaatgtgtacaccaacaatgtgagtaattctattaacttgtgtacataaaacatcgttaaaaccgtaataactttaaacattttttatttgtggtacattttaggtgaagcccgacaaggctcgcccggttatggtttggattcacggaggaggcttcattatcggcgaggccaatcgggaatggtatggcccggattactttatgaaagaagatgttgttctcgtcacgatacagtaccgacttggggctttgggtaatctactgtgtgcgtatgcgcaatattttgactaaacattattgtacctacacaggatttatgagtcttaagtcccccgagctaaatgtaccaggaaatgctggcctcaaggatcaggtgctggccctcaagtggatcaagaacaattgcgctagtttcggcggagatcccaactgcatcactgtttttggagagagtgctggaggcgcctccactcactacatgatgctaaccgatcagacccaagggctctttcatcgcggcatcttgcagtcgggcagtgccatttgtccttgggcctacaacggcgacattacccataatccctacaggatagccaagctggttggctacaagggcgaggacaacgacaaggatgtgctggagttcttgcagaacgtaaaggccaaggatcttattcgcgtggaggaaaatgtcctgacactggaggaacgcatgaacaagataatgtttgcctttggcccatccctggaaccattctccacgcccgaatgtgtgatatccaagcctccaaaggagatgatgaagaccgcctggagtaactccatccccatgtttataggaaacacttcgtacgagggcctgctgtgggttccaggttagatattgggaatttttttgaattttctttcaataagtaaatttaattttatttcacagaggtaaagcttatgccgcaggtgctgcagcagcttgatgctggcacacctttcattcccaaagaattgctggccacggagcccagtaaagaaaaactggattcgtggagtgcacagattcgagatgttcatcgcactggctcagaaagcaccccagataattacatggatgtaagtgtcgtccaattaggtgcttacataatcataagctggtaatttatttcagctctgttcgatttactacttcgtgtttccggccctgagggtggtccattcccgacacgcgtacgcggctggagctccagtatatttctatcgatatgacttcgactccgaggagctcatttttccgtaccgcattatgcggttgggacgcggtgtcaagggggtcagccatgccgacgatttgagctaccaattcagcagcctgctggctcgccggttgccgaaggaaagtcgcgagtacaggaacatcgaacgaaccgtgggcatctggacccagtttgctgccacgggtaatccctacagcgagaagatcaacggtatggacactctgaccattgatccagttcgcaaatccgacgaggtcatcaagtgcctcaacatcagtgatgacctgaagttcatcgatctgcctgagtggcccaaattgaaggtctgggagagcctctatgacgacaacaaagatttattgttttaaatttaacttactgttctgtacagcctaacaaagaagtctctagaaactgtaaataggtcaaaatgctttataaaatatattctgcaattggattgttttgctttataactagtttgcccaatgattgcatgtggatgagaaatcctagtttaggtgagatttaaaaatatatatttctatttatctctatatttacctcagtttacgccatttatttaaatgcttgataacttcttaataagtttgaatataaaaacaatgttcgacatgcccttttgactttactgtcaatagcaataggaaaattaaatttttagacttttttaaattaacaagtttttttccgagatctagggaaaacaaaggaaaggaactctgatcccgttgatagaatggctgccactcgtcgtctgacacgggaactctccgatctggttgaggccaagatgagcactctgcgcaacatcgagagtagcgatgagtccctgctgatgtggacgggtcttttggttccggaaaaggcgccctacaacaagggcgccttccgcatcgaaatcaacttcccgccccagtatccctttatgccaccaaagatcctattcaagacgaaaatctatcaccccaacgtggatgagaagggggaggtgtgcctgcccatcatcagcacagacaactggaagcccacaacgcgcacagagcaggtgctccaggccctggtagccatcgtccacaacccggagccagaacatccgcttcgttctgacctggccgaggagttcgtaagggagcacaagaagttcatgaagacggccgaagagttcaccaagaagaatgcggagaagcgaccagagtgaagtcagccgcagctcacatttatttgtatatcaaaattatatatagtttggaccatcaattaaaacttgtcagacataagttgtccatattttgaatgttcgctaagatatatgtatggcgcattaaatggacggtaattcgataaaaaaaatgggcaagaaaaaaagtacagttaaaaagaaattcaaaatatttttcaaaattgaggtaaaaaaattgtggccgttggtaagcgtggaatacatgttgttggtttattgctacaatcgtagccaactcttggctacttggcggtgattgtggccggtgtctagcaatctactaaagaaaact

SEQ ID NO: 341 - DNA, 2001 bp, DROSOPHILA
ctggcgcgatacagtacgcagctcgcgcctattagtatctacgtatagcaagcaaatcgatcggatcgtgtggcggtgctctagtcaatccgatatgaataagaacctcggctttgtggagcgcttgcggtggcgcctcaaaaccatcgagcataaagtccagcagtatcgccagtcgaccaatgaaacagttgtcgccgacacggagtacggccaagtgaggggtatcaagcgtctatctctctacgatgtgccctacttcagcttcgagggtatcccgtacgcccagcctccggtgggggagttgcggtttaaggcccctcagaggcccattccctgggagcgagttcgcgactgcagccagccgaaggataaggccgtccaggtgcagttcgtcttcgataaggtagagggctccgaggactgcctctatctcaatgtgtacaccaacaatgtgaagcccgacaaggctcgcccggttatggtttggattcacggaggaggcttcattatcggcgaggccaatcgggaatggtatggcccggattactttatgaaagaagatgttgttctcgtcacgatacagtaccgacttggggctttgggatttatgagtcttaagtcccccgagctaaatgtaccaggaaatgctggcctcaaggatcaggtgctggccctcaagtggatcaagaacaattgcgctagtttcggcggagatcccaactgcatcactgtttttggagagagtgctggaggcgcctccactcactacatgatgctaaccgatcagacccaagggctctttcatcgcggcatcttgcagtcgggcagtgccatttgtccttgggcctacaacggcgacattacccataatccctacaggatagccaagctggttggctacaagggcgaggacaacgacaaggatgtgctggagttcttgcagaacgtaaaggccaaggatcttattcgcgtggaggaaaatgtcctgacactggaggaacgcatgaacaagataatgtttgcctttggcccatccctggaaccattctccacgcccgaatgtgtgatatccaagcctccaaaggagatgatgaagaccgcctggagtaactccatccccatgtttataggaaacacttcgtacgagggcctgctgtgggttccagaggtaaagcttatgccgcaggtgctgcagcagcttgatgctggcacacctttcattcccaaagaattgctggccacggagcccagtaaagaaaaactggattcgtggagtgcacagattcgagatgttcatcgcactggctcagaaagcaccccagataattacatggatctctgttcgatttactacttcgtgtttccggccctgagggtggtccattcccgacacgcgtacgcggctggagctccagtatatttctatcgatatgacttcgactccgaggagctcatttttccgtaccgcattatgcggttgggacgcggtgtcaagggggtcagccatgccgacgatttgagctaccaattcagcagcctgctggctcgccggttgccgaaggaaagtcgcgagtacaggaacatcgaacgaaccgtgggcatctggacccagtttgctgccacgggtaatccctacagcgagaagatcaacggtatggacactctgaccattgatccagttcgcaaatccgacgaggtcatcaagtgcctcaacatcagtgatgacctgaagttcatcgatctgcctgagtggcccaaattgaaggtctgggagagcctctatgacgacaacaaagatttattgttttaaatttaacttactgttctgtacagcctaacaaagaagtctctagaaactgtaaataggtcaaaatgctttataaaatatattctgcaattggattgttttgctttataactagtttgcccaatgattgcatgtggatgagaaatcctagtttaggtgagatttaaaaatatatatttctatttatctct

SEQ ID NO: 342 - protein, 572 aa, DROSOPHILA
MNKNLGFVERLRWRLKTIEHKVQQYRQSTNETVVADTEYGQVRGIKRLSLYDVPYFSFEGIPYAQPPVGELRFKAPQRPIPWERVRDCSQPKDKAVQVQFVFDKVEGSEDCLYLNVYTNNVKPDKARPVMVWIHGGGFIIGEANREWYGPDYFMKEDVVLVTIQYRLGALGFMSLKSPELNVPGNAGLKDQVLALKWIKNNCASFGGDPNCITVFGESAGGASTHYMMLTDQTQGLFHRGILQSGSAICPWAYNGDITHNPYRIAKLVGYKGEDNDKDVLEFLQNVKAKDLIRVEENVLTLEERMNKIMFAFGPSLEPFSTPECVISKPPKEMMKTAWSNSIPMFIGNTSYEGLLWVPEVKLMPQVLQQLDAGTPFIPKELLATEPSKEKLDSWSAQIRDVHRTGSESTPDNYMDLCSIYYFVFPALRVVHSRHAYAAGAPVYFYRYDFDSEELIFPYRIMRLGRGVKGVSHADDLSYQFSSLLARRLPKESREYRNIERTVGIWTQFAATGNPYSEKINGMDTLTIDPVRKSDEVIKCLNISDDLKFIDLPEWPKLKVWESLYDDNKDLLF

SEQ ID NO: 343 - DNA, 12267 bp, DROSOPHILA
ggtaaaagtgatgaaggggtatgttaaagatatatgtgtgctcactcatgtgggttgaaatttgtttgctgctgcgaggaaaatctccatggagcaaccaacttcttgaccccataaaggatttgcatctaccatataagcatttcgccacaggattagcatctcacgatcgactttccaatgatatccaggagttcatatgtcactcttggcagtgaaaagaagagttcgacttgtgggttattcatggcattcattgaggattgatgcagattattcagttatctgcaaaaaaaacttggttactgatttaatagaaaatgattgagcctgcaatagattttcatttgagttggtttatttatagtaaacaaaacttatatttttgttggccactaatggtctttttagatataattgattataaatgagcaaatgagttgtgcaaaacaagcatagatcgtaggttaataggatttaaataggctaactagtggatttattataaaatataaataaaaacaatgaaaatcaaagcttctttgttggggataagcttaaaacccaaggcaccttttgtttacaaagagatgttgctaacacaatacttgccggttcgctccctgcgtttaggtcaagtcaaagttcgatggtttacatatgaccaccagagaattgccgagagaattcctggagtatcgcattcagtgtgacactgaaaatgcgcatagcggacagcttaattgatccgtttgttcagtgcatgccgcacatttgctaaaatccacaccggccaacaacaagtcaatagccaggtgggtagccaagttaccaacttaccaatttacctggccgttggaagagagccgcttttggccacctcggctgccaactttccaaagagccgctccatgagcgctttcacatcgcaactctcttaagtcgcggtttggtataaaacttcttacgtatgcgcgtcatggcttaatcttaccttgaacttggtcgtgagcagatcgccgaggagccagtgcatccacataatcacctacccataacaacaaacaatattcgtgcgggttttcgattcgggttttttggaaaatagaatttgaaaatggaacaaagcgccgttgttcttgtgcgtgccgataaacgtatataaatcacgtgtgtgtgtgctactgactttggtttctccagatttccgatttcatctaacggtgctagtgaacatacaatataatataaatccacatcgaagattaggagagaggggcggccaatactaactatacaaaatggactggcagccggcagttatagcaggcctcatctgtctgctcctgccaacgcagatttctttggccaaagcctggagtttgccagcccgccatgcagatcgttcagatctggctttatcgccagcacaccagcaagttggacgacgattaaatggtaagacaggtctccaatcaaagctgctgagactctcttgcagctcccaaaatttctctgtattttaatttcgtatttttttggtgtaatataacgagttgtgagccagcagacaaagaaacaaaacataaacaaaagccctaagtaaaatacgtttattgcagtgaaatttcagttcattaagctgcctgtgagagtggcgatttcagcgttcggcaattatataatcggccagccgccaaacgaaagtcgccactgtcactgccaccgaagccaaagaatcgccaagatttatgagccaccagagtggccgcagatccatcagggctgtcactgtaaaacaggcatcaatcttggccagcacacgattctccctccatctggggaaaaagatcataaatagttgcagtgaaaatatattttaagaatatatgtattgcacacccacttttagtaccaaatactaatgagaaaacattatattattcggaactatctaacatattgtttagaaattttggtggtttaacagaaaaatgattaatggcacacgaaaaccctattgaaatcttaatttcccctaatgtttttatgagctgtcaatcaggtgacttcgatgggcaatgcagcataacaaagtagcttgcatgcgacttggttcttaccaatttggttctgttacgttgtggagcgtacgacacttttttcgtggccgctgctgttcagctttgtttcaagccactacaaagtctcgagtgcatggcgaacaattagcaaaggaaacggctccgagctgtggggcaacgcatccagaagtaacatagacattattcagcgagcacagtcaagaattctgagaattatcactggagcgccgtggtaccttcggaacgaaaacatacacagagacctaaaaatcaaattagtaatcgaagtaatagctgagaaaaaaacgaagtataacgaaaagctgaccacccatacaaatcccctcgcaagaaaactaatccgagtatgcagtcaaagccggctgcaccgcaacgacctcccagcccagcaataaacttattagggcattaatgaaaaaaaaaaactatcactaagtgaaagttaattaagttagattaagatttgaacacttattgttagtctcttaacacaaagggaagattcaataaataataaaaattaaaaaaaaaaaaaaaaaaaaaaattagcaaaggcgaggcaacaagtgcaagaaggcactaccattgctaagcagacagaaaaaagcatacacctcgttatcgtttagggcacttggcgtctcgatctgcttctgagcatgtaatatgggtcataaccaactaaaccagaaccaaaagaagggcggctggttgggtgttacgatagacataggccccgctgaatgtcgagtcattaaagaagtggcaagaaaacatgaattaacgttttgttctccgattaaacgaatatcagatacacttgaaccgaacttgagatatgtaaatttaattacgaaagtcacggagtggaaataaatgaatgggcggcaactgtgaatatgatgtgggcgatgtgttagtccaaatacttggcacattcatttagaaagtggaatctgtattattttatcataattatcttaaatagtccaagaaataattatagattaattcaatagcttggttaggttgcatgccagtataatgcattctattactacaaatctgtaagatacaaaacttatcttgtgcaaccacaaaaatgaagactagttcatttcattcattgatttcaagattcattactgagagacctaatttatttcttccaaaagacatgtgtatcctaacttaatccaaaaccccgaagctcccgaagagcaaacacctgtaaaaggcgcaataacaacaatagcaatgcaaacaataagaatggataaacagccgtgcagtctaaacaagttgatttcttagtcgcgatactgtcagattcagatggtgatggtgactacaccaacttggtgttgagccaacccaaacttgaagggagttatcccgaggaggaggggaaatgccagcgtctccattccgggggcttgtattgtacaaattgcgccgacaccaaaagccaagcgaggcgcaagagacaacagaaaaacttgaaaaacactcgtaattgggttataaccgtcatatttgtatgtgagagtgtccgaggcaagtcacctactatttaaataagcccggtccccgaacgggtctgggcaaaaggcaaacaatgccgcactggaaaccatggctaagcaaaactcctaaacggagcagcattggcgacatttttggtcgcgaagcgcacaaaaatgaaaagtgctgcgcttcactggaatgaaatctaatttcattttttaattgtcgcttttctggcatcggtattggcatctcgcccagcttggaatgatggccaaactggagctgcatgaagctgtaacagcgtctccatctgtcaagttcgactcgccacttggtccacttggtttcgagtgggatttggatcactatttcagttgcagccatttgccacactggaaaacgcgtggaaatatttccataattgctcagcgcacacttctcacttaataaacaaaacctgatccagctgagtatcgacactcttacttgagagtcgtggaataactatataaacaataaacatgtcaattataactgcatatctatatttcttagatagcttagttataaatttcaaatgaatatggcttgtaaggaatagcttatagtattgctaatataaatatgaaaaattagaatatatatttctggtctcataacaaagtttccctcagtgcatccatttgatttgcctagtcaaagtggagctctaatcaatatacaacatgtgcagcgttgttgctcaacttgtagctaccggccatgtcttgtttgtgttttgagtttgcatttaacttgcggttgacttcgtcgtcggcggtgtcttcaattcaaattctgcgccagatcgaaaccagtgaaagtttattaaagtttcaagctcggcagagctcttcatgctcacatgtccataggttcgtatgtctatatgtttatatgtctgatgggtcgcacgctaacggttaagagtgccatattgttccgtccgatttctataatggccataaaattcttttgaaacgaagtctgagatgctttaaatgccgaaaccactagatcattgtatttaattcaactgcctaaaaaggcttggcggcgaattaaatggcgagtgcttgaagctcagacagacagaatcaatttaaagactttaaaaaatataatttaatggtcttgtagagcaatcttgttaattattttaattgccacgggtgtctggactccgaagctaaaagtgaaaaagaaatacattatctgtatcttaggcttagatttcaaaagcaagcccactaaaccttcactttcaaatgaatcacagagcaaatttattcacgatatttttcaattgcttaacaaatcttaaaaaaagtatctttgctaaaaggctttgcttttatttagttttatatttctttttaagacagtctccgttcagacaagcccccaaatcattcgattcactttcaaacgccgcacacgatgctccatggccacatttcatgtttacaacttaatctggccaagaaaaataactcagaatttccagtcattatgctaatattttacgagctactgttatggccgctcctcaggcaaggtgaattagccaaatggccggcaagttggcccacatgcccagcagtccagcagcagtttacagttggccagctggagaagttaaggtttaccataggcaaatgcgtcacccatcatcaagctgaggcctagcattttcagtgactacctataaatatataactacaagtaagccacgcataaaactccatggcagtgaaagttcatttgatactggaaattagctgggacagggattattggcattgccatcgaattaccatacgccctgccagcaaaatggtaaagaaaagtgaaaagcccagaggccaagtcgaaatcatcggtccaaatggcaaatggcaacttggttaggtattggccagaatggctgctaagcagcttccaagcagctggagataatgtgccacatttgtcggccaaagaggacagctgccaaatatcaaagatgctcgccagggagtacactgaaagaaatattgtactttaatactactaatagagaccttagattagtcaatcttgtatgctatacttctattcaatatttttctattctactatcgattattaaatttaaatataaaatatttcgaatatagtgaaacgtctttcaaaaagattcctttgagtgcatcacgatgtggctttctttcaacttccccagagtcttcgatttcccttcttggcactcctttgctccctaactctgcgcattctggcacaggttttccttgttgctattcggttttccagcggcgtgggttgaatttagcaggatgttatctatgggatgtcaccacgagttgcaggtaaacaatttctcacaggcgggtacttgtggcatctcctcgcggctttcacttggcattgaatttggaaatattagcggagccttgggtcaaagtacgcgctgtaccattgaaagtgaaatgagccaaataaattgtgacaaacagacaactaacgacatgggaaaatacacacgaagtggcattacattttcacttatcacgactcctttcatgttgcagcatggcaattaaatcaacaaaaggcctaagcaaatactaatgaatttaagtagtgaataaattgctcaatttgtgcgaaattctgggaattttgtgtcatcagagagaggaaaattattaaagcgtgcaagccaacaaatttttggcgccagatgaataagtatttattttgctacttactatttcgtatttgattgcatgttttgtgtaaattgatttacaatggcatctttgccggcgcgacaaattaatttattcccatttaaatggcctcaaattaagatgcgatccagctggtcatgtagcaataattttaattgacagcaatcgctgagcttttcactccatcactgattgatgacaatcttcgatctgctaactaaaacatagctcgcgccgcgaacatcgggcattgtgtactggaataatggatatccaaaggggggagtacaatgcatctgcacgcaccgcacatcggtggtcagaaaaccacacaaggtgttgaaatgattgcccagtggtactggtcacacatactttcactcaaatatttacactggctgaaaatcgccaagttgaagccatgaccatgttggccaaatcagaccacaaatccccactgagtttgcccggacagaaagtccgtcgagctgtcaatcgcgcgtttgcccaattcgttggcagttttccatttaatatttgactagtttcgctgtatttacttacgccgatctctacgggctgtcttcttgcagaggtatcaccgtatctggacctggccttgtgccccatcagagcggaaccctggacctgtgcccgccaacaatccggtcggatacttgatgcttgggatggagagctgaatatccaatggcagaaactaaaaggtgagtttgggcaaatatacatagaagtattttcaaattttaattgattaaaatgtgacgatttagtcacaagtttagagcattagtccgatttgaaaattaggtcactgaaacaataataactacagaaagctttgagagaaacacgatcttcaattgttagtggaaaatatttgtatagacagagtttttcccacatatgtgggcaaataaaaatcccagcaatgaaaagctggcattttcaccaacctccaagctaaactcgaagtttaaacaactattcgtgggtgagactctaggaaaaagtcaaggaaacccccagggtttagtgatcattaggtgcgataatcaatgaattttggaggagttggttgtaaattttacacgcaactccaaaaaaaaaaaaaaaacagcggacgtgctaggaatttacatggaaaagcaattaaaatcgaaagcattttcttttttcaccaaattatttccccgtactttttttaaatttttttttgggacagtcgaggccgatcggcagatgaacgccacgatcgagagaagagggtacagcacatcggagttgcccgtgaaagagaagccgtcgacgatactgaagaaaattgagatcggcacgaattacatgaagaaatacctggccgagtccatggacgggtgagtgtgtggacaaactggttgaatgtagattttcgccagagtgttaatcttcctgttttttttttttgttttcgccatttcgccatcacctgcagcttcctaggtcgcgaatacgagtatctgcagacaccgaaagcggctgaggatgatagtgaaactgatcagagtggaaatagtgccgaagatgacgatgaggcggatgcggatgatgccagcaatgcggcggaggaggaggacaatgcagaggatgaggatgcggatgccaataatgaggaggatgatgaggaggaggaagatgaccgggatgaggaggatgacgactcggacagcacggcggaacaggatcaggatcaggaccatgagccagaggctgaagctgacaacgaagacgaggatgtggatgaggcggtctcagcacccgagagtgataatgaaaaggaaaatactccaagtatcttcagtggagcgccagcagcgcaatcccaaggtgatgggaaaaatcccgccttagccgaggacaacgcttcaacaggtaaagattagggataattcgcatatcctcggcattctcattatgcaactaacttgatgttcttcaatcaggtgtggaattcatcgagctccaggatggcgacgaaactgcggcgggtgcgctgaaaaagccgggcggcggtaaacgcaagaagaacaagaagggcggcaagcgcaagaagaacaagaagaagggtcacggatcggagacacagccctccactttggtggtggtccaggcggcaccggagcaccacgaggtggactcgggacacgaggatggatcctcggtgatcagtcacgggagctccgatgacacagtatccgtgggaaaaccgatgaggaagcggaagcacaagcgacgcatgaagggcaagcggaagcgcaagggtcaacatgggtcagccgtcgtggagcacgagcagagcgacctcagtctgggattgggcctgctcgacgaactggcggacgcggatgatgtgctctctggtgtcggcgggggaaaacgcaagcacaggaacccacttaattatggtagaagtaacggaggtgtgtgttgtttgctgcgtgtggttttacatgacttttgcgcaccgttttctcaagcacaacttagtgccttctatgtctaagcttccagttttgtctatgatatagagttttttcggtgaaaaaatgtttagaatgaattcgtgcatcttaaaaaatcgatgtctttttgaagtagataatctttaaagcacgtcaccgaaaatattctgtattggtcttgatgactggtttataaagtttgtgtttatatctggtgatggtgtaaggacgattatatataatttgtattattttattatatagattatgtcgttttaatattttattaccgaaaggcatagcatttatcgaattcataatggtaaaagtgtttctgaagccagcaaagttattttgtggcgccatctacataacagctgcggaagtctgagcttattctgtaagctgtgtagatggcgctgctgagttcttcagcaatgcggcaaatgttttcaatgtaaattcaaatctttggcatacagtagtttaagttattttaaataatttaagtgtttggtttaaattaagttaagttgcctgctttttgcttgctttttgaatgccgtttcgttatcgttgacgcacctaacgcgcactgcagttcatactaacaaacaccaccctcccaagcgaagaatttaaatgttatttgcgttttttgttcgatctagccaagtaagtgtgatcaacccagagtacaatgatactaatgcatacgaatttcctttgatcatcatttatcgaaatgtatatagttacccgcggcaagaagaagaagaagaagaaggccattgccaagttcataatgattggcagcttcctgaaagccaaaatcgaactgctgctcaagatcctgggcgcccatctgcaggtcaagttctttgccatagccctgattggtctgctgatcaatatagcccgattctggatcgatgtgaagcgcggcagtccgccatctaaggtgagttgagcttgggtcccagatcctgtgagtttgttccggtgcatttagcccggtttcactgtactgacatcacacgaacatcatcatgttcaggttgctagaccaagggataaccgactctaatggattttttgcactctttcagttctgataagaatgtccttacactagtcataagtgaacaaccatttttatgggccacggtttgttttcgatgctgtttgttgtcaagcaaaaattgagagttctcaccaagaaatgtacaaagaaaatttaatttgatttaaaggttgatcgtaaaaacatacatgtattagcgtgaattcatttaaaatataacgttgtcttttactcaattatttattcatttaaatgcttttaaattccaaatttgaataaatctttctttttctaaaattttatgttattatgatcaacaatttttctgtgtacctctgctaatctctttccaactgcccttgtctctcgactctctatctcttgaacaaatgatgtatataaaatatgtaaaatgcgttgataccttccaaaacacccgagcgctctaacttctctaactgttttcggggaccagctccagaacctcttcaagcttcaatcaccagagttccaaccacctaacgactccaaaatgtgccgtatgctaacaaattcagacctctttggtttcagatatggtaaaattttggacagctcacaaacgttctcggaacgtacaactctaaaacaaaaaaaaaaatgaaattatacaagaaacagaaaaacccaaccaatgtgttctctaataacagtatacactttaagacccaaaacctcaaacagatcttagagttcgtttccaaagttttttccttcacactgtgtaagtacgagttttgggcggatgaagcgaattgattgctctgaaagagtcctgcaggacagacatgaaactcagatacacccagatacagatacagatacagtcacagtcacagtcacaaaacatacagtcaatataaaaccgaaccactcacactcttgggcctctttggtacttcctctggtgtttctcacttcacggcacacgttttgcatattttctaactaggttgtatacgttgaacatgcccaccatcagcaccactacgaggaccacggggacgactggagcgagccgggtagctattggaagcgctcactgcaaacggatccctcagtcgaggacacagactcctccacggacagctaccaggtgcgccagccgcagcagcagtcacagatccaggatccccattacctggcctatcgcaaccagtatggccagtggcagtagattaatccacaaatccaagccactccacctgaactctgacctccaatggagacattatttattgtatttatttgattaacattcgtggtacgacgctgattattaaataatccataaggccctagagcaaaattaattttagcacaatgaatgaaatgccagtaaaccaattttagctgtaacccttagcccccttagtgcaatgccttaaatatatgactaaattttaaaagtgtacctttaatgagaaatcgaagaactgtttcggatacatacgcagcgagcaaaacaaactagacataagttatttatgccaattatttattgtattcgtatgttatatgatgcttattaaagaaaactaaattggacgaatatctatttatttgatatagcacataattgactgccaaaaatttccaatcagaactgctgcatcatttcctgctgccattttggggtgtgatcagcagacttgggttcccccaatcagaatgcggtcaataatcgctggaattccgaaagaagtttcacctgctgattctaaattctgtggcccaattctgggctctactgctccgtaataccaaatggcgaagaagtacgcccaaaatagacgcgtctgtggggcgcattaatttttttttgggtgtcgctgtgggcaaaagcaatttgcgcatgcgcagattgtgctcggaatgccaaatgaaatgctcaaaatgtttgtaataagccattaaatttgtgtttgacaaacgtctgacaactcgagcgccaaatttatggctaataaatctgaacggaacagtctggcacaacgggaaatgtttctgaataaaagtctgcacggaaatatcgaaaactaagtgggatttggagttaatgtatgaagtccaggcagtcgaaaagaaagtcaaattacaactaatcagctctttacacgcattctgacacgtttggcttttacattttgatattgaccttgtttaaattaattgaa

SEQ ID NO: 344 - DNA, 2014 bp, DROSOPHILA
cttggtcgtgagcagatcgccgaggagccagtgcatccacataatcacctacccataacaacaaacaatattcgtgcgggttttcgattcgggttttttggaaaatagaatttgaaaatggaacaaagcgccgttgttcttgtgcgtgccgataaacgtatataaatcacgtgtgtgtgtgctactgactttggtttctccagatttccgatttcatctaacggtgctagtgaacatacaatataatataaatccacatcgaagattaggagagaggggcggccaatactaactatacaaaatggactggcagccggcagttatagcaggcctcatctgtctgctcctgccaacgcagatttctttggccaaagcctggagtttgccagcccgccatgcagatcgttcagatctggctttatcgccagcacaccagcaagttggacgacgattaaatgaggtatcaccgtatctggacctggccttgtgccccatcagagcggaaccctggacctgtgcccgccaacaatccggtcggatacttgatgcttgggatggagagctgaatatccaatggcagaaactaaaagtcgaggccgatcggcagatgaacgccacgatcgagagaagagggtacagcacatcggagttgcccgtgaaagagaagccgtcgacgatactgaagaaaattgagatcggcacgaattacatgaagaaatacctggccgagtccatggacggcttcctaggtcgcgaatacgagtatctgcagacaccgaaagcggctgaggatgatagtgaaactgatcagagtggaaatagtgccgaagatgacgatgaggcggatgcggatgatgccagcaatgcggcggaggaggaggacaatgcagaggatgaggatgcggatgccaataatgaggaggatgatgaggaggaggaagatgaccgggatgaggaggatgacgactcggacagcacggcggaacaggatcaggatcaggaccatgagccagaggctgaagctgacaacgaagacgaggatgtggatgaggcggtctcagcacccgagagtgataatgaaaaggaaaatactccaagtatcttcagtggagcgccagcagcgcaatcccaaggtgatgggaaaaatcccgccttagccgaggacaacgcttcaacaggtgtggaattcatcgagctccaggatggcgacgaaactgcggcgggtgcgctgaaaaagccgggcggcggtaaacgcaagaagaacaagaagggcggcaagcgcaagaagaacaagaagaagggtcacggatcggagacacagccctccactttggtggtggtccaggcggcaccggagcaccacgaggtggactcgggacacgaggatggatcctcggtgatcagtcacgggagctccgatgacacagtatccgtgggaaaaccgatgaggaagcggaagcacaagcgacgcatgaagggcaagcggaagcgcaagggtcaacatgggtcagccgtcgtggagcacgagcagagcgacctcagtctgggattgggcctgctcgacgaactggcggacgcggatgatgtgctctctggtgtcggcgggggaaaacgcaagcacaggaacccacttaattatggtagaagtaacggagccaaaatcgaactgctgctcaagatcctgggcgcccatctgcaggtcaagttctttgccatagccctgattggtctgctgatcaatatagcccgattctggatcgatgtgaagcgcggcagtccgccatctaaggttgtatacgttgaacatgcccaccatcagcaccactacgaggaccacggggacgactggagcgagccgggtagctattggaagcgctcactgcaaacggatccctcagtcgaggacacagactcctccacggacagctaccaggtgcgccagccgcagcagcagtcacagatccaggatccccattacctggcctatcgcaaccagtatggccagtggcagtag

SEQ ID NO: 345 - protein, 570 aa, DROSOPHILA
MDWQPAVIAGLICLLLPTQISLAKAWSLPARHADRSDLALSPAHQQVGRRLNEVSPYLDLALCPIRAEPWTCARQQSGRILDAWDGELNIQWQKLKVEADRQMNATIERRGYSTSELPVKEKPSTILKKIEIGTNYMKKYLAESMDGFLGREYEYLQTPKAAEDDSETDQSGNSAEDDDEADADDASNAAEEEDNAEDEDADANNEEDDEEEEDDRDEEDDDSDSTAEQDQDQDHEPEAEADNEDEDVDEAVSAPESDNEKENTPSIFSGAPAAQSQGDGKNPALAEDNASTGVEFIELQDGDETAAGALKKPGGGKRKKNKKGGKRKKNKKKGHGSETQPSTLVVVQAAPEHHEVDSGHEDGSSVISHGSSDDTVSVGKPMRKRKHKRRMKGKRKRKGQHGSAVVEHEQSDLSLGLGLLDELADADDVLSGVGGGKRKHRNPLNYGRSNGAKIELLLKILGAHLQVKFFAIALIGLLINIARFWIDVKRGSPPSKVVYVEHAHHQHHYEDHGDDWSEPGSYWKRSLQTDPSVEDTDSSTDSYQVRQPQQQSQIQDPHYLAYRNQYGQWQ

SEQ ID NO: 346 - DNA, 3373 bp, DROSOPHILA
gtctgcagggaaaccttcggattggcgcgcaggatgtcaaacagtgtctgtatggtctcctcggtggccttggacagctttccgtcgcgatgcgagaggagtgcggatccggatcggaacacctggctcacggagccgcccattgctctggcttctccctttacggccgtctaacactgcacagtcatgctagtatctcctgcgacgcagtttccggggaagatcgctagacggcgaagtgcgtatcacttccgaaaccgtaaaaatcaatacgagccctgaagaaccgcccagatcagcactgaacgacggctggaaggagaaaggctgctccgatggcttcagtcacagaatcccacatccctgtggcgcgttttcaggctagattcagcgcatccgggcatttcaaatttaccacaatcaaaaaaaaactttgggattaaataaagtatattatagtatagggtttcagaggccctatcggcaatcgatatcagttggttgaacttggtatcgttagtcgataggaggatatcaattttgtataaaagcgcgtttatttaaacttaaagtaaaatgcgtaaatgggcatacatttgcaccaccttattcaggagcaaaaaagcaatgaacgcgatttttttccataaaataagttataggctttgcacatacttttcgatttgtgcaatccagctgtacccaatgttaaggcttatcggctatcgattcgaattgaatgtacagtgaatactggaacttagttactataaatgtcaatattaaatataaaaaattattaataataaaatattaacaaaaaaaaatacttcttattcaaaagcgaatacttcttatgttaccaagccaaaaaaactttggttttcctaagaaattttccctaacattaccaacgtgattgaagaaaaactgtttgccttagcctctcctctctgtaacaaattggcgctcaaaagtaaacgagcgtcttggaatataacttagtttgctcctaaaaatatcgacggaatcatgaccaaccgcctggagaccaaatacgagaacctgagcagcattttccggctaaagggacatgactaccaaaagcagttcttccatctgtatgcccaccgcctggccgagatgacgcgtctcctaacgccgctggcccagaagaagtggggcaacaaggagcccatcaaaaaactgtgtgagctgcggggtgaacaggacgtgcactgcatcctgatcggcaccatttttaagcaccaggctcacaagcccagtatcctccgggacatttctgaggagaatcagttagcgccacagccgccaagacagaactactcggatccggaggacaagattgttctggaggatgaactgcagcgggttcgacttcagggcaagctaaatggacagctcttagccactggagttgtgtgcgctgccctcggtggaacagacagtgacggattttttaacgtggaggatatactcttctacgaaagtggacctcagaagccactggcccccattaaaagaagccgcctcctggtgctggcgtctgggttggaccaactgcaggcccacaaatttgtggaggcattgaatctctttcagtactggctggccggcagtcttggaaacaacaaggaagcgggctccatggtgcgtcttatcgtggctggaaactcggtgagagccagtgccatggcacatgtgcccaccctacaggtggcacgcacccaggcgaacgcaaatgacacagtccaggccgtttcccagctagaccagtggtttgcctcatgggcacgcagtctgcccgtcgacataatgccgggaccctacgacccggccaactttatgctgccccagcagccgttccacaagtgcatgtttccccaggctgctcaactggcaactttccaggcggtgactaatccgtacagctgccggctggatgaggccctggtggtaggcacatctggccagaatgtatcggatctgttgcgcagcacttcgctggactcggcgctggaggcccttcgctgcaccctcacctggggacatgttgctcccactgcaccggacactctagcgtgctacccgtacatcgaaagtgatcccttcatcctgcgcgagtgtccgcacgtttactacgccggcaactgcgagtcgtttgcgaccgagctgcacgagggttccgaaggcaagcgcacccgcctagtctgcgtgcccagttttagcaaaacacagagtgtggccgtcgttgacctggatacgctggattgccgcatggtcaactttagcgtagatgcagaataagaaacttcattaatacaaataatacaccctgttaagtcttgagaatcactggttttattcgctatcctagtgcaccacgggacccagcggctcgcccctaatgttggccaaatccaggcgggagtcgatggtctcgtctatcagtccgatcaccgcgatgttgtccccccggatgatgtgcagtcccagcacgatttgctcgatgccggaggtggtagagaagacgcgctcatggcactcgtctatgatgatattgatggtctggtcgaatcccttgagtgtcccgatgaagttccgtccgtctgccgtaatgatggagactgtgtgattgatatacgactccagaccggacattttagcagtctttccttgataacttctccaaacagaacaaaataaatactaattgtggcaagaggctagcgacgcgctctccgataacgataactgtgccgcaaatcagctgttccggctctggtgctcatgtaatcggtggtcaacattctattttccgaaaaaattaaattaaactgattaaaatgctgcgtcgcattgtccaagtgggtgcccgggagttgagccgagcccaatcgtcaaccgccagcgcggaaaagtgggacctgtacgccggagtgctcgtagagcgtctccctgtggtgtccaagtcccttaatccgctggaaaaacagttccaagacttgctatggcgcgtggagtacgaaaacagcctgaagtctgaccatgaactcaagcatgaacgtgagatcgtccaggcggagctcataaagcagggcaagatccaggtggacttggaggacgcaggatccaagcagacagctcaggacctcaaggacgcctacgtcgaggagctaaaaaagttccagttgggctcccgcaccacgcccgatgaccaggccaacagaaccacctccacggaccgctgtctggatgacacgctctaccttttggtacagcagaagctgggccagcaggagcacctcattctaccgcagggaaagcgtgaggagggagagtccatgcgtca

SEQ ID NO: 347 - DNA, 1373 bp, DROSOPHILA
cttagtttgctcctaaaaatatcgacggaatcatgaccaaccgcctggagaccaaatacgagaacctgagcagcattttccggctaaagggacatgactaccaaaagcagttcttccatctgtatgcccaccgcctggccgagatgacgcgtctcctaacgccgctggcccagaagaagtggggcaacaaggagcccatcaaaaaactgtgtgagctgcggggtgaacaggacgtgcactgcatcctgatcggcaccatttttaagcaccaggctcacaagcccagtatcctccgggacatttctgaggagaatcagttagcgccacagccgccaagacagaactactcggatccggaggacaagattgttctggaggatgaactgcagcgggttcgacttcagggcaagctaaatggacagctcttagccactggagttgtgtgcgctgccctcggtggaacagacagtgacggattttttaacgtggaggatatactcttctacgaaagtggacctcagaagccactggcccccattaaaagaagccgcctcctggtgctggcgtctgggttggaccaactgcaggcccacaaatttgtggaggcattgaatctctttcagtactggctggccggcagtcttggaaacaacaaggaagcgggctccatggtgcgtcttatcgtggctggaaactcggtgagagccagtgccatggcacatgtgcccaccctacaggtggcacgcacccaggcgaacgcaaatgacacagtccaggccgtttcccagctagaccagtggtttgcctcatgggcacgcagtctgcccgtcgacataatgccgggaccctacgacccggccaactttatgctgccccagcagccgttccacaagtgcatgtttccccaggctgctcaactggcaactttccaggcggtgactaatccgtacagctgccggctggatgaggccctggtggtaggcacatctggccagaatgtatcggatctgttgcgcagcacttcgctggactcggcgctggaggcccttcgctgcaccctcacctggggacatgttgctcccactgcaccggacactctagcgtgctacccgtacatcgaaagtgatcccttcatcctgcgcgagtgtccgcacgtttactacgccggcaactgcgagtcgtttgcgaccgagctgcacgagggttccgaaggcaagcgcacccgcctagtctgcgtgcccagttttagcaaaacacagagtgtggccgtcgttgacctggatacgctggattgccgcatggtcaactttagcgtagatgcagaataagaaacttcattaatacaaataatacaccctgttaagtcttgagaa

SEQ ID NO: 348 - protein, 431 aa, DROSOPHILA
MTNRLETKYENLSSIFRLKGHDYQKQFFHLYAHRLAEMTRLLTPLAQKKWGNKEPIKKLCELRGEQDVHCILIGTIFKHQAHKPSILRDISEENQLAPQPPRQNYSDPEDKIVLEDELQRVRLQGKLNGQLLATGVVCAALGGTDSDGFFNVEDILFYESGPQKPLAPIKRSRLLVLASGLDQLQAHKFVEALNLFQYWLAGSLGNNKEAGSMVRLIVAGNSVRASAMAHVPTLQVARTQANANDTVQAVSQLDQWFASWARSLPVDIMPGPYDPANFMLPQQPFHKCMFPQAAQLATFQAVTNPYSCRLDEALVVGTSGQNVSDLLRSTSLDSALEALRCTLTWGHVAPTAPDTLACYPYIESDPFILRECPHVYYAGNCESFATELHEGSEGKRTRLVCVPSFSKTQSVAVVDLDTLDCRMVNFSVDAE

SEQ ID NO: 349 - DNA, 3564 bp, DROSOPHILA
tggtacgcaagactactacgaacacggaatcgcctggcaagcaaacaaaaatatcctatgcaaacacaggccttcaagaaagtcaaggacacttgcccacccaaaactttggcatatgtaaggcaagcactttgctttttttttattcgtacttaaatatcttggaaacacaaacaagcaaagagagggagagtgtgctctcccgctttctctcatctgaagttgccgcaccaccaccaccacccgatgacgtacacacacacagcgttctctactcctgcgtaaccgcacacacacatgcacaacaggagcaccagatactttttcttaagttgcaattggagtcaagaattttgaaagaaattcaaaatttctattactaatcaagcagtgacattgcacagcatagcttttcagttatggccaagacttttctctcactttagccccgttaattggatttttgtgttgccttcgagggtgtggcgttgacccgaaaaattttcactttgcacgcacaccgaatttcaattgcattttgaacccaactaacagtgagctacggacgaaaactatgtagaaacttacactttgatggcaatctatttgttcacagttactttgttaatttaactattgatttgcagtagttattcgtaattttcacggagcgcctctatttcacgggaccgcagtttttttcaatatgtcggccgattggcgcagaacattgacatcaatatcgcgatttctatcgatgtcaatcgattataaacatagttctctttctggtcgctttggcgccttagtcatctcattatttttctagtagatgtagatgagtagtagtagatgatgtaaataaattaaaaacgacagggtatttcaattcaatctggtgcactcatgcatgactactatttcctagcgcggccccagagtaagcggggcttattatggtattattccgcaatagccctgcggtcacactaatttccagagcaatccaaaaaaaggaagcagccgaaaaagaacaaaaacctgcagcatttacattcaaatataaatccgaagcaaagaaacagcaaaatggtggactacagcaagtggaagaacatcgaggtgagcccactgctgggtgccaacccaaaaagtcctcctaatcggcacactaccttttagatttcggatgatgaggacgacactcacccaaacatagacacgccttctctgttccgctggcggcaccaggcgcgcgtggagcgcatggcggagatggaccacgagaaggacgagcttaagaaaaagcgccagagctaccaggcgcgcctcatggacgtcaaggagcggatctcaaagaaggatggcgacgaggaggccctgaaggtgggtcattgcaccgaatgcactgcgcacttgttgcttaggctaatgcctggtctgggagttccctatgttctcaatccatctaatttattcttattgtcaagcttatgattgactatcatcctaagtggccatccatctttcatcgcaatgcttaatccctaatttgtatcgcctacagaaagagctcgaaaagatcgaggccgagggcaaagagctggaccgcatcgagagcgagatgattaagaaggaaaagaaaacaccctggaacgtggacaccatcagcaagcccggctttgagaagaccgtaatcaacaagaaggccggccgcaagccggatgagaatctgtccgaggaagagcgagagcagcgcatgaagcaattcgtcaaggagaacgagaagctctgccagcagtatggcatgctgcgcaagtacgacgattcgaagcggtttctgcaggagcatcttcacttggtgggcgaggagacggccaactacctagtcatttggtccatcaacctggaaatggaggagaagcacgagctgatggcccacgtggcgcatcagtgcatttgcatgcagtacattctagagttggccaaacagctggacgtggatcctcgcgcctgtgtcagctccttcttctcaaagatccagcactgtcatcccgagtaccgcgcgcagttcgacagcgagatcgaaggtttcaaaggacgtatccagaagcgtgcgcaggagaagatccaggaggcgatagcccaggccgaagaggaggagcgcaaggagcgcctcggacctggtggtctggacccagccgatgtctttgaatccctgcccgatgtacgttctagtgattcactgtatgggaattacttgactaacttttcatgtatttgctccgcaggaactaaaggcctgtttcgagtcccgcgacgtagagctgctgcagaagaccattgcggccatgcccgtggacgtcgccaagctgcacatgaagcgttgtgtggactctggtctctgggtgcccaatgccgctgacttggagggtgacaagaaggaggaagatgactcggatgacgtcgccggtggcgaggagaagaccgacgatgccaaatcagagagtgcagccaaggaggagcccatctacactggcgtcagcaccgaggacgttgactgatcgccgccacgtttccatctacaccatagctctaatcttaatgtatttgtccacaagcatatttcatccatagccagatcctgcgtcagttgagttattgtatataatttgaataaattctcagtcacacgtcaaacattctgtgaacacttctgccagttgttatacgcttcgactccgaatagaaacaatgaaccggccggagctggactactacgcggtgctggatcagcccagaggcgccaccaaggagcagattactctggcctaccgccgcctggccattcggctttgcccacatcgcgacaagaaggacgagcaggactttgtgccgctggcccaggagggtcgtctcacgcacctctcacccatgggcgagcccaggcagtgggcctacgtcaacatggccttcgatgtgctgggcaacgatctgtaccgggccatatacgatcgctttggcgaggcgggtttgttcgagggcgtcatgctgccgaacggatactttccgccctatcagtacgacggcgaccacatgaaggtctacgagcgggtcttcggtagctactcgccgtatgccaacgtgatcgatgcgatctccaatccaccgagcttgtacgctacgcgccagcatggcattggcgtgcgttccaaggacgccagtacggagaggatcatcgagctgtcgctggaggaagtacgcactggctgcgtcaagctgatgaacgtgtggcgccaggagatcgtggacgccaaggagtcgcggctggagaagcgcaagcacaccttaaagctgaacattgccccgggaactacggccggaactcgcttctgcttcaaggaggagggcgatcgctatccggccaccattccgggtgatattattttcattgccgccgacaagccgcatccggactttgagaggagaaaccaacacgacctggtctacaggcagtctattggcctgtgccaggccttcaccggcttcacgttcttcatttgc

SEQ ID NO: 350 - DNA, 1259 bp, DROSOPHILA
agcaatccaaaaaaaggaagcagccgaaaaagaacaaaaacctgcagcatttacattcaaatataaatccgaagcaaagaaacagcaaaatggtggactacagcaagtggaagaacatcgagatttcggatgatgaggacgacactcacccaaacatagacacgccttctctgttccgctggcggcaccaggcgcgcgtggagcgcatggcggagatggaccacgagaaggacgagcttaagaaaaagcgccagagctaccaggcgcgcctcatggacgtcaaggagcggatctcaaagaaggatggcgacgaggaggccctgaagaaagagctcgaaaagatcgaggccgagggcaaagagctggaccgcatcgagagcgagatgattaagaaggaaaagaaaacaccctggaacgtggacaccatcagcaagcccggctttgagaagaccgtaatcaacaagaaggccggccgcaagccggatgagaatctgtccgaggaagagcgagagcagcgcatgaagcaattcgtcaaggagaacgagaagctctgccagcagtatggcatgctgcgcaagtacgacgattcgaagcggtttctgcaggagcatcttcacttggtgggcgaggagacggccaactacctagtcatttggtccatcaacctggaaatggaggagaagcacgagctgatggcccacgtggcgcatcagtgcatttgcatgcagtacattctagagttggccaaacagctggacgtggatcctcgcgcctgtgtcagctccttcttctcaaagatccagcactgtcatcccgagtaccgcgcgcagttcgacagcgagatcgaaggtttcaaaggacgtatccagaagcgtgcgcaggagaagatccaggaggcgatagcccaggccgaagaggaggagcgcaaggagcgcctcggacctggtggtctggacccagccgatgtctttgaatccctgcccgatgaactaaaggcctgtttcgagtcccgcgacgtagagctgctgcagaagaccattgcggccatgcccgtggacgtcgccaagctgcacatgaagcgttgtgtggactctggtctctgggtgcccaatgccgctgacttggagggtgacaagaaggaggaagatgactcggatgacgtcgccggtggcgaggagaagaccgacgatgccaaatcagagagtgcagccaaggaggagcccatctacactggcgtcagcaccgaggacgttgactga

SEQ ID NO: 351 - protein, 389 aa, DROSOPHILA
MVDYSKWKNIEISDDEDDTHPNIDTPSLFRWRHQARVERMAEMDHEKDELKKKRQSYQARLMDVKERISKKDGDEEALKKELEKIEAEGKELDRIESEMIKKEKKTPWNVDTISKPGFEKTVINKKAGRKPDENLSEEEREQRMKQFVKENEKLCQQYGMLRKYDDSKRFLQEHLHLVGEETANYLVIWSINLEMEEKHELMAHVAHQCICMQYILELAKQLDVDPRACVSSFFSKIQHCHPEYRAQFDSEIEGFKGRIQKRAQEKIQEAIAQAEEEERKERLGPGGLDPADVFESLPDELKACFESRDVELLQKTIAAMPVDVAKLHMKRCVDSGLWVPNAADLEGDKKEEDDSDDVAGGEEKTDDAKSESAAKEEPIYTGVSTEDVD

SEQ ID NO: 352 - DNA, 3246 bp, DROSOPHILA
agcgcatgaagcaattcgtcaaggagaacgagaagctctgccagcagtatggcatgctgcgcaagtacgacgattcgaagcggtttctgcaggagcatcttcacttggtgggcgaggagacggccaactacctagtcatttggtccatcaacctggaaatggaggagaagcacgagctgatggcccacgtggcgcatcagtgcatttgcatgcagtacattctagagttggccaaacagctggacgtggatcctcgcgcctgtgtcagctccttcttctcaaagatccagcactgtcatcccgagtaccgcgcgcagttcgacagcgagatcgaaggtttcaaaggacgtatccagaagcgtgcgcaggagaagatccaggaggcgatagcccaggccgaagaggaggagcgcaaggagcgcctcggacctggtggtctggacccagccgatgtctttgaatccctgcccgatgtacgttctagtgattcactgtatgggaattacttgactaacttttcatgtatttgctccgcaggaactaaaggcctgtttcgagtcccgcgacgtagagctgctgcagaagaccattgcggccatgcccgtggacgtcgccaagctgcacatgaagcgttgtgtggactctggtctctgggtgcccaatgccgctgacttggagggtgacaagaaggaggaagatgactcggatgacgtcgccggtggcgaggagaagaccgacgatgccaaatcagagagtgcagccaaggaggagcccatctacactggcgtcagcaccgaggacgttgactgatcgccgccacgtttccatctacaccatagctctaatcttaatgtatttgtccacaagcatatttcatccatagccagatcctgcgtcagttgagttattgtatataatttgaataaattctcagtcacacgtcaaacattctgtgaacacttctgccagttgttatacgcttcgactccgaatagaaacaatgaaccggccggagctggactactacgcggtgctggatcagcccagaggcgccaccaaggagcagattactctggcctaccgccgcctggccattcggctttgcccacatcgcgacaagaaggacgagcaggactttgtgccgctggcccaggagggtcgtctcacgcacctctcacccatgggcgagcccaggcagtgggcctacgtcaacatggccttcgatgtgctgggcaacgatctgtaccgggccatatacgatcgctttggcgaggcgggtttgttcgagggcgtcatgctgccgaacggatactttccgccctatcagtacgacggcgaccacatgaaggtctacgagcgggtcttcggtagctactcgccgtatgccaacgtgatcgatgcgatctccaatccaccgagcttgtacgctacgcgccagcatggcattggcgtgcgttccaaggacgccagtacggagaggatcatcgagctgtcgctggaggaagtacgcactggctgcgtcaagctgatgaacgtgtggcgccaggagatcgtggacgccaaggagtcgcggctggagaagcgcaagcacaccttaaagctgaacattgccccgggaactacggccggaactcgcttctgcttcaaggaggagggcgatcgctatccggccaccattccgggtgatattattttcattgccgccgacaagccgcatccggactttgagaggagaaaccaacacgacctggtctacaggcagtctattggcctgtgccaggccttcaccggcttcacgttcttcatttgcacgctggaccggcgccagttgaaggtggtcattacggacgtagtgcagccgggatacaccaaagtggttcccctcgagggactccccaagtgccgcaatttggatgcagttacggccatcaaggaggccaacaagaaggtggagcagttcggggatctcattatagaatttgattgtgggttttccttttctgttggaggtttcaatagtttctgatagtttctctgtttcttctgcagatatctttcccaagtacttgactccacatatgaagcatatcactcgcgaattcttccgcgaattccgcaagctcgaaatagaattggaggaggaggaggaacgtaacatggtttgatggcagacaccttattgtttttccgtatttggaacacagatatttgtgcgtacagagaaattaaattcaaaatttgcgtttaaaaggatagatgttgttgggttatttcgtatagccatattacatacgagcacatgcagactatattcaaaaatcttagatttaattaaattagcagatgtaacggtcgaatttgaattgattttgaaaaggtggcaactgttccgattatgtcgattgcttatcgatgcacaacgcagccgctcggcaaccctgtccatcagctgtttgtgaaaagaaaatgcatttggcattccatttcagagataattaaaaatcaattacagcagcagcagcagagcaagtggccaccgaaaagagtgcataggagagggtaaacaactcgctgcatccaaacggcacagtaactgatccgaagctgtcccacttagagcccaaatcgaattacccgttttgcagtttaggacaaagtgtgccaacgccacaacgcccccacccagaagtccatagaaacgccagcggaagtgggatagagacggggaccacgctccactgaccgcaccgcgcaccgctcgctgaccacgcccactgacgcaagatgcacctcagcgcggatatttccagcgcccttcagcagatcgaggcagtgaagaagggcatcgatgagtccgacgaccccaagctgcaaatgcagacggccgagagccttagcaccattctgggcattctgcaggatcccgttttccgcaccatcgtccacgtgcaggactcgttgtccgagctgaacgcccagctggctcagcatccgtccatgttgcccaacgacttcgacatcgatgtggccggcaaccttgtactcagtctgaatggtggcgaggtgatgtacgactttgacgaacagcgctcttcctcgcactcccattcggctccgggcagtccagataagtccggaggcgtcggcgaggagccgcgcccgcagagccagaactccaaaggagccggagtggcggatctctacgccacggactacgctcagatccaggccatagagctggtcaac

SEQ ID NO: 353 - DNA, 1182 bp, DROSOPHILA
atgaaccggccggagctggactactacgcggtgctggatcagcccagaggcgccaccaaggagcagattactctggcctaccgccgcctggccattcggctttgcccacatcgcgacaagaaggacgagcaggactttgtgccgctggcccaggagggtcgtctcacgcacctctcacccatgggcgagcccaggcagtgggcctacgtcaacatggccttcgatgtgctgggcaacgatctgtaccgggccatatacgatcgctttggcgaggcgggtttgttcgagggcgtcatgctgccgaacggatactttccgccctatcagtacgacggcgaccacatgaaggtctacgagcgggtcttcggtagctactcgccgtatgccaacgtgatcgatgcgatctccaatccaccgagcttgtacgctacgcgccagcatggcattggcgtgcgttccaaggacgccagtacggagaggatcatcgagctgtcgctggaggaagtacgcactggctgcgtcaagctgatgaacgtgtggcgccaggagatcgtggacgccaaggagtcgcggctggagaagcgcaagcacaccttaaagctgaacattgccccgggaactacggccggaactcgcttctgcttcaaggaggagggcgatcgctatccggccaccattccgggtgatattattttcattgccgccgacaagccgcatccggactttgagaggagaaaccaacacgacctggtctacaggcagtctattggcctgtgccaggccttcaccggcttcacgttcttcatttgcacgctggaccggcgccagttgaaggtggtcattacggacgtagtgcagccgggatacaccaaagtggttcccctcgagggactccccaagtgccgcaatttggatgcagttacggccatcaaggaggccaacaagaaggtggagcagttcggggatctcattatagaatttgattatatctttcccaagtacttgactccacatatgaagcatatcactcgcgaattcttccgcgaattccgcaagctcgaaatagaattggaggaggaggaggaacgtaacatggtttgatggcagacaccttattgtttttccgtatttggaacacagatatttgtgcgtacagagaaattaaattcaaaatttgcgttt

SEQ ID NO: 354 - protein, 366 aa, DROSOPHILA
MNRPELDYYAVLDQPRGATKEQITLAYRRLAIRLCPHRDKKDEQDFVPLAQEGRLTHLSPMGEPRQWAYVNMAFDVLGNDLYRAIYDRFGEAGLFEGVMLPNGYFPPYQYDGDHMKVYERVFGSYSPYANVIDAISNPPSLYATRQHGIGVRSKDASTERIIELSLEEVRTGCVKLMNVWRQEIVDAKESRLEKRKHTLKLNIAPGTTAGTRFCFKEEGDRYPATIPGDIIFIAADKPHPDFERRNQHDLVYRQSIGLCQAFTGFTFFICTLDRRQLKVVITDVVQPGYTKVVPLEGLPKCRNLDAVTAIKEANKKVEQFGDLIIEFDYIFPKYLTPHMKHITREFFREFRKLEIELEEEEERNMV

SEQ ID NO: 355 - DNA, 5357 bp, DROSOPHILA
acgccagtacggagaggatcatcgagctgtcgctggaggaagtacgcactggctgcgtcaagctgatgaacgtgtggcgccaggagatcgtggacgccaaggagtcgcggctggagaagcgcaagcacaccttaaagctgaacattgccccgggaactacggccggaactcgcttctgcttcaaggaggagggcgatcgctatccggccaccattccgggtgatattattttcattgccgccgacaagccgcatccggactttgagaggagaaaccaacacgacctggtctacaggcagtctattggcctgtgccaggccttcaccggcttcacgttcttcatttgcacgctggaccggcgccagttgaaggtggtcattacggacgtagtgcagccgggatacaccaaagtggttcccctcgagggactccccaagtgccgcaatttggatgcagttacggccatcaaggaggccaacaagaaggtggagcagttcggggatctcattatagaatttgattgtgggttttccttttctgttggaggtttcaatagtttctgatagtttctctgtttcttctgcagatatctttcccaagtacttgactccacatatgaagcatatcactcgcgaattcttccgcgaattccgcaagctcgaaatagaattggaggaggaggaggaacgtaacatggtttgatggcagacaccttattgtttttccgtatttggaacacagatatttgtgcgtacagagaaattaaattcaaaatttgcgtttaaaaggatagatgttgttgggttatttcgtatagccatattacatacgagcacatgcagactatattcaaaaatcttagatttaattaaattagcagatgtaacggtcgaatttgaattgattttgaaaaggtggcaactgttccgattatgtcgattgcttatcgatgcacaacgcagccgctcggcaaccctgtccatcagctgtttgtgaaaagaaaatgcatttggcattccatttcagagataattaaaaatcaattacagcagcagcagcagagcaagtggccaccgaaaagagtgcataggagagggtaaacaactcgctgcatccaaacggcacagtaactgatccgaagctgtcccacttagagcccaaatcgaattacccgttttgcagtttaggacaaagtgtgccaacgccacaacgcccccacccagaagtccatagaaacgccagcggaagtgggatagagacggggaccacgctccactgaccgcaccgcgcaccgctcgctgaccacgcccactgacgcaagatgcacctcagcgcggatatttccagcgcccttcagcagatcgaggcagtgaagaagggcatcgatgagtccgacgaccccaagctgcaaatgcagacggccgagagccttagcaccattctgggcattctgcaggatcccgttttccgcaccatcgtccacgtgcaggactcgttgtccgagctgaacgcccagctggctcagcatccgtccatgttgcccaacgacttcgacatcgatgtggccggcaaccttgtactcagtctgaatggtggcgaggtgatgtacgactttgacgaacagcgctcttcctcgcactcccattcggctccgggcagtccagataagtccggaggcgtcggcgaggagccgcgcccgcagagccagaactccaaaggagccggagtggcggatctctacgccacggactacgctcagatccaggccatagagctggtcaacgacggcacgggtctcggattcggtattattggagctcgcaactcgggagtgattgtaaaaaccatcctgccgggtggcgtggccgataaggacggacgcttgcgctcgggcgaccacatcctccagattggagacgtcaacctgcacgaaatggtatccgaacaggtggctgccgtgctgagacagtctggaacccacgtccgcctagtggttgcccgtcccgttgagcagagcgtgcctacgccccagtacgccctggaaccgggcactgctgtggtgcccacgcgcgtcctcgtcgatcctgccgagctggagcggtacctcatatctaccggctatccggaaatctttggcgagagctccacggcctccactccgcagaccaccacggaagacgatcgtttcgtttatcgcggcgagacatcaatgcttattgatccaaacatcgacctagaggaattgcttgcccttcctgaaacggagaagcttcaggtggagctgaagaaggatgccaacggcctgggcatcacaattgccggctatgtgtgtgagaaagaagagctgtctggcattttcgtaaagagcgtgtcgcccggttcagcagcggacctgagtggtcgcatccgggtcaacgatcgcatcattgaagttgacggccagtcgctacaaggctactccaaccaccaggccgtagagctgcttaagaagtctggtcaggtggtgaacctgcgcttggaacgctacctgaggggccccaaattcgagcagctgcagcaggctatcgctgcgaatgacaagcttccatccagtgcacctggaacgccttcaagggctcccatgcccacgcccgtggccacaacgtcctccgccacaactacaccatcacgcagcatcactcgcgagttggaagaggaagccttaccagcgccagaagcattcatgaccactccgccgtcggtcaccacaatgaccaccaccacattaagctcctttggagcgggtaagcaactagtagcagtaagggactccctagacggctccacgaagatcatacccacggaagttgtacccttggcggataaaacggaggtgagtattagctaacgggtaacacagcagcaaaacgtatagcgcattaacatgttttaggccaagaacagcggggtgatcacccgtcacaagtactacaccgatccggaactgtccgacgacgccgaaaccgaaattattcgcaaatggcagaagattgtgggctccgatgtggaggtgattgtggcccagatcaagaagttcgcggtcggaggcttggggatttccttggagggaaccgtggacgtagaaggagggcgcgaggtacgaccccatcactatattcgttcaatcttacctgatggacccgttggcgtgaatggagtactccgctctggcgatgaattgctggaggtaaacggcgagcggttgctgggtatgaaccacctggaggtggtggctatacttaaggaactgccgttggatgtgcgcatggtttgcggtcgcaacaggaacagctcgcttctcccattctctgatgacaccctgaaaaagctaagcaacaactttgagaacctgctgcctgctaccgatcgtctggtgaaggccaaatcagatggtagtctggccaccgcgggctccgtggccgatggagattcagtggctgccgccgctgcttcgtttagtaagctgaagtcgcgctccctggagccactaaccggattggctatgtggtcgtcccaaccgcaaattatcgagctggtcaagggcgatcgcggtctgggcttctctattctggattatcaagatccgttggatcccaacgatacgctgattgtaatccgttctctggtccctggaggggtggctcaattggacggacgccttatacccggagatcgacttttgtttgtgaactccattaacctggagaacgcctcgctggatcaggcagtgcaggctttgaagggtgcttcgaaaggagtggtgcgcattggtgtggccaaaccactgcccatgacggacaactcactgaaggcttgcagcaatgcgagcaccaccagcgaagagaccttggacgcccagccatcgcctccagccttgcccacagttgctccgcccgccatgccgcctagtgcctccatgggagctgagcccgacctgattcccgactggcggaactagggtgttacgataacgaagaatttcacacattccaggcatttgaatctttaagcctgttttaaatcaaatcaaacgcggttgctaactaatggattagttaatcgatattttctacgaatatgaacaacaggcagtagaatctgaaacgatgtcagaaacgatgccagaagtacaggagcgattgttattaccgaagcaaaatgttatgcatattattaacgccgaattgtgtttgtcccctgaaaacaagcattccacaagtatgcaatatattaaaccccctagtattagcaaatgaattttaacatggtatttccagagtgtatgtacttaaactaaattaaataatgtaccttccgtacggtcaatgagtatcacttggggaagggaatcgatgatttggcggagggctattggacccggtttagctgtcgctcgattctcatgtagttgcgcctggacaggactcgatcgcgggcataactgaccaggtagctaagtaatccgattacaaagcacgagacctcaaatttcaagaagttcatttgctcgatgagcgccacccggtcgcagctcctggttacgatctcgccgctctggcagcgcagcacctccttgtagtgcgtgtgaatgcagacgcccaagctccggctgactatatcgaattcggagcacgggtggcactcctgcaccatcgtgtacttctcattccgccagcaggtcgagttgtcctcgatcacgaattgcggctctcggcgacgaggaccatctgccgcgtaacgagattccacgaacaggacgagtatggtgaccatcgttagggctcctagtccaaggagcatgtggtgacgctgacagttctcgagcattgtgaaggcgggcagctaactcttgtatcggatcaagtgctggaaacaacctggaagaacctatgcatgctcagtaggtggataactccaatacatatggacgggattactcgaaatcctattgctttgcttttccccctatgaaatcagctttactgtgtgaccaggcgagagtttttatttttgttcagccgtctttggaactagttcttgcttggcatttaagattatatattaaaaaaaaattgaatttgcacatgcatagatttcgtaatttagataaagcgttaaattaagggagaaaataatatttttcgaggaaatcttataagccgcgtattccgctccgattcgcggaactgcagatgtgtggccagacttcggggagctcgaaactagttcgctgtttacgaacgacaataaacggagaccaaaacaattacggaggacaagcacaaagcggacttgagaaatttgtgaaaatttttata

SEQ ID NO: 356 - DNA, 3239 bp, DROSOPHILA
aaaatgcatttggcattccatttcagagataattaaaaatcaattacagcagcagcagcagagcaagtggccaccgaaaagagtgcataggagaggagcccaaatcgaattacccgttttgcagtttaggacaaagtgtgccaacgccacaacgcccccacccagaagtccatagaaacgccagcggaagtgggatagagacggggaccacgctccactgaccgcaccgcgcaccgctcgctgaccacgcccactgacgcaagatgcacctcagcgcggatatttccagcgcccttcagcagatcgaggcagtgaagaagggcatcgatgagtccgacgaccccaagctgcaaatgcagacggccgagagccttagcaccattctgggcattctgcaggatcccgttttccgcaccatcgtccacgtgcaggactcgttgtccgagctgaacgcccagctggctcagcatccgtccatgttgcccaacgacttcgacatcgatgtggccggcaaccttgtactcagtctgaatggtggcgaggtgatgtacgactttgacgaacagcgctcttcctcgcactcccattcggctccgggcagtccagataagtccggaggcgtcggcgaggagccgcgcccgcagagccagaactccaaaggagccggagtggcggatctctacgccacggactacgctcagatccaggccatagagctggtcaacgacggcacgggtctcggattcggtattattggagctcgcaactcgggagtgattgtaaaaaccatcctgccgggtggcgtggccgataaggacggacgcttgcgctcgggcgaccacatcctccagattggagacgtcaacctgcacgaaatggtatccgaacaggtggctgccgtgctgagacagtctggaacccacgtccgcctagtggttgcccgtcccgttgagcagagcgtgcctacgccccagtacgccctggaaccgggcactgctgtggtgcccacgcgcgtcctcgtcgatcctgccgagctggagcggtacctcatatctaccggctatccggaaatctttggcgagagctccacggcctccactccgcagaccaccacggaagacgatcgtttcgtttatcgcggcgagacatcaatgcttattgatccaaacatcgacctagaggaattgcttgcccttcctgaaacggagaagcttcaggtggagctgaagaaggatgccaacggcctgggcatcacaattgccggctatgtgtgtgagaaagaagagctgtctggcattttcgtaaagagcgtgtcgcccggttcagcagcggacctgagtggtcgcatccgggtcaacgatcgcatcattgaagttgacggccagtcgctacaaggctactccaaccaccaggccgtagagctgcttaagaagtctggtcaggtggtgaacctgcgcttggaacgctacctgaggggccccaaattcgagcagctgcagcaggctatcgctgcgaatgacaagcttccatccagtgcacctggaacgccttcaagggctcccatgcccacgcccgtggccacaacgtcctccgccacaactacaccatcacgcagcatcactcgcgagttggaagaggaagccttaccagcgccagaagcattcatgaccactccgccgtcggtcaccacaatgaccaccaccacattaagctcctttggagcgggtaagcaactagtagcagtaagggactccctagacggctccacgaagatcatacccacggaagttgtacccttggcggataaaacggaggccaagaacagcggggtgatcacccgtcacaagtactacaccgatccggaactgtccgacgacgccgaaaccgaaattattcgcaaatggcagaagattgtgggctccgatgtggaggtgattgtggcccagatcaagaagttcgcggtcggaggcttggggatttccttggagggaaccgtggacgtagaaggagggcgcgaggtacgaccccatcactatattcgttcaatcttacctgatggacccgttggcgtgaatggagtactccgctctggcgatgaattgctggaggtaaacggcgagcggttgctgggtatgaaccacctggaggtggtggctatacttaaggaactgccgttggatgtgcgcatggtttgcggtcgcaacaggaacagctcgcttctcccattctctgatgacaccctgaaaaagctaagcaacaactttgagaacctgctgcctgctaccgatcgtctggtgaaggccaaatcagatggtagtctggccaccgcgggctccgtggccgatggagattcagtggctgccgccgctgcttcgtttagtaagctgaagtcgcgctccctggagccactaaccggattggctatgtggtcgtcccaaccgcaaattatcgagctggtcaagggcgatcgcggtctgggcttctctattctggattatcaagatccgttggatcccaacgatacgctgattgtaatccgttctctggtccctggaggggtggctcaattggacggacgccttatacccggagatcgacttttgtttgtgaactccattaacctggagaacgcctcgctggatcaggcagtgcaggctttgaagggtgcttcgaaaggagtggtgcgcattggtgtggccaaaccactgcccatgacggacaactcactgaaggcttgcagcaatgcgagcaccaccagcgaagagaccttggacgcccagccatcgcctccagccttgcccacagttgctccgcccgccatgccgcctagtgcctccatgggagctgagcccgacctgattcccgactggcggaactagggtgttacgataacgaagaatttcacacattccaggcatttgaatctttaagcctgttttaaatcaaatcaaacgcggttgctaactaatggattagttaatcgatattttctacgaatatgaacaacaggcagtagaatctgaaacgatgtcagaaacgatgccagaagtacaggagcgattgttattaccgaagcaaaatgttatgcatattattaacgccgaattgtgtttgtcccctgaaaacaagcattccacaagtatgcaatatattaaaccccctagtattagcaaatgaattttaacatggtatttccagagtgtatgtacttaaactaaattaaataatgtaccttccgt

SEQ ID NO: 357 - protein, 871 aa, DROSOPHILA
MHLSADISSALQQIEAVKKGIDESDDPKLQMQTAESLSTILGILQDPVFRTIVHVQDSLSELNAQLAQHPSMLPNDFDIDVAGNLVLSLNGGEVMYDFDEQRSSSHSHSAPGSPDKSGGVGEEPRPQSQNSKGAGVADLYATDYAQIQAIELVNDGTGLGFGIIGARNSGVIVKTILPGGVADKDGRLRSGDHILQIGDVNLHEMVSEQVAAVLRQSGTHVRLVVARPVEQSVPTPQYALEPGTAVVPTRVLVDPAELERYLISTGYPEIFGESSTASTPQTTTEDDRFVYRGETSMLIDPNIDLEELLALPETEKLQVELKKDANGLGITIAGYVCEKEELSGIFVKSVSPGSAADLSGRIRVNDRIIEVDGQSLQGYSNHQAVELLKKSGQVVNLRLERYLRGPKFEQLQQAIAANDKLPSSAPGTPSRAPMPTPVATTSSATTTPSRSITRELEEEALPAPEAFMTTPPSVTTMTTTTLSSFGAGKQLVAVRDSLDGSTKIIPTEVVPLADKTEAKNSGVITRHKYYTDPELSDDAETEIIRKWQKIVGSDVEVIVAQIKKFAVGGLGISLEGTVDVEGGREVRPHHYIRSILPDGPVGVNGVLRSGDELLEVNGERLLGMNHLEVVAILKELPLDVRMVCGRNRNSSLLPFSDDTLKKLSNNFENLLPATDRLVKAKSDGSLATAGSVADGDSVAAAAASFSKLKSRSLEPLTGLAMWSSQPQIIELVKGDRGLGFSILDYQDPLDPNDTLIVIRSLVPGGVAQLDGRLIPGDRLLFVNSINLENASLDQAVQALKGASKGVVRIGVAKPLPMTDNSLKACSNASTTSEETLDAQPSPPALPTVAPPAMPPSASMGAEPDLIPDWRN

SEQ ID NO: 358 - DNA, 3703 bp, DROSOPHILA
catggtatttccagagtgtatgtacttaaactaaattaaataatgtaccttccgtacggtcaatgagtatcacttggggaagggaatcgatgatttggcggagggctattggacccggtttagctgtcgctcgattctcatgtagttgcgcctggacaggactcgatcgcgggcataactgaccaggtagctaagtaatccgattacaaagcacgagacctcaaatttcaagaagttcatttgctcgatgagcgccacccggtcgcagctcctggttacgatctcgccgctctggcagcgcagcacctccttgtagtgcgtgtgaatgcagacgcccaagctccggctgactatatcgaattcggagcacgggtggcactcctgcaccatcgtgtacttctcattccgccagcaggtcgagttgtcctcgatcacgaattgcggctctcggcgacgaggaccatctgccgcgtaacgagattccacgaacaggacgagtatggtgaccatcgttagggctcctagtccaaggagcatgtggtgacgctgacagttctcgagcattgtgaaggcgggcagctaactcttgtatcggatcaagtgctggaaacaacctggaagaacctatgcatgctcagtaggtggataactccaatacatatggacgggattactcgaaatcctattgctttgcttttccccctatgaaatcagctttactgtgtgaccaggcgagagtttttatttttgttcagccgtctttggaactagttcttgcttggcatttaagattatatattaaaaaaaaattgaatttgcacatgcatagatttcgtaatttagataaagcgttaaattaagggagaaaataatatttttcgaggaaatcttataagccgcgtattccgctccgattcgcggaactgcagatgtgtggccagacttcggggagctcgaaactagttcgctgtttacgaacgacaataaacggagaccaaaacaattacggaggacaagcacaaagcggacttgagaaatttgtgaaaatttttataaatcgcgtgtgtgggcgctttgaaaatggtgctgcgatcgggaatcataattccgtttcagtttcgcgacacgaagaagctgctgatgatcggggtgccgcaggagaaccgcgacctaaacatatgggacctaaagaacgtgggtaagcactggtctggtcggagagggggaggtggctcaaatcacggagcccccaagcgatttggtcgccaaaaatgaaatatgtctaacaaatcccgctccacagtgcgcgccgccttcgggatctacaacttcgagttccggaacaagaagatcggcttcaacatcccggacgaactgctgctgcactatctggcccagaggcacgacctcaccaacttcgttatagagatcagtcaaggtaaatagcgtttaagttacggctaagtcgcgtttcaattagcgtttaagcgttcgagtgactgcgggccaccaaaagtcgcgatttcgcggagttccggagtttcacagtcaagtcttgtttgtagatcagttgtgtttatgtagacgatgcgtgcgcttcgcttgtaagtctctgcgattgccatctgtaataaaacccaaattgtaaaatgctccctcttgcagctctggacgatggccacgccaaggagatgctctcctacgagccctcatgctcgatggcggtcctgaagcaccaccctcatcagcaccagcaccacgtgcctctgccgcagcggtcaaacgaaagcgcctcgcaccacgcccatgaatatgtgcctgactcccagcccacctctccggccctacgtatgagttctgaggcggtggactcgccactggaccagcagggcaacaactcggtgccggaacgcacggatagttcccacaaactgcgcctggggcaggcttactcggaacggacgccggaatcgatgacccaggccattgaccccatggatattatacccaagtcggagtccgaatcggaggtggaacgtctgcagcgggcctccagattcctagcgcgccaggaacagcaccaagcccagcagcaacagcaccagcagcagttgctgcccggtcagcagatcttccccagctacacgcatcctttgccgtcgatgaatgcaccaaatacctcccaacagtcgccttacacaccgggtctgatgagtcgctttagaagtgagagaagtgcttgcaaaagtctgaaatccgaactaaatccttaataattctcttaaagaacgcggcgaacgcatgtccaaggaccaaaaggagctgtacgttaagtttttcgaggacaatccatgcatgctatcaaaccaccgccggcacgatggcctcactgaaccattgtgggcaaaattggcccacatgctgaatagtgttccccaaggcgccgtaaagaacgtagaggactggaagcagacctttgacgcctggcggtaccgcatcttcatgtacacacgctacaactccaagctcagcatgtcggaaacgaccgatccgaagaacttcaagcccctgacagctaccgaccagaaggcgtatgccatgtggaccagccacaagcacataacgccgcaggactacgaaaaaatggacatgttcgtgccgctggacgagaccaccacggcaacgaacacctacgactactaaatcgagatcaaagtgcaaaatataaaactgttaatgtgtactttaactattgctaagaaatagaatactttttaagagaaagaaaccgcgttttttatgttagataagataagacatgaaatatgcaatttcaaattatactatctactaactacaatccataattatttattgcagtctacgatgtcggcctggacaactatgtgctgaatcgccagtgccgctgtacagaccagaaaatgctcaacgattcgccaacgcccgaggaaccaaccaatttgtgccagcccagcaatgtgctagaggccgcgccgactccgctcatgtcgctgccaccctgcgaggacgaggatcacgagcctgagcatgagcacgagcacgaggagagcatgaagtatcggatcgataaggagagcagtggagctgcctccgcagagctgggcttgcccgcctacgaggcctgctcgcccaagatggactacgacacgcaggacgagctgccggactcgccgcactcgcagccgctgccaccaccgcctttcccattgtccacggccttgccgctgccgcctccgcccacctcgcatcaccaacatctgcaacagcagcagcagcagcagcatgaggtgtgtttgaccatgtccggcatgtgtaacgcttttgtgttatatacttttggacctgccttattatttcaggagcgcatccagcaagagtacatcatccagcagcagcagcaacatcagcagattcagcagcaacaacaccacctggctctcctgcagcagcagcagcagcaggagcaacagcagcagattcagcagcaccagggagtcaacatagccataggcaccactgcgacaaacaacattcgacgtaagttactctcttgaattattaccccgatccaattagtcaattgtgttattgtttataagaaactaccaagcaccattgaatctaattttaaagattaataaaatgttcgagatgtggcgat

SEQ ID NO: 359 - DNA, 1476 bp, DROSOPHILA
caattacggaggacaagcacaaagcggacttgagaaatttgtgaaaatttttataaatcgcgtgtgtgggcgctttgaaaatggtgctgcgatcgggaatcataattccgtttcagtttcgcgacacgaagaagctgctgatgatcggggtgccgcaggagaaccgcgacctaaacatatgggacctaaagaacgtggtgcgcgccgccttcgggatctacaacttcgagttccggaacaagaagatcggcttcaacatcccggacgaactgctgctgcactatctggcccagaggcacgacctcaccaacttcgttatagagatcagtcaaggtaaatagcgtttaagttacggctaagtcgcgtttcaattagcgtttaagcgttcgagtgactgcgggccaccaaaagtcgcgatttcgcggagttccggagtttcacagtcaagtcttgtttgtagatcagttgtgtttatgtagacgatgcgtgcgcttcgcttctctggacgatggccacgccaaggagatgctctcctacgagccctcatgctcgatggcggtcctgaagcaccaccctcatcagcaccagcaccacgtgcctctgccgcagcggtcaaacgaaagcgcctcgcaccacgcccatgaatatgtgcctgactcccagcccacctctccggccctacgtatgagttctgaggcggtggactcgccactggaccagcagggcaacaactcggtgccggaacgcacggatagttcccacaaactgcgcctggggcaggcttactcggaacggacgccggaatcgatgacccaggccattgaccccatggatattatacccaagtcggagtccgaatcggaggtggaacgtctgcagcgggcctccagattcctagcgcgccaggaacagcaccaagcccagcagcaacagcaccagcagcagttgctgcccggtcagcagatcttccccagctacacgcatcctttgccgtcgatgaatgcaccaaatacctcccaacagtcgccttacacaccgggtctgatgagtcgctttagaaaacgcggcgaacgcatgtccaaggaccaaaaggagctgtacgttaagtttttcgaggacaatccatgcatgctatcaaaccaccgccggcacgatggcctcactgaaccattgtgggcaaaattggcccacatgctgaatagtgttccccaaggcgccgtaaagaacgtagaggactggaagcagacctttgacgcctggcggtaccgcatcttcatgtacacacgctacaactccaagctcagcatgtcggaaacgaccgatccgaagaacttcaagcccctgacagctaccgaccagaaggcgtatgccatgtggaccagccacaagcacataacgccgcaggactacgaaaaaatggacatgttcgtgccgctggacgagaccaccacggcaacgaacacctacgactactaa

SEQ ID NO: 360 - protein, 307 aa, DROSOPHILA
MAVLKHHPHQHQHHVPLPQRSNESASHHAHEYVPDSQPTSPALRMSSEAVDSPLDQQGNNSVPERTDSSHKLRLGQAYSERTPESMTQAIDPMDIIPKSESESEVERLQRASRFLARQEQHQAQQQQHQQQLLPGQQIFPSYTHPLPSMNAPNTSQQSPYTPGLMSRFRKRGERMSKDQKELYVKFFEDNPCMLSNHRRHDGLTEPLWAKLAHMLNSVPQGAVKNVEDWKQTFDAWRYRIFMYTRYNSKLSMSETTDPKNFKPLTATDQKAYAMWTSHKHITPQDYEKMDMFVPLDETTTATNTYDY

SEQ ID NO: 361 - DNA, 5008 bp, DROSOPHILA
attagtcaactagaaacagctgaaagtatttcctcaccctttgtcaagaacctaaattgttaaaaaaaaaaaactcgagaaaaaatcaacggtcgtttataactttctggttcgccttacacacgagtgattgaatttgatagatgaaaaatgtggaatattatacttcctttatttttcttttcgatggaaaataatattgaatacagaatgcactctagcaaaatgccattgacccgcatgcaatgctttgatgcatggcaaaattgattgattttccgaaaatttccactttcatttcaattttcatatccccttatatgtatataaatttgtaaatattttgagttgcacatcgcacagtttattttctaaaaaaatacagaaaattcagacacacgcagacaaatgtgtttgaaatggaatcgaatatggatttctttatcctttaattcctattcccagaccattactgctcgaaaaatttcatattcatttcgcaatgcagatgtcgactttcgctagttaaggtgaaaataattaaattttgtatcgaatgtggacagacgggaaacaagttctcgactagaatactagttattcgatgactggatcttagggctcggcctcgactggccagttggaattagcacttgatctctaatagatcgcactgattgcatctgaacaaaaaaaaaaaaaagatttctactggaatttcctcaaggccggggcttcaaaagcgccagaagtagacgccgggcagctgttaattaatcggtgcccctgtttactacttgtagacccgtttgctctcatgatttgcgagcatcgtacttgacttttgtctgggctgggcattccgtcttcttttattttatacgaatttggacatttatgattccatctattttgtggcggcgtttggcgatctgttgtagatcggctcacgcgtcgttcgaagagcacgttcccaaatgaaaacgcacttgaattttaaatgggccgcgcctccatcgatatagggtatttccgatgatatgtgcgcagtgaacattttttgagaagaaataatatttctccttttcccggaattaaaattatggatttcccgaatataaatattaattccattgtatagcaaatattaatatctagctaataactgtttactttgttgtattttattacaacatatcagtaattcattcccatactatttaaaagaaagttaatactttaaagaattaatatttttaatagtttttactgaacctaactgcaccttgaaggttgttaataatttgactttggcataatttgcttgggcatacagggcatcaccaacctcatcacttcacacactcattctattttcactattggctatttatatttgaatttgtttacgcgctaattgaaaattcgcaaaaaaaaagaacagtacgacaaacccatttgtttacaaacaaaactgaaagcgaattgccaaacactcggggagctggcttttccagcaatgtgcttcctactctgcctcctttgattttctttaagttaatttattcacatatttatccttgcagctacgtcaagttcaagacgaaccagcaacgcctgcgcagcaatgacaaggtcatcgccgacacggtctacggaaaggtgaagggggtgaagtggcagtccatctacggcaacaactactacagcttcgagggcatcccgttcgccaagccgccggtgggcgagctccgcttcaaggcgcccgtggagccagagcactggtcagatgtcaagcggtgcacacatgttcgcgccaagccctgccaggtcaacatcgttctgaagcaggtgcaaggcagcgaggactgtctgtacctcaatgtctacaccagggaggtgagtcaaagaaccaaacaacaggtgcacgaggaaattttgatcgatttattattgaccgccttttgacttaaataaatcataagaagtattttactatttgttataaattatattttttgaatgtttaatgtaaacttaaaacgatgattgttttctcttatgtagaaagctaacaaatatatattcttataccagatttgatatgaaaaccataggtgaaatggtatttagtgagtccacgatcaaattgtactcttaaatacaattaagcaacggtttacatcatatgcaattttctgatatatattttaatgctgggagcaaattaatgtcttgttatataatttacgacattttaatagacctgatgataaagaattattgcacaactcgtatagttattattaaatacgggtttaagagttttgttttcttctaaaaagtatacatttgtctggtatataatatggattattacatttttttttttttaagttacatccacacagacctttgccggttctggtttggatctatggcggtggattccaaatgggagaagcatcgcgggatctgtacagcccggactacattatgatggaacatgtcgtactggtcgtaatatcctatcggttaggagccctgggattccttagtcttgcagacgaagaactggatgttcctggaaacgccggactaaaggatcaagttatggccttgcggtgggtcaaacggaattgccagttctttggtggcgatcccgataatataaccgtttttggtgagagtgctggaggtgcatccacacattatatgatgctgacggatcaggccaagggcctatttcacaagactattattatgtcgggatccgcactggcaccctgggcgcagaccccaacccacataaattggccctatcgcctggcacaggccactggctacacaggagatgctaacgatcgggacatttttgcccatctcaagaaatgtaaggccagtagcatgctgaaggtggccgaggatatcatcaccatggaggagcgacaccagcggttgaccatgttcagctttggacccaccatcgagccctatttgactcctcattgtgtgattcccaagtcgccactggaaatgatgcgggactgttggggcaacagcattcccatggtcatcggaggaaactccttcgaaggtctcctcatgtttcccgaagtgaacaagtggccggaactgctttgccagctgggtgactgcgagaacctggcccctcaagatgcccacgtagatgagcagcaaagaaaagcgtttggaaagaaagtacgagagctatatttcggcgataggactcctggcaggaagaccatattggagtacagcgatgtaagtttcaaaaaaataaattggaacgaagttaagcttttttaaaagtctcttattaacgtgaagattgagatgcattatggcttttaatggttttttatggctttcaaaatcattacatacttacgcagtactaaataatatcagtacatctcagtttataatttgtaattaaatactcttaacgctgtttccctagtcaattttaaaaaccattgactaaaatataaatacttaattttccagctcttctcgtacaaatatttctggcatggcattcataggactttgctctcgcgtgctcaccacgccccattggccccaacattcctgtaccgattcgatttcgactcgaagcacttcaatatcatgcgaattatcacctgtggccgcaaggtgcgcggcacctgtcacgcggatgatctgtcgtatttgttctacaatgcggctgccaaaaagctgaaacgccgcacagccgagttcaagaccataaagcgtttggtatccatggtcgttcactttgccatttccggggatcccaacataccgatggtctgccaggatgagaaggaacagccgcgtggcgcgtggctgcccatttcgaaggacgataaggtgttccagtgcctgaatatatcgcacgatgtgcatgtgattgatttgcccgaagccgaaaagctgagactttgggactgcatctacgacagggaactcctctactgaaggcccatccatcgacctttcccgaccctccccatcgcatccatttaccatatccatagcaatatagcataaggtttagatatagctccttaactggccccgggatggccttaaacgcacatcaaatgtacacatgtaaatagcgaattttaagtgcttgtgcagtaagggcaattacaaaaatctatacacaaacatgagtgggtaaatattttgtttgcttgtaagttggccatctgactttaaaggccaaacggaattatttttgcattgcggcacaaaatgtgatgggagttcgttgggtaagcaaaaaaaaagtgatacctacattttagaaatcaaacttaagtctaaggtacttttctgtctagtttgttattttatcaaaaaacaaaagctaatagattgtttattaaaaaaatctttttaaatttccaataaaaattgtcaatcaatacgacatgacgtatttattatttagttatttttaaatgtattattgtatgcgattcttcacaaattgataacgtcgtttaacttatggttaagaattgagaaaaaatcaaagtgcgtcagcaaaggtattgatctgattataattattattactctgtttgagtgacagaatcacgcgtgcgtctgtattggttaaatccatgcgaaagcctcccataaagcatgcaacatgttatgatattaaaaatacttaaacgctcaaacatgacaatattaacacccgctcaccgacgaagccgcattcgcatacagatgaaggctgtcaggtgacaagaccaaaagcgagcgcacacctgtgcacaaatacatgtgcaccaccaccaccaccatacatttcacaataacaccgcccaacgcgttgggcttatgtgtttgtgtctatggcaacttcaaagcccgctataaacacaaggcacacacacgcatacacaacaaagtcgttagcctctgaacctcgaataccacccaccattaattgtaatta

SEQ ID NO: 362 - DNA, 1704 bp, DROSOPHILA
atgggccgcgcctccatcgatataggctacgtcaagttcaagacgaaccagcaacgcctgcgcagcaatgacaaggtcatcgccgacacggtctacggaaaggtgaagggggtgaagtggcagtccatctacggcaacaactactacagcttcgagggcatcccgttcgccaagccgccggtgggcgagctccgcttcaaggcgcccgtggagccagagcactggtcagatgtcaagcggtgcacacatgttcgcgccaagccctgccaggtcaacatcgttctgaagcaggtgcaaggcagcgaggactgtctgtacctcaatgtctacaccagggagttacatccacacagacctttgccggttctggtttggatctatggcggtggattccaaatgggagaagcatcgcgggatctgtacagcccggactacattatgatggaacatgtcgtactggtcgtaatatcctatcggttaggagccctgggattccttagtcttgcagacgaagaactggatgttcctggaaacgccggactaaaggatcaagttatggccttgcggtgggtcaaacggaattgccagttctttggtggcgatcccgataatataaccgtttttggtgagagtgctggaggtgcatccacacattatatgatgctgacggatcaggccaagggcctatttcacaagactattattatgtcgggatccgcactggcaccctgggcgcagaccccaacccacataaattggccctatcgcctggcacaggccactggctacacaggagatgctaacgatcgggacatttttgcccatctcaagaaatgtaaggccagtagcatgctgaaggtggccgaggatatcatcaccatggaggagcgacaccagcggttgaccatgttcagctttggacccaccatcgagccctatttgactcctcattgtgtgattcccaagtcgccactggaaatgatgcgggactgttggggcaacagcattcccatggtcatcggaggaaactccttcgaaggtctcctcatgtttcccgaagtgaacaagtggccggaactgctttgccagctgggtgactgcgagaacctggcccctcaagatgcccacgtagatgagcagcaaagaaaagcgtttggaaagaaagtacgagagctatatttcggcgataggactcctggcaggaagaccatattggagtacagcgatctcttctcgtacaaatatttctggcatggcattcataggactttgctctcgcgtgctcaccacgccccattggccccaacattcctgtaccgattcgatttcgactcgaagcacttcaatatcatgcgaattatcacctgtggccgcaaggtgcgcggcacctgtcacgcggatgatctgtcgtatttgttctacaatgcggctgccaaaaagctgaaacgccgcacagccgagttcaagaccataaagcgtttggtatccatggtcgttcactttgccatttccggggatcccaacataccgatggtctgccaggatgagaaggaacagccgcgtggcgcgtggctgcccatttcgaaggacgataaggtgttccagtgcctgaatatatcgcacgatgtgcatgtgattgatttgcccgaagccgaaaagctgagactttgggactgcatctacgacagggaactcctctactga

SEQ ID NO: 363 - protein, 567 aa, DROSOPHILA
MGRASIDIGYVKFKTNQQRLRSNDKVIADTVYGKVKGVKWQSIYGNNYYSFEGIPFAKPPVGELRFKAPVEPEHWSDVKRCTHVRAKPCQVNIVLKQVQGSEDCLYLNVYTRELHPHRPLPVLVWIYGGGFQMGEASRDLYSPDYIMMEHVVLVVISYRLGALGFLSLADEELDVPGNAGLKDQVMALRWVKRNCQFFGGDPDNITVFGESAGGASTHYMMLTDQAKGLFHKTIIMSGSALAPWAQTPTHINWPYRLAQATGYTGDANDRDIFAHLKKCKASSMLKVAEDIITMEERHQRLTMFSFGPTIEPYLTPHCVIPKSPLEMMRDCWGNSIPMVIGGNSFEGLLMFPEVNKWPELLCQLGDCENLAPQDAHVDEQQRKAFGKKVRELYFGDRTPGRKTILEYSDLFSYKYFWHGIHRTLLSRAHHAPLAPTFLYRFDFDSKHFNIMRIITCGRKVRGTCHADDLSYLFYNAAAKKLKRRTAEFKTIKRLVSMVVHFAISGDPNIPMVCQDEKEQPRGAWLPISKDDKVFQCLNISHDVHVIDLPEAEKLRLWDCIYDRELLY

SEQ ID NO: 364 - DNA, 4064 bp, DROSOPHILA
ccatttatcaattacatagagcgctcttaagtaagttagtaagtttctataaatattacacaacttaccctgatcaggagctttaatgtcctttgtgccgaccacttgttgctcattttgctgctgttgcggctgttgttgttgttgttcgcccgatgtcgtgggaatggctataaagccctcaatttcggatttagtgtctgacatttcagatatttacgtacgaattttctgggaaacgatttgatttaaactttcaatgcgactgtcattgtttgttttcggaatgacaatcagaaaatggggcatactgcgatttgtgcactcaatttttatatttagtgctatatagtgggactgattaacaaaaggagggaatcgcaattatattacttcgttgataagctgtggcacttaagatttaaacatatttacaacaaattgcgaatgtacaaatatccaacgattcttattcacgcaacaaaaacaaagcgcaacgacgcatcggcaggtattttctagaaaacttggtttgtcacagatattacataagcagtcgcaattgccaggttcgtatgtattttgcttaatatagttttcgattttgtagccgcaaaaatcacagaaaattgaaaaattcgcgaaaaaacaattggttatttagcgaataatcagctggctggcagctactatgcaacactactgccgctgctgttatcgattgcagatgaggagagagtcgcttgttaagctagctatattcaagctgaaaattaaatatcttcgaattcaccgaacatatattgatataaaaagcgttttaggttgaaatgactcaataacgccagccctaatgtaactaaaacaagcgcactatgctaaacaagcgttttgaaaataattgaaatctctagctagtttctagatccaatagttcccatccctaatagaaaaatatggccagtgctagtaaataaattcctaatagccggctaaatggtttgtttttgttgaaactaggagaaaattaataaaaacaaaagatatacccgaagaaacatgccgagccaagaggaaaatgagttgtacatggtcaaggaggcgcaaagactccggaaaagcgatccttgcgcggccatggcctggattatcacagctaaaactttatatcccaatgcattcaacctgcaatacgaggcttatctactggaacgcgatgctcagaattatgaggaggcagcaaagtgtttcagtgctatgtgagtatacaatagcacatctattccagttactttatcttttactgttccagagccaccaatttccagaatcaacatacggagctgtggcaggagatcaactccctaacaaatgccctcagaaatgagaatgaaactacgccggaacacgagttctatgtaaaaatgtacaagcacctaactccggaagtacagcacaacatattcatgcacaccatcaaccacagtgccgataatctggagcgcatctatatctacatactgatgttcaacaagtttcccaaatcagccataactcaggctcccaggctactggaaatgctggcggagggcatgaaaaccgaaccggatctctatcagcggattctggtggaggaggtattgcccatgatccagaataagcccccggaactttcgccaaatctggcctgcagactttataccagttccttggagttttatttgcggcaaataatggatgaatcggatacagcagatgcctggaagaacatctttaaagtgctgatgatctgcggtcagatgatgggctgggagcccttcctgcccttcagcaagcatgtcaaccagaacgtctactgggaaaagctggtggacatactttccggcagtcctgcgggcagctcccaggttttgttctacgccaccaccttgttcatttactcccttcatggttatatacgaaattgtaagctgaggatcgaggatgccgatgtaactcatgttttggtagaaggattcatggaatggtcgccggaaggtgatggctccgaagtgcccagcatggagccaccgaaattctccctgaccacggccataagtccagagttatccaaggccttcctacacgccgcccagtgctggcagctgctcaatacggatcagttccaaagggatttcagtcaacttatgctggctcttcccttggcgccttggatctcaagattcctcttcgacttggccatatatttcggacaccgggatgaggccaacaagcttatggcggacatgaccacccagagcagtctggtgcaaagcctgcagatcttgagccttaatctaatgcaaggcagcatgacggtaagtagagagccagttttttcacatgggtaaaccttaatgaatttctcacacagctccagggcttccagtgcattttaaagatcctgtcagaactccccaccacccagggtcaacttttggagaatatgtcgctgaagggccacaggcacatggtttttctgcccctcactcgatcagcgttggttcagtactgcgtgggagccatcatcagcagactgagtcgcaaggtcttcgaaccgaacgttccagatcgattgctaggggatatcctagtgctgcagcaacttaatctactcaacgatgttctgctcactcaacagatatttaacctgatcaagcaacggaaatcgttcaatctgcgcaccctatccacctacattattaatatcgatttgctcgaggaactctcgcacatttggaactcccagcaggaggataactttgagttgaccagctcgccaaattcgagtggcacacctactgcgaccactgtagctggtggttcccaaagccgaagaattggcacccgtggagcggacaaaggagcccgagatgaattcagggcgataacacgccagcagattgcccgctgcaatgagaacgtgatcactttgcttgcgaatttcattaaccaagaacacttgatgctggcgcagcacatctttggaatcagtcagcccgtggagacgattgtgattaagtgaaataactaggaggtaacatttataaaatatctattttccagctatcttacacattgtgtgtttggttaatacatacgactattatatttaagttcaccagtctagactggtgtatttcgcttatcgaataaacaaatatttattttatcagctgataacatagttagaggttgcatttgatatgtttcgatttagtcatacgcataatttaaaacttcatgtagttttaatttaatttgggtataataaatataattgatcgactaacaataacttaaaatgattcatcttatttcttggttaagcatttatgttaaaggaccagttgtgtactaaacatgcatatttattggtattaagagcctcttatttacataataaccctcgtgttcacaataactaaataatttggtttcttgtcgatatcacacctattccgcgattcctattcgttctgtcttaaacggctttttgggcatcgggactcgtcgttgaactctgaggcaataggttctgctcggaggacgcaactaacttctcctccagtgggaggtgaacgccgaaatcgtgcttcatgtaggacatgagcacattgtaaacagccgtgcacacattgacgaacgtcacccggtatttggtgtctaaatagcgaaagttcaggtactgcgccgccggccaggtcatccaatccagcatgtaaacatacgggaacttggagatcagctcctgattggtggcgtccagggtctggcgctccagatagcaaagcgaatagaagaatatgacgatgcaggcgggcgacatgaccagctggtcaatcaggatcttcttgaagatgttctttagcgtacgagccggcattaccctgtccatccagttgtacacgtagtggtgaagaggtccctgcagcgcgccagccacaaacatccggtacatgcgatccgtatcgaagcggtcctggtgccgcaatccacgcctgtactcgtactcctgggctatc

SEQ ID NO: 365 - DNA, 1955 bp, DROSOPHILA
tttgtttttgttgaaactaggagaaaattaataaaaacaaaagatatacccgaagaaacatgccgagccaagaggaaaatgagttgtacatggtcaaggaggcgcaaagactccggaaaagcgatccttgcgcggccatggcctggattatcacagctaaaactttatatcccaatgcattcaacctgcaatacgaggcttatctactggaacgcgatgctcagaattatgaggaggcagcaaagtgtttcagtgctatagccaccaatttccagaatcaacatacggagctgtggcaggagatcaactccctaacaaatgccctcagaaatgagaatgaaactacgccggaacacgagttctatgtaaaaatgtacaagcacctaactccggaagtacagcacaacatattcatgcacaccatcaaccacagtgccgataatctggagcgcatctatatctacatactgatgttcaacaagtttcccaaatcagccataactcaggctcccaggctactggaaatgctggcggagggcatgaaaaccgaaccggatctctatcagcggattctggtggaggaggtattgcccatgatccagaataagcccccggaactttcgccaaatctggcctgcagactttataccagttccttggagttttatttgcggcaaataatggatgaatcggatacagcagatgcctggaagaacatctttaaagtgctgatgatctgcggtcagatgatgggctgggagcccttcctgcccttcagcaagcatgtcaaccagaacgtctactgggaaaagctggtggacatactttccggcagtcctgcgggcagctcccaggttttgttctacgccaccaccttgttcatttactcccttcatggttatatacgaaattgtaagctgaggatcgaggatgccgatgtaactcatgttttggtagaaggattcatggaatggtcgccggaaggtgatggctccgaagtgcccagcatggagccaccgaaattctccctgaccacggccataagtccagagttatccaaggccttcctacacgccgcccagtgctggcagctgctcaatacggatcagttccaaagggatttcagtcaacttatgctggctcttcccttggcgccttggatctcaagattcctcttcgacttggccatatatttcggacaccgggatgaggccaacaagcttatggcggacatgaccacccagagcagtctggtgcaaagcctgcagatcttgagccttaatctaatgcaaggcagcatgacgctccagggcttccagtgcattttaaagatcctgtcagaactccccaccacccagggtcaacttttggagaatatgtcgctgaagggccacaggcacatggtttttctgcccctcactcgatcagcgttggttcagtactgcgtgggagccatcatcagcagactgagtcgcaaggtcttcgaaccgaacgttccagatcgattgctaggggatatcctagtgctgcagcaacttaatctactcaacgatgttctgctcactcaacagatatttaacctgatcaagcaacggaaatcgttcaatctgcgcaccctatccacctacattattaatatcgatttgctcgaggaactctcgcacatttggaactcccagcaggaggataactttgagttgaccagctcgccaaattcgagtggcacacctactgcgaccactgtagctggtggttcccaaagccgaagaattggcacccgtggagcggacaaaggagcccgagatgaattcagggcgataacacgccagcagattgcccgctgcaatgagaacgtgatcactttgcttgcgaatttcattaaccaagaacacttgatgctggcgcagcacatctttggaatcagtcagcccgtggagacgattgtgattaagtga

SEQ ID NO: 366 - protein, 631 aa, DROSOPHILA
MPSQEENELYMVKEAQRLRKSDPCAAMAWIITAKTLYPNAFNLQYEAYLLERDAQNYEEAAKCFSAIATNFQNQHTELWQEINSLTNALRNENETTPEHEFYVKMYKHLTPEVQHNIFMHTINHSADNLERIYIYILMFNKFPKSAITQAPRLLEMLAEGMKTEPDLYQRILVEEVLPMIQNKPPELSPNLACRLYTSSLEFYLRQIMDESDTADAWKNIFKVLMICGQMMGWEPFLPFSKHVNQNVYWEKLVDILSGSPAGSSQVLFYATTLFIYSLHGYIRNCKLRIEDADVTHVLVEGFMEWSPEGDGSEVPSMEPPKFSLTTAISPELSKAFLHAAQCWQLLNTDQFQRDFSQLMLALPLAPWISRFLFDLAIYFGHRDEANKLMADMTTQSSLVQSLQILSLNLMQGSMTLQGFQCILKILSELPTTQGQLLENMSLKGHRHMVFLPLTRSALVQYCVGAIISRLSRKVFEPNVPDRLLGDILVLQQLNLLNDVLLTQQIFNLIKQRKSFNLRTLSTYIINIDLLEELSHIWNSQQEDNFELTSSPNSSGTPTATTVAGGSQSRRIGTRGADKGARDEFRAITRQQIARCNENVITLLANFINQEHLMLAQHIFGISQPVETIVIK

SEQ ID NO: 367 - DNA, 14301 bp, DROSOPHILA
gtgactcgtcgaaggaggtcacggatgccccacacacataggcctacaactctaggtacagtcacattcaaaatcgagaggaatgtaatgcactttaaaatcatgcctgtcatcgtctttaatgtaaccaataaaaatgctaattgacgcttatgcaaataattttgttttcataaaattgacaaaaataaatatatatatattgtgtttttaattataatttaaaattcacaattcgtaaaaacatcaagtccctctgatgaacgaaattagcattcctcaattcattaaacatttctaagttaaacaaatcattaataatttattgatgcgttattacgaacagaaaaatatttgttcagatgaattacagtcattaaaatggaaaacggaagcaaaataaattagatggtttgtttatatgcccatatgtcggaatatttaattatgctgaagttcagatcagaaatataatgacgttttaaatgttattttaagtccacactaattcagataattctcaaatgtaatcttagcttgtaaaaaaatatttcccaataagctagccaatgattgctaattcaatgctctagtgacttaagcaaatgtagacccactaatgattaaggtttaaaagtagaagttccatttagtcgatttggtttatatactcgtatttgtgtttccccagcttggcaacatgtttcaagaatttgatgccggaaacggccctagcaacatgttgcctgggccacatatgaaaatgaaaactggctggcaaaaagcaaaaaggcaaaaagcgcacaaaaacacgcctgaaaatagaaaacaaagcgaaaagcagccgagttggagttcgggctcggctttccgagttcgggcctggctcgaagccgcctggctgattcgcaaaccagctgatgaccagcggaggccgacaaatcgggagacggagactttgtgctgatgctaccacattcgctgctttcagtgtggcccgtgtcttcaatgagttttgtcatgctttagcgcagaaacagcggttcgatatcgtgatacccacagcatataaacagtataatatactatatccttcagataccagatagcagcggcaaagtatgtgcagtgttaactgatgacgatgaatgctaaatataaacgtgtgttgtgaagttctgaccaagtgcaagaaagcaagaaacgtaaaaataaaaataaaaaataaacaccaacataaaaggatcgttaagatcagcgacagaaacaaaagactcaggcaacgaacttgcgtgctgcaatgcagacaatttatagcttgcaggcagcgcagctgctgtcgcaggcgtgttaaatttatgcaaataaataaatcaattccacaaagataaataaaattgaaggcgttccgccgttttgcacgcaccaaacactttaaggcatttgtcaaaatagccgaaaaggcgaaaaaaaaatatgcacaagcaatctagagaaaaatccgtttcccgagctgccataaattaaacctcgcccatgacttttctctccagcaaaactaaataaactaaataaaatagagtagcataaaagggagggaaaaagttaaaaaacgcttatggcccctttagatgcagcaacttggaaatgagttttgaacaggccgcaaattattattgttattatcacgggcagccaactgacatttagttttgctttatctccgtatagtttttgcgtttaatgtgccggaaatgttttctcagactccgcggcggataattgtgggtacttgagcttgggtgttgccaatgattataaaaccttgttaatttgcgcaaattggttttgcatttttcaagaccaggcgaagtatcttctccgactagttagtcggctctataaaagttaaacgctttaatttatgcacatatcacggttccttaaattggccgcagagcaaatacctaaggtcgcctgatcggtgggctcattacagctcggaacgggtttgggcctgccagagattctactgctgagctgctgacctccagtgcctccagttttgacgcctaaaatcttggagtccgtctaaacatagtcacgttccgactgttagccgtgacatgggccggcgttttttggccggacagtgcatactggcacgccctcctcctcggatatttacgatcgcaaatagctgggacttggacggcacttaaaatgcgtggcatgcggctcacattcggccaaactttgcgacactgtgtggccaaaaagaccgagagctgccaccacgccaaaggcaattgaaaattaaccgtacctaagattttcaagaaaatggtaaatggtcatttgaattggttccaacgcttacgcatgcgccacaaatcgtgcgctactccccctcgtactgaaacacataccctcttatcagggcggccatgtgtggaacgaatctcgatcgcgatcgcgatctcgtctcgatctccgccagaaagccaaatgctgccacggacacactggcaattgagacgccaaaagtcagcgtcatcgcagacacaatcaccgccaaaagtaaccgttcactagggtccaactaagtaaggcgattgcgtaatgagcgcggcccattccatttgatatttaccttaaatctgatttgatattgtcccacacggcggcattcgatatgccagactcgtctacaattactatatacccgggtggacataggcaaccagtcggctgtcgttaatggaggtgacttctgatttctgatttctcactgaggctgaccagttgatcgcttcaaattaataacaaatctgcctgtggaggacggccgagcaactttccgcgctcaaaaggttatgcaaaaacttcaagtgcaactcctccagtgactgtagttaaaatcgaacaaattgttttgcatattatacatcgaatgcatccaacttattttggtgtagtgaaaaaccccaagatctacccttcagtaattgaactaatatttttgcagctaagcgacttagaagtttcgagtttcatttgaccaaacacaatcgacacaaaatggtaagtacactcatgcattgttaactttaagccaatttccgctccgtaatcgagtttaaacacgtgtagctcgtcgtgttgttttgggggtaatcagtgcaggtatttatgtatttctcgacttctgtgtttgctctcacataatttttgaaataattaagccgcatgcacgatcgtccaacgaaattgacacacactcccagcaactgcataaatttcgcagcaacgcatgagcaatccactcccaggcattcgtgtcattggaccttgtcgtatgagctgggaaatataaatatatttaattcaaatatataaatgctcggcttatttttaagaaggtataagtattcaacacgaacattcctgaaagatgaattatttctgggtgttgtgaacatggaatccttcttcaagccagctaatcatatatttctgagaacatagaacttattacttattatgaaatcataattcccatgagctcggctgcagtgccaagggcaaagcacataaaaccactctttctgcacacagaaattgcagttgacaaaggcattgacccacaatgggccatgtgagtgcggttggatgtcgattcgagtgattctcattcatttcgtacgcattgttctgtggcaagtttgaatttgcgattcatttttgtgcatttgttaagctgcgcgctgatgtctgaccggaaatgaaaagagtgaaatcagcgtcgttaattgtcaaaatacgtcgggcaaaaacaatatttgtgcaacatcatttaagtaattaacgtgttcgattatttttataattctatttttggccatttgccacagacaaagagcccgcagccgagcataattatattaatatgcaatttgttaatttaaatgacttccttaagcgatcttgctgactgctgttgcgcgatcttggataaatgaatgaaatattatagttaaatatttacgtttttctttcgacactcgatcgggctatcggctatcagtcagttagcattttgcattgtgattcagattatgggttgtgcgattgacaaatcatacagtatgcatgccctaatgctgattttatgcagcaagcaaacaaagcacaaattatacaaattatcggccgatttcggtttgtttacaaaacaatcaaatgctactttggccacgctccgaaatcattttcaacgctaacggtagcacattgacctcctggacacacagccaacgaaaccattgtcttggccactggaccattgtttgggctggaattgatttaactcagttcgattccattcgattcgattcgtttcgatttatttatttttccattttcacaacattcctggccaaaagttcaagacacttaaccgcctgacaggcattaacttttgggtccgtaaccgttgattaggcgtcttgacttgctgttgcgttgagatttatgattagcgcccagctaagtcggactgaaacgagccagaaaactgaaaagctgacaaaaaaaaaactgaagaaacgagacgcattaagtgccctactcaaaatgcaagttattacgtctcgaaggtttttgttcggtctcaacggatttttccatttttctctttgcgaaacccagccgcccaaaatgccagaaattcaatgagctcctgctatcgcgatgaagtcaatcagctggccagcgaaaaaacagaaaagctgaattgccaaaaatgtggagccctcaagcattccctgggacatgtttacggtgatgcagatctctggcccacaaaatctggcagccacttcggaatgtccagaatgaatgacttggctgaaacgtttggggagatctcccagtgataccattgtccaaattggccataccttcgggttgagcgaactttaacattatcgggaacgatatgaagttacaaatgaaactacaagtgtgccaaacaagattgatgtgacagaaaatcgtatcatattcccttaactaatgttattcctcaacaaaacttttgacaacctaaagggaaaacaaaggaaaagcattgaaattgaaatattacaaaccaaagcctgtagattgaattttcaaattaaaaattcaattaaaattgctatgacacatatgtggaatcattgagatttctccttgaaaatcttcgaatctagttcagaagcgacttttatcctagcctcaaatgtattgcgcaactttcgatattcagcatctgtaaatgcttctcgagtcatctatcgagtttattcgcgatcaaagtacgagtatttaatttgcccatttttcgtgttaattaaaagccgaccacgccccttgcatgtcgggtgaaatcagcatcagcaaattcagcatctcagtactactgggtgaggaaaaaggtcaagtttgctgtgctccgtcagtttgtctgggaacaaatccgatggagaacaatgcctgttgtgcaaatagaatccacctacgcatcatggccaggcttgaattggaagagaaaaacaagaaatttacctttgaaaagaactgaaatttcattaaccccattgatcagattcgaaatgcgcaatttggcagcgtaattgaaatcaacatgatgtctacttatttattaatacattttttcttgtcttttttttgtttttggttttgttctttttgtgcggctgattgactcccacgtctggtttgcttataaattttggttatgcgatttgcaaatcatttttttggccatcgattattgtttattattcttttgttatggatatggacttgacttgggctgaacttctccgaaatctgatgtctgaaagaaatagcatgggaacagcgtggcaattaatcaaagtgcataatcacattgcttttcttgccatctatttgtttgcctgggaaagtatgcaaatctcgggatttcactaatgcgaaatatttggttttggcatgtgaaacttgattttagaagggagagaaagcttcgctgatattctctagtctatgttaaatcaatccattcctaagcacacttcataccactttaaatatcacttaacctcctcattttgtaagccgatactagacattctatatttcgaaaccagaaacacttggaggagccccaaaagccgatcgataatgcgtttggcaggcaccttcaccgaaaccaagacaaatcgctgccaatcagccatcataactcaagacacatctgccaccgagtagacagatcagaaagctggtgtgccgatctcccagcacaaggttatggcgaactgaacacagaaaataaataatttactactaaatatttttatattttatgctaaagtgcttaaaataaataagaagttcttcagctgcctagaatggatttctatcatgtgtattgttaatcaagaataaactaaataactttgtgtgtaatttaaagcaatgaactgaatgttctcaaatcaaaataattgattgtaaaatcgtaaatattttctcgctgtgcactcttcagactgatgaggaagcttgaatagaagattgttttcggtacttcacctctatttgccttttgcacacccggcacattgtgaatgctgtgtagcaatgcactgaaaaccgaatctaatggcagccaggcaaaataacaaaataagtcgaacaaatgcttataagctggcagaaacataaaatggaaacgagtttgccagcttgtgacaaacgagcgcagccaaaaagtaaaacgaaactccagccacgaaataatgatttggcgtcaaagagccatgttcaaatttaacgctacctagcctcctaagtgcgcttttgggggttttcattgggctgctgttcgttctgcgatttatcaaggttactttgcctaattgatggatggctaggcacagccattgcactgaacaagcgacaatttgccgggccttgaacctctggccgcctctcctctgcactccacttccatcttccgatccgatctgatgaagatggattttgtatctggaagaacgacaagtcgacaacttcaactagaattgaaaactgaaactgaaactgattccgaacctgaatcggaggctaggcccgtgcttaatatgcaaatgagagcgcgttgtaaaaaatgctggggctaattacgtgacacgcttcgcctgttcgacatcgggcagatgaagtcattctaaagccccctatttatgattctcgacttggtccgaaggtcacatggacacttggccatcgtagttggtgcccagttcagtgatctgccggatgtcttctctcgttctgcaccagaagccattaagatgtaaatttaatgatcacctacgttgcgatatatggcagccagatttatggaagatattttcacgccaacggtgggaggataacacccactttgccccgattgataaagtactcaaactgatctcatctggcatttctagcttgttggaaatggatgtactaagtgcgccaagcggatgttacttactcgctatgactaagccaagtttatgcttggaaaaccctacacgagaaatagctattgttgggatcaactagttaagcaaatgttgttttccaagtcacttaattatggggctaagtacacctaaaagaacaaaagaaaaagaagatctcatagatctcctaagagaaaatgtggatgtgactaggtaaagtttatgcttggaaaatctctccaatctattaatatgaatatactattaatagcagtatagacataaatataaattagtgacgaggaagtaaaacaacatgtattttcattgccttttttgtgcattgctaaacgttttgtttgcttcattatgtaaagcgcttatttcgatccactccagtgggccatcattttgtaataaattatcatcttatttcgttaatcgacttccaatcgtgatcgcttgattatcttctcatgaccttttcaaaatctgaataacaggccgaagagcataattgattgtgggccttaaaagcagtgccataactggagtaatccgctcaagatctatttctttctttcgaagacagttcattgtatggcacctctatcgtcttgaattcccattgattgatgaatgatctgtgttttcgcatctctgcttcgctttcattaagcgaacttcggtaattgagcatgtacagtctttatatcattgacttactttcatcacccactcttgacacgatttccaggcttagggaataaccatttatcattttcgttttcggggctttcgcctcacgcccgcattgcaaaaagtgcaattcacaaatggtaactgaaaaaccataatatggcccgtattcataattaaactgcagtgtatcggcccgcacgaaccactaagacagaaaaccagtcatatctaactactcatgaggggtacccccataagcccataagccaatatgaattatttcaattagggcgtttaaaaaatgattatggcatacttattatcgaattacaattcgaacgcgccgaatgcaagcgttaaactatgtttcgccttttcgataatgttgtgtaataaaagagatttacaataactataaggaaccccagatctcgggcgatttatccaccgcagccgaataagccactataatccacactaagccagagtcagctggctaaggaggcttttcttttattttggccacattaaattaaatctaagcttgacccaaaaaaaacacaagcacgagctggccatttttttgtttttgtttttgttttttggctgcacaaatttcgcaaaatatttcgactaagcacttaatttgagactgaaacaaagcgcgctgcaccaaacataactgcagtccaggtcagcatgataataaatgattattttcggtctaaactgcgttaatcaaaggtaatgataatgcggtacaatgccggccgtgtggtgcggcgtttacttaggctttattgattgtttttaattagtgaacagtacctcggtacgcccgctggcggctgctgctcattaccattacgatcgccagatcaagatcgctccggaccgcagaggagtgcccggtgttcgtaaacggagttacgacccaaaaggagggtccccattacgcggttcattcaaccgaagttgcgcagttgcgaagacattcgttggccaagaataaggccgagaaaagccagaaacaatctcgattactacagtgtttgccaccatccaccatccaacatccaccatctgcgatccgctcaagttcagggtcaacgctattttgtctgtcggaagtgacactgccggcagggcgtccattgttacacaaatccgagtttatggcttctcatgccgcctaataacaggtcttgtcaaactggagccattaaaaggttttcaaaacggagcaaaacgtgttgagacctggctcaatcggaatagttgttcgcgccgctttttattttctgtctcggaattgtgcctttgaacaccatgatgggacagacagcgaataaaaccgatcgaatgagacgtaaatgtcgcgatatacatgttttataagcataaatagtacccaattagtatgagctttttagtttagtttctatataagctgaaaagggaatccggagtgcatctaataccatttggcatacaaatccgaggatacacactttaaaatcaatctgaaatggaaagtgtatcttcttatataaacagatagctgtcatttgctttctgcactcgtctcggtttcaccttatttttatgacaacctccaccatggatttaggatagcagacaaaacttggcatgtacggagcagctatcgttaatgccggccttgatttctgcgtgtttttatgattgcacacaagcgatgacagcgtcgatcggcggacaggtattgctgcaaccggcggctcatgccaatatgcattgtgcatagcaaataagtgcttgtcaatgcaaaattgtcaatcaattagccaaaacgggggatagtcgagcccgccgacagcttaaccgctgcctcttcggggcaagtgtggtacataattgctggaattagccacctcacgatcccacattggggttatgttgttgtcaaacgtgcaatttgtggaccagcgattgcaccccaaagaattgcacaataggtcgatctgtcactctgctattatgacatctcccagcttgttgatttaaaaattaaaataacaaattaaaaaggttcataatgtttctagccttgcaatggtaaatattaaaaccccacaagtttcatgagtcacattaccactgaatttttatctctgtacttttacaattagctcacaattaatcaattgttttgtcaatcatgggaaaccaacgaaatcgatatagatcgattggtagtcgccacaagaatcccagcccctcaaattggtcaataaaagcgtggtccgcattgtcctgagccaagccatatggtatccatacatcagcgttatcgaatccatttttggcgtttactgtgctgacaaatttgtagccagatgcctatcctcccagccgggccataactccatgccgtgaggtaactaatgaccatacttggccccaaaggtttagccccgtattatattgccggcatggttttggattgggattggggttggcgctgcgtttggcggctgtcttgagctggagcacacacttcctcgaggctcattagttaagcaaacactcggcggcaatcaatgcgagaggcggcggggcggaaaaaaacagatctaaccataaataatgtcgcattctgcagctttgtccattgtaatcgatttgagaatcgcataaaaagtgtcaaacggcactgggaacggtataaaaacttaaactgaatgtaattaatcaacaataaatctatttttttgagcggttaattcaattaacccaacaaacagtcgtcatacatatttatgggtaattgcgattcatgggccaaacatctaagcaaagtgcaaggcaatcagcaaacaataaattaagtaatttctttgaatattcgatagccttttttgtcaaacaaaaactcaagcacctgcagcaatttaacacttgacattgttttatgaacaacagaagtggcgacgaggggcattttctttatgtaattattgttattacattcgagttatacacactcgatttcgattcgagttcaagtgcgaactgtttgtttgcctcaatttgaaattgatttggctgagtctgtgtccaatttgccatgcgactaaataaagcgattttaattgatcatcgattcgaggttgtgtcaatgataaggcgaagcaggttttatggcatttgttttgaatctcgagtcggttaatctcgatcggatcggttctaactgatatcgggcacggagtcgtgtaacaatttgccaaacacaacaatgcaaagcactttctggcgaggattcccacactcatccgtattgaaactcgttttccagctcactccttgcctgctgctagtcgccacagtcgccagtttcagcctccacgcgcaggccatccgggtggactggggcaccaacacaggacccatagcaccacctccgccgcgcaccactccgcagccgccgaggaaaccataccgggatccagcgcccgtctgggaggaccagagcgatgacgtacccaaccccaatccctatgtgtaagtgcaaacgggtttcacagagatccataaccagaaaaactagctgcaagggtcaatctgccatttgtataaattgtttatataaataaattgaattcctggttttttcggattttcgccttcggccagatgtagagaaaatgaattggcaacggtgatattatattacatttgaatatttatatgactattatacaatgtagtctcgcattattaatagatttttagcaacttcaatactgcaatacaatttataataacccttttatggaaatcatccaaggtcattactttactttacttaaatcaaatgacaataaaatcgtcaataaagtcggtaatgatattaattatatcaattaaaccttcgttcttccaccacagctacgtgttgccaccgccttcgagaccaaggacctgggcgattcccgccggaccatatgctccgcccaactacaacaacctgccgcccaagggcaacaactacggccagctggccagcaattcctacagcggaggagtgacctccgtgccgggactggccgcccagtatgtgcccggagtgggcatcaagtatacggcaattgtgtctgataagctgcagggcaaatacaatgcgaagaccaagaagtacaaggcctatgagaaggccaagtacgcttacccctggaactatgtaaggcaatacgagaatcgaaagcgatatctgcgctattgaaccgccgatacccgatatgcatttagaactacctatatataattgtacaagagattaaagccagacacctcagacacgaaccccgcttttaacactgtaaattgcaatgcctttcagctcgatcaagtcagacacccccgcatcgcaaacatgccgctcactatccctttcacaatcatcttgctccatccacattcacatccacatacacattcatgtccatgtcataatcgcatgcatcatctcgttgcagttgcagcagttgccggtggaggagaaggccttggaatggcaggcggagctcgagaagcgactcgacgaggagcagtcgcggtctcaggctctcagttcctccacgacaagcaccacttccagcacctcaacaaccaccagtaccaccaccacaccagcaccacttccatccgcagacagcaacacaactgccgcatcgacgacaacatctacgagcacgcagcagcccacaacaattgccaattacaagctggcacacgagaagagcgcccatctgaagaagcacaacaagcagaagaagctcctccagctgcacatggagcaggagaagaaggcgatgaagaagctgcagcaggagcaaaactcgttgcagaccagttgagcgggcgcgatcgacggctagcagctgaaaaacaagcaaacatttaagcgaacattacctttaagacttgcccacaatgttgtaaataactattaataaaattaaacatcccataataaaacgtaatcgaaattaaggaacttggaactttagatgggcagctatgttggacattataattgaaattaaccattttgcaaaaaaatcaaaagacttaggcaacgaactttatctgggaaattgtgttaggctgagaagactaataaaactaattactggcggggaaaaaaggaaacataaaagtaaattaaacaacgtgatccaaattaaatattgagtaactagctcgagatggtcaatccaaagactaattggagttaatgaacagcaaatagcattcttataagcagctaagaaaattagttttttttcaaaaatcaaaagacttaggcgacgaacttgacactaataaaactatttggtaacccaaccatcggtaaataaaactgtaagtgagagttagttaaacaaacgtatttatgcaatgtcacaaacaaaagacttaagcgacgaacttgatagatgcatgtgagataacttggagaaatttagctgcgcagatgagaggtgaaaagttaaagggaaacagttgagagagcaattccgcttacccaacgaggatggcgcctaaattgccttttaattgctcgcgggggtcagcaaaagggcaagccggacaaggtgagctgtcaaacggattaacggacccaccactgattggcgctttcttgaacgactttttgtagccgcaggcactcaaaactgggcacaaaaagcagtgccaacaaaacatacggcaattagccgttgcaattagcggtgtcgttgaacggcggcggcttctgggccatcatttaagctgatcagtgatcacagagcggcgtcttaagaccctgaccacggaacgtcagcgacagcaatggaaacaatataattagctcgaattgctaacaaaaacacaatcattcttctgctgcagccaaaaatatttgatttatgcccggctcccgattttgtataggtgtcgttaacccagtttcggtttgtcgacgggtttagtcaaccat

SEQ ID NO: 368 - DNA, 1236 bp, DROSOPHILA
tgtcttcaatgagttttgtcatgctttagcgcagaaacagcggttcgatatcgtgatacccacagcatataaacagtataatatactatatccttcagataccagatagcagcggcaaactaagcgacttagaagtttcgagtttcatttgaccaaacacaatcgacacaaaatgctcactccttgcctgctgctagtcgccacagtcgccagtttcagcctccacgcgcaggccatccgggtggactggggcaccaacacaggacccatagcaccacctccgccgcgcaccactccgcagccgccgaggaaaccataccgggatccagcgcccgtctgggaggaccagagcgatgacgtacccaaccccaatccctatgtctacgtgttgccaccgccttcgagaccaaggacctgggcgattcccgccggaccatatgctccgcccaactacaacaacctgccgcccaagggcaacaactacggccagctggccagcaattcctacagcggaggagtgacctccgtgccgggactggccgcccagtatgtgcccggagtgggcatcaagtatacggcaattgtgtctgataagctgcagggcaaatacaatgcgaagaccaagaagtacaaggcctatgagaaggccaagtacgcttacccctggaactatctcgatcaagtcagacacccccgcatcgcaaacatgccgctcactatccctttcacaatcatcttgctccatccacattcacatccacatacacattcatgtccatgtcataatcgcatgcatcatctcgttgcagttgcagcagttgccggtggaggagaaggccttggaatggcaggcggagctcgagaagcgactcgacgaggagcagtcgcggtctcaggctctcaacagcaacacaactgccgcatcgacgacaacatctacgagcacgcagcagcccacaacaattgccaattacaagctggcacacgagaagagcgcccatctgaagaagcacaacaagcagaagaagctcctccagctgcacatggagcaggagaagaaggcgatgaagaagctgcagcaggagcaaaactcgttgcagaccagttgagcgggcgcgatcgacggctagcagctgaaaaacaagcaaacatttaagcgaacattacctttaagacttgcccacaatgttgtaaataactattaataaaattaaacatcccataataaaacgtaat

SEQ ID NO: 369 - protein, 327 aa, DROSOPHILA
MLTPCLLLVATVASFSLHAQAIRVDWGTNTGPIAPPPPRTTPQPPRKPYRDPAPVWEDQSDDVPNPNPYVYVLPPPSRPRTWAIPAGPYAPPNYNNLPPKGNNYGQLASNSYSGGVTSVPGLAAQYVPGVGIKYTAIVSDKLQGKYNAKTKKYKAYEKAKYAYPWNYLDQVRHPRIANMPLTIPFTIILLHPHSHPHTHSCPCHNRMHHLVAVAAVAGGGEGLGMAGGAREATRRGAVAVSGSQQQHNCRIDDNIYEHAAAHNNCQLQAGTREERPSEEAQQAEEAPPAAHGAGEEGDEEAAAGAKLVADQLSGRDRRLAAEKQANI

SEQ ID NO: 370 - DNA, 2963 bp, DROSOPHILA
cccggattaagtcacacagaaacccaaattaattgggggtgccgtcgcataaaaatctttaattaaaattttcgacgtattttaaagattgtgttttgcttatatagaatctcccccgagtcatttcccaaatataatgcgtcttaaaagcaaagtcccagtagacagcaattaattccgtctagtctataattggatgatccgaactctcgaaacctcttgtctgatccgaaaatatcggaaggtagcccacgcttcttccgcagactttgtgattaaattgaaatttatggtttcatcacctctattccgaacccaaatccggcgggggtgtctcgctcatcacttgtccgactgattctgataagcgggctctttggacaccgcccagagctgatagcaaattaagtggcagccatatcagtgctaattgacacttattaaaacgcgaccgactgaaccgacactgcttgccggaacaaaggcaccagcacgtgccgccaattatcagccactcgagttgaggatatcacgtgacagccgatgtggctgcttcactgagtcatctgtcggataactttctcaaacttccataaacaatgcactaaattgaactttattgatacggtcgcataaaaccagtttgaattgccgccaaagccggacttaaccgctttgcaacactgccagtgttagatgttgtggttgtagagtacctcagaaataagctttcctcacttctttgaacatgtgtaatcgctgaattgtaatatcctcgcatgtatccaaattcatgatagagtattgcttgatgttgctaaaacacttcaatatttaagttatttgttagtaataatattcttgttcagcaatctggattattgtaagggccaagtaattcttatcaacttatctgtcaccagtaggaaccccctgtttgttggcagaattaaagaacattcgctctggtcacactgctccgtcaattggactgtgggggcgaaaataaaaataagaataatcatgtcaacgctgcagctggaattttcgcaggcaatgaccgactttaagaagatgttcccggacatcgaccgcgaggtgatcgaggccatcctgcgggcgaacctgggggccgtggaccagaccatcgacgccctgctggccatgtcgattgacaaccaggtgagtggaggcgcctgtgtatactaacgtctatgctgtactaacccactaacgaacgcagaacgagaaactgcgcaatgaactggatgctaatgtctcgccccagcagagcctcatcaacctgaacgactcggacagggacctgcagctggtggacaccacggacggcggaggagcgggtgcagtcggtgcacctggagcacccagtgcgctgttaccgacggccggtgcatcgccgaaccatcagaacacgggcgcttcgcccaagcagcgcccgctgggagcggccaacagcaagggaagcagccagaacaacacgcccaccaaacgcagcaggcgttggaatccgcccatcctgggtccactgcctgcgggctttctgcgcataacgcccgctcccgggcagcaggacttcgaactgccggacgaacagttcgccctgatgctgcagaacgaggagttcatgaatcagctgcgctggaatcaggacttcatgaacgccctcgagaaggagcagagcggcaaggctaagggcgaggacgacgcacccttccaggagcggctcaagaacatgggcaagatgtcgcgcaagaagttcctgcagatggcccgagtcttcacctggcagcgcaacaagaaggtgaccacggccaagcagatagactccttgccgctgcgcgaagagcccagcgacgacgaggatcaccaccaccagcagcgtgatcagcagcaagcgagccagtccagccagcagcagggtcaactgcagctgcgcaagtgaagcggatcgttttgttatctaatctcaacggccataacgtgacgatcacgtgcgctagtaatctccccagttccccagtccaaagtaatctccgggcaagaacgaaatctgaaatctcctatcccaatctcgacacaaagatgcgatggtattaccctagttttaaccttaagtgcaatttttaccctaccgtgcaatacccccatatacccatacatatattccttgtttgtatacgttttgtttaccctttcgttgttgccaaattagcgtagttaagttttatgcataatttgtaatcgatactaaggcggcctcttttaagccgcgattgctagagattgctagaaagccacactcactcacacgttcgactgattataaaaagcgttaattaacaagcatcacaccaggaatcggaggcgagtcccccagtatagcactttgcttagcccaaaacctagtcatgaagcggaactcgagccacttattgtacagtaatagaaactaccacgtaactctgtcttaaaattcactttctacattttaactgctggcgagcgattcgccggcttctacgaaaagcatgcattatgattgtatatctcaacccgcgaatctctcggaacttgcataccatatcagctgtggatacaatgcggttttactactcctacgccccaacttaactccgaatcgatcctatcgcagatcttacgctggattaacatgcgtgctataaactagcagaatattataattataaagacgagctatttgattgtaattgtatatgtataaatatttgaataacaaccttatataactattccaagtatcaaatacagatatttcaaaacttcaatgcaatcgtcttgtctttaacttctgaatgaactatgctaagaataaggcatacgctccacaaatgaatttatttaatttttattttgtttttgcatttcctttttaattttttataaacataatacatttatta

SEQ ID NO: 371 - DNA, 902 bp, DROSOPHILA
cgaaaataaaaataagaataatcatgtcaacgctgcagctggaattttcgcaggcaatgaccgactttaagaagatgttcccggacatcgaccgcgaggtgatcgaggccatcctgcgggcgaacctgggggccgtggaccagaccatcgacgccctgctggccatgtcgattgacaaccagaacgagaaactgcgcaatgaactggatgctaatgtctcgccccagcagagcctcatcaacctgaacgactcggacagggacctgcagctggtggacaccacggacggcggaggagcgggtgcagtcggtgcacctggagcacccagtgcgctgttaccgacggccggtgcatcgccgaaccatcagaacacgggcgcttcgcccaagcagcgcccgctgggagcggccaacagcaagggaagcagccagaacaacacgcccaccaaacgcagcaggcgttggaatccgcccatcctgggtccactgcctgcgggctttctgcgcataacgcccgctcccgggcagcaggacttcgaactgccggacgaacagttcgccctgatgctgcagaacgaggagttcatgaatcagctgcgctggaatcaggacttcatgaacgccctcgagaaggagcagagcggcaaggctaagggcgaggacgacgcacccttccaggagcggctcaagaacatgggcaagatgtcgcgcaagaagttcctgcagatggcccgagtcttcacctggcagcgcaacaagaaggtgaccacggccaagcagatagactccttgccgctgcgcgaagagcccagcgacgacgaggatcaccaccaccagcagcgtgatcagcagcaagcgagccagtccagccagcagcagggtcaactgcagctgcgcaagtga

SEQ ID NO: 372 - protein, 275 aa, DROSOPHILA
MFPDIDREVIEAILRANLGAVDQTIDALLAMSIDNQNEKLRNELDANVSPQQSLINLNDSDRDLQLVDTTDGGGAGAVGAPGAPSALLPTAGASPNHQNTGASPKQRPLGAANSKGSSQNNTPTKRSRRWNPPILGPLPAGFLRITPAPGQQDFELPDEQFALMLQNEEFMNQLRWNQDFMNALEKEQSGKAKGEDDAPFQERLKNMGKMSRKKFLQMARVFTWQRNKKVTTAKQIDSLPLREEPSDDEDHHHQQRDQQQASQSSQQQGQLQLRK

SEQ ID NO: 373 - DNA, 3377 bp, DROSOPHILA
taaccctcattgagcaaaaagtattaaatgtataaagaaactagttcatttaagtcattcctgatgtcactgtttgtaaacgtattgatatgctagttttgatcctattctttcaatgaatgtacaaagttcaacgttttcggttcgtttagtttatgtgcttgcctttgaggcaggttagtaaggatgtatggatagaacagtggacaggatgaaaaaacgccacaactacatttatttttcctactttaattaagtttgttacattatatgtatggcgcagatacaacgtaatcaattcacacatacaagtataaatacatacatgtaattctaactttatctaagcatacaacttatctttaagaacagcaatgaacagcaacataaaaatatagaaaactttatatataaaacatgccggtcaaatcaactgtgtgttgtgatatgaacttatttataaatccaaccaaaagacgagcagaagccctttaaatttatctgcttgactcagacaacaccgaaaaactctacccaattaagccccttatatcatcataggaagtagaagttggaaaatctaaatttgcggaactccaaaatgtttaaaaatgcgccctaagctaaggacaatttcatgcgattccaaacgaaaccaaaattacttaaacacacagcgagttgtatgcgtcaataaaaattacgagtaactacaaattacttaaattggtaatttattgttataacgattttatggaactgagccatccgcgctatcatatgtacatatatgtaaatccgtaaatttccacgctataaatcctttagtccatctaaaaatttatatgcttactttgactgtaaaataatttaattttcttttactgaattaccaaagcaatgggagcaaatggaaacaaaccccagtccaattcgttttattcacaacttcatattttattccaatgactatgaatcaacattctcggttataacatattcattccatcgtttccattttggtgggcataacattccacaggtcttgcaatttgtagccatccccaattggctccatggcaaagcccagctccttgcagtaaaccggagctctctcgccctgactgggcacctttcccaaacagccctcggcgaggtagctgttgagcttggtgttgatctcccgctcctgccgctcgtccagctcctcgaagttatccaccttgatctgggaggcctgcgcagcttcctcggaagccgcctccaatcgccgcctggcgtcattcgcattgtattggatgccaaagttgggatgctcgccgtaaactgtgtgcagcgagcttagctctttgaacaactcgtttagccgctcggcgggatcgacacggaatccgagcacatatcctcctcccgtttccgctgtttggattaccaaagcaggtccgtacttggactcccgaacgcgaagctgtaatgagaagctgctcgtgagtttatccttttgcggtctagatagattacactctcaatctgtagatatggtagactgatgttgaaggtctcgttggcatctgcaaaccacaccagccgaatattggttaccacgaagctgcccaggttgccctggtcgctagacaaattccacacgccctgcacatggctaaagacctcctcatctggtaggataaccagttgacccgcttgaacgatggctccgcgcagcttcaggtcgcggtagagataagtacgctgataaaggctgagtataaacatcaattttaaggacacttttgaattgtactgatccggatttcctcactgatatacgtcgaacacgctggcgaagatcggctgatcgcgacgcgacgtttccccagatacgtcggtgaaaaggaactcaaagcgggtctcgttgcttaccgccaggatgtagagggcctggctggctatccttgctttggagtgcatatgaactacccgagtgttggtgttgccaatccgagcatagccaatggcttcttagggaaatgtaatttcaagttcattgggatggtagcagaactgcaagaacttacacagattgtacttcttgtggaccagcgagtgccatataattcgcaaattggttaccatcaggcgaccagtgtcccccggatttcctttgctgtcttcgatgtggtaaatgtagtcgagcactcgttctccgctccgcaggttcttgtgcctgaaacgaatctctccaattgagggtccaaaaaccaattaaattagcgtctacttacagttgaggcacatcaaatttgacctccttgtcctcccagagcaactgcagcacgggctgttggtttccttcgatcggagctagcgactttaacatttttccgagacaactaacgtctttgttggggtgcaaatccactggttaaacggttgctaggcaacctttagtccaggaaccaattccaaaaccaagaaaacataaattcccaggccgaatgcgaaatgcttaaaccaaaactcaaacagccaattaaaaatcgatgtacagatgtttagattattgagaaagtaaaattccaaagaacaacttgaacttaatatgaaatcaaatcatgaaattaggaaatacacaacattttaaatcccaccatcggaagaggcccaataataaaagcccaatcttttaattttttaaatacgtatgtaatatatttgactaacgtatagaattttaggagtataactaatgcttcgcttatcaaagtacaaaaacgttcaactaacgcgattaagcttaaactataagtcagtttttcccccttcgccagggaaggagaaagagctggcgtttataaatagttagcaacgctaactgctggaaatgttattcttttttttcatagtgtcaatattgcaaatcgtaggtgagagcagttcagcaaaaggcacctttatagaataccgaaacggcggaactgaacaaaaatagattgtatttacaatttatgatttgggccaccgcctcacataatgatctgcggttctgggacactggccgcaatgcttttatggggcaagacctggcctccattaatgtagagctcatccttcacgattacatcctcgcctagcacggtgatgccttcgatgcgaacccaacggccaactgtagaacgccaaccgacaatgcaggagtccagccatgagtgtgagcgaacgatggcgcctttgaggatggtcgagcgcttaatgcacacgccatcctcgatgaccacgtccggtccaatggttacattaggccctatgcgacaaccctcgccgattttggccgtgggatccaccaacacgttgcccaccactccagggcctgtgtacag

SEQ ID NO: 374 - DNA, 1146 bp, DROSOPHILA
atgttaaagtcgctagctccgatcgaaggaaaccaacagcccgtgctgcagttgctctgggaggacaaggaggtcaaatttgatgtgcctcaactgcacaagaacctgcggagcggagaacgagtgctcgactacatttaccacatcgaagacagcaaaggaaatccgggggacactggtcgcctgatggtaaccaatttgcgaattatatggcactcgctggtccacaagaagtacaatctgtccattggctatgctcggattggcaacaccaacactcgggtagttcatatgcactccaaagcaaggatagccagccaggccctctacatcctggcggtaagcaacgagacccgctttgagttccttttcaccgacgtatctggggaaacgtcgcgtcgcgatcagccgatcttcgccagcgtgttcgacgtatatcacctttatcagcgtacttatctctaccgcgacctgaagctgcgcggagccatcgttcaagcgggtcaactggttatcctaccagatgaggaggtctttagccatgtgcagggcgtgtggaatttgtctagcgaccagggcaacctgggcagcttcgtggtaaccaatattcggctggtgtggtttgcagatgccaacgagaccttcaacatcagtctaccatatctacagattgagagtcttcgcgttcgggagtccaagtacggacctgctttggtaatccaaacagcggaaacgggaggaggatatgtgctcggattccgtgtcgatcccgccgagcggctaaacgagttgttcaaagagctaagctcgctgcacacagtttacggcgagcatcccaactttggcatccaatacaatgcgaatgacgccaggcggcgattggaggcggcttccgaggaagctgcgcaggcctcccagatcaaggtggataacttcgaggagctggacgagcggcaggagcgggagatcaacaccaagctcaacagctacctcgccgagggctgtttgggaaaggtgcccagtcagggcgagagagctccggtttactgcaaggagctgggctttgccatggagccaattggggatggctacaaattgcaagacctgtggaatgttatgcccaccaaaatggaaacgatggaatga

SEQ ID NO: 375 - protein, 381 aa, DROSOPHILA
MLKSLAPIEGNQQPVLQLLWEDKEVKFDVPQLHKNLRSGERVLDYIYHIEDSKGNPGDTGRLMVTNLRIIWHSLVHKKYNLSIGYARIGNTNTRVVHMHSKARIASQALYILAVSNETRFEFLFTDVSGETSRRDQPIFASVFDVYHLYQRTYLYRDLKLRGAIVQAGQLVILPDEEVFSHVQGVWNLSSDQGNLGSFVVTNIRLVWFADANETFNISLPYLQIESLRVRESKYGPALVIQTAETGGGYVLGFRVDPAERLNELFKELSSLHTVYGEHPNFGIQYNANDARRRLEAASEEAAQASQIKVDNFEELDERQEREINTKLNSYLAEGCLGKVPSQGERAPVYCKELGFAMEPIGDGYKLQDLWNVMPTKMETME

SEQ ID NO: 376 - DNA, 5048 bp, DROSOPHILA
ccaactagaagcccacttatccgttatccacttatccactacttactatccagtccacaagcccatatccattttccatttaatgcgtttaacgccatctacagctcgtaactgcagtattgttttatcccatcataacttatattttatatacttgcaagttgcaacgctaccacagtttttgaccaaaatatatttcagacaaaaatttcgccacgttccagcaatttatcataatttttcacagcatttgaatatttcgaacccgagtcaaccatattaaattcattcctttaaataccttttcattcaatctcattgcatccaaatatattcctgttgataattgtgtgtacatttcctttgacacatctattaacgcgatacaattactatacaatttacagataaaaattataaaattcataaaattaaattgttctgatgcgccttttgatttatttaattaaataattaataataaaatttagttagtttagttttgcatatagcaaaagtaataaatttgtatccgcctaaagggtgaatgatcccttaaacatcaagtttgaatttctatacctttcatatttttatttaaataagggcatatgtttggtattagctaacaaattgcgtattcgcaatatcaaaaactagaacactatgaccttttttccaattttttttgtatataatgatgttttctaactatgcagatgatacagctgaagcacaaaaccctaaaattagtgtatggtaaatctaatccgcatactaagatatcaaccaaatttgaacttccttagatagccgtcagcacattataaccaattttcttgagcaaatattccaatttacgggtagagtcatgtgtactattacatgacatgacgactggatagttgatttttgtatatgcaaagatttcccatgttacggcgttgtaaaattgataaaaatggaagaaaagtattctccatcgtaaatttctatatgtacatattcaagaattttttattgatttcacagggtgaatacgactctacgcaatgcaaataataataattgatgattaaacttatgagttttattatcatcggaatctaggacattattgacccagacaaatgcgcagagtttacaccatatacatgtacaatttaatacttggttcatagcattggagtgtaatttagagttaaatacatatatatacataagactaacgaactacaatctaagggattaaggcctagtccacgtagaattgctctacaggaacattcttcaggagctggttggcgagtttgccgaactcgctagccaattttttctgcaattgagcctgcatagcctccaaaacgacttgagagttttcccgcagaaacagattggtggcctccactgtgaaataagaaacgatattgaaatctcacattttggcagggaattaaggggacacttacgcagaattcgattgttgttgaaggcacctgagatgctcattttcacatccttcacatccagaaccaagctgagagcatcgatgtggaggtagttagcgcccttgaaggcgtgaatggatgtctttcctgtgagatcggcactcacaccctcgaagttagcatggaagtccccacctccggaggcgggcaggatcagcaggaccccggagctcgtgtatttagcctcaatctttagcttgggcatcacgatcttcgccttgaagggctcgcttccttcgctcagtttcagggatgtcaccttgaagttgctggccccgaaggcctccatgttcttcagcgtgatcttatacccctggggaccctctgttaactgcagggcaagggtgtccatcttaaagggctccacagagggcagctgccaagggacgagacagtgggattaaacgcgtattgcaaacattttaacgttttaatttgggctttgacctgagtgtgcaattatcataaattcatcatatcatgtgattcggtaatggctttcggtgggattcacccttacaacaaagtttgtttaggagaaaataaattgacaatctgcctaatgaccttcaaaggggttcattttgtgttcattgttgcaccactgtgcggaaagtgaacgtcggatttttcctgcgaaaacactcattatgcaagtgcgaaactcacaatgactttcattcgagctgctcttacgcaactcaaaacaagttttcaaagaaatcacctctggcactcataggagaaaagtcactcacctgaatatcaggaatgccattggccaaatatggctttaggtgttcaatagctccgataaagcagtccaccaatttcgggtcgttcctatgacattgtttaatatagggcgctgtaaaaaataatgcgaaaatttgtagttggttataatcatagggcataagtcgtcacccctaaaagttctaatttatgagtccaaaaaacaaacaaatagatttggtttgctagttctcacggctttagcaatctggaaattagcaaacaagatggtaggaggtgataaaaacaaataaaaaaatatcaaatattcattgatttgttaatgtttttcagcgcagccggaagaaaacactcagaattgccaacaaaacggaagatcaacaccatccgccgattcaattcctgtaaagttcatcgactctgcagagactctgctcagtgcaatcgcgatgccgcagtgacctccaaatccgatcgagatcaaaatcaagatctcgagtcggcttagtttcgatggcaaggctgccacggagtgcacgtctagaacctgttgtggccgcaattctgtggcacatgacacacattcgcggccagagcgactattatttatgtatagctggtttatcattaacgcggacttggtgcctgggcagtttcattagcgccattcgatggcaaggcgagctgcagcggcagcgattaagatttcaagttgaaggctgaccaacggccacggcgagtcgttaattaagtatggatttggttcacagtccgcattttgagcgcttacatttgtgagctcagcgtgtttcgagtgcgatgcggaagcaaacttcggctaaaactcatcggctgaaatgccggccgtttgtcccccttttgttttgtttcttgcatttgcctaacaaaaccatgtcgcctcacgcaattaacatcccgtcgagtgctttggtggaggggggggggggaggagagagaaagagagaaaaggctgtaaacttgacatttgacatattccaaaagatgtgatggcatttcgcaaacgctccacagcaagtgtgagaagcgaacgaaagtgctaattccactttatacgagtagaatgcgcccacaactaagccctcttggcaatttatgagttcgacaaaaatcctggcgatcagtttaatacgcaataaattaggtaagtaatatacgcctgtgtatatttaagtagagactcttgttaatataaagacacaaatcgaaccagagaatttgtaaaaaatctgaggcttattcaatgagccatgggtcgccgaactacgccgaaaagctacgtttttcaggtcaccaacaacaatttgcatttttaaatattctcccaaaacaatttgtaatcatctggctcagtaatttgttgtatttactgcacttcgttagttcagactattagtcattcatcttcaagctaataacaatagatcaaagtctccttccattaacaggccaatcatggcagcactattattcagcggattctaattggcagtactaatcttttcactaatcattttcttcaccaccaccgaccgcttaagagagacaacttacgggtctcggcctgcaccatccgcaatgcttggatcacgattactaggcacaccgctttattcatttcactcaagaacaacttccggatatgaatctcaatctgcagcagcacgcaacgaagtcggaatctgaagctatcaactttctgcgggtggagtgctcgaacgtccgtcgatgcgaagctgagaacttaaactgcgagctgcttgccggtcgatagccgattttaaagccccaaagctgctgatcgcagatggcagatcgcagaaacgagatgcaaaccaagccgatctccatcccgccgtcgacgtcggcagagaacttagagtctgccgatctgggcagatacatatatatctatatatgtatatagatatgtatatatagagttggaatctgcatgggctactgactgactgactgaccgaatgtaaagctgtcttcttggcttctgtgcaagattttggtttgtttgcccacttgtcgagtggcataaaagcaattaggcaactctattttcgcaaccgcctgcctgcagaggtgcagataaactgcacatttggtcaaccttcggccgtgcgaaccctgatcgcggcttgcgaaagaaatggataacttctaattgctcgtgagcagaacccattcgaaatgaaatattcgcggagcaaacctatttatcttttaagccataaaacgcatcaagcgagtcgcttccttttattccaataaccttgggatacattgaattcgagtcttcttaaaaccgtaacgaggcgagccgcgtttacctgttttcgtgaaaatgtctccgtcgctaattaaaaatgtgtgtggcgctttaattgtccattagagtgagataatagttgtgtgcttatacggcgagaacagaaattagatagccctgactcttggaataccctgttcagcgtaatacccctcaatttgaaatctatatcagggagaaaaatgtccaatactcggacttcttttagccagagctcttaattatagaattcttatccattctttcatgtttgccgactaatatcattcagtgtgtaaattgaactcacagcccaagtgattggttgtttacctccccccagccaactacccactgactaagcttgcaatgttcccctagacttgtagaatgtttgcttataagcagtggatttaaatgcacag

SEQ ID NO: 377 - DNA, 1123 bp, DROSOPHILA
agttctcagcttcgcatcgacggacgttcgagcactccacccgcagaaagttgatagcttcagattccgacttcgttgcgtgctgctgcagattgagattcatatccggaagttgttcttgagtgaaatgaataaagcggtgtgcctagtaatcgtgatccaagcattgcggatggtgcaggccgagaccccgccctatattaaacaatgtcataggaacgacccgaaattggtggactgctttatcggagctattgaacacctaaagccatatttggccaatggcattcctgatattcagctgccctctgtggagccctttaagatggacacccttgccctgcagttaacagagggtccccaggggtataagatcacgctgaagaacatggaggccttcggggccagcaacttcaaggtgacatccctgaaactgagcgaaggaagcgagcccttcaaggcgaagatcgtgatgcccaagctaaagattgaggctaaatacacgagctccggggtcctgctgatcctgcccgcctccggaggtggggacttccatgctaacttcgagggtgtgagtgccgatctcacaggaaagacatccattcacgccttcaagggcgctaactacctccacatcgatgctctcagcttggttctggatgtgaaggatgtgaaaatgagcatctcaggtgccttcaacaacaatcgaattctgctggaggccaccaatctgtttctgcgggaaaactctcaagtcgttttggaggctatgcaggctcaattgcagaaaaaattggctagcgagttcggcaaactcgccaaccagctcctgaagaatgttcctgtagagcaattctacgtggactaggccttaatcccttagattgtagttcgttagtcttatgtatatatatgtatttaactctaaattacactccaatgctatgaaccaagtattaaattgtacatgtatatggtgtaaactctgcgcatttgtctgggtcaataatgtcctagattccgatgataataaaactcataagtttaatcatcaattattattatttgcattgcgtagagtcgtattcaccctgtgaaatcaataaaaaattcttgaatatgt

SEQ ID NO: 378 - protein, 246 aa, DROSOPHILA
MNKAVCLVIVIQALRMVQAETPPYIKQCHRNDPKLVDCFIGAIEHLKPYLANGIPDIQLPSVEPFKMDTLALQLTEGPQGYKITLKNMEAFGASNFKVTSLKLSEGSEPFKAKIVMPKLKIEAKYTSSGVLLILPASGGGDFHANFEGVSADLTGKTSIHAFKGANYLHIDALSLVLDVKDVKMSISGAFNNNRILLEATNLFLRENSQVVLEAMQAQLQKKLASEFGKLANQLLKNVPVEQFYVD

SEQ ID NO: 379 - DNA, 4048 bp, DROSOPHILA
ccgagaccacaggcgatgagggcaccttgggcgagggtatttcgaagccacgtcgcggctctttaaggctgatcttgggtggtggcgtaggcaccgttttgctgaccgtctttggcagcactggagcagcgggcgctttcatcttattcacagccggcttggcagacttgttggtctcttcgttgaggatctcgtccaggatcttctgcatgtcatagtcgaatttcatggatgtctccacgatgcggcgctcggagacggcatcgcccaccacgctgcgcacctcgtccacgcaggagctcagcttggcctgctcgatctcgtccagttgcggcatttggaagctctcggagtcgcggcgagccttggcgaaggcggcgtcctcgtcctcatcctcgtcggcctcctcctcttggatgtccttgttcttgctgatgaacgccgagatgctctgctggccacgagcccgatcgtagagccattgctgggcatccgtgggcgagatgcagtgctcgtcctccacggagtgcccgtagatgtcgtcgtagccgtcgtactcatcattgtagtccatggtgcgcactatcctgtgccgcgacattttggaggactctgtatttcacaatttacggagcagggtcagaatttcatcaaaaataataaaggtgcgtgcaggtgtggctgcctttttagaggtttggtattttgcggcactttgaccaggagtttttagtacaatagtacggttagaaggtattgccactagcggagaggcgactgttctgatttgcttcatgtatcaatcaattgacataagaatctaataatttgttatttttaaaatctgcacatttttcaaatatgttataaggtcgaaagaaggaacaacattggtgcaagtgtgaaaccgtttaagcataattgatgcggccttgtgtgaacaatgatgtgtgcttaaatataccaagcaggctggcagccacccccacacagtatttaaccacccccgaggaacggtcacattgctgcgagtctgaatatttttttgctttgtgtcgcgttttaatgtgaaaagaaaaacactttttccacggttacgggcgcagaaatcagtgcaaaacattgcgaatacggagtgcccgaaaatgcaggcggggcagcactaagtcggagccgcatctcccccgatttccgccgtgctggcagccaacgttggcagcccgaatccgaatctccagcgcactcgtttattattaaacaacgggcaacggaaacagggaaagaaaaacgcagagaatccaagccagaaaatatgtacaacaacggggccaggggcttctccattcacgacgccttcgaggaggagaccgacgaggcgatacgcgtctatggctccaccgtgatatccacgcccatgagaggcaagcaaggtcgctccaccgaagacgtctccatccggattcaggaccccaagtgagtgggctaggctcgttctctggtgaaaacaggtcttctttgatctatctgcctgcgtgggcagcgattactggcaccattttcgtcgccaccgcggccgccgctgtgtgccaaacaaggagctccattcccattcccattgtgactgtgattccggttattgttgtgtttatactatgtgtacatcgtacaattgtacgttcgaccagctgggcatctggtgttctgcgggctggccacttccttattcccgccggaagcacctgaataagttagccgagcggcgcgtgcgtgatggataccatgccttcttccatcccattagccatgcatggcgtgtcgcaactgcagaaacgacgtgtaattatggggattataaatgcagacgtccagcctaatttggcattcaattgtaaaaatcattgcgcataaatttcgtcataagggtctctgctgtttctcgcgcggatcaagagcaggagaaggaggaggaggaggaggaggaggggggggggtggccttcgcctgcggtcagctggaaccagttggccagcccagcaagccgaaaccagccagcagctcatcgcagttcgcacttgtcgggcttctcttgccaatataaacgagtggtaaacgcgaatttgattgcgcctcgcctttggcggcaatccaaccccgcgataaccccgcaaatggttgataagggtcttaaagtccacattcaacaaagtggaaatgccgagtgggcgcttaagcctcaaataccgctcaaatcaaatttgtagactgctatcttagctatcttatgaccaaatctaacgaaatcatcaccaaaccgcgataaaccacaaaacctgttttagaagaagccaagtaatcttctgtaggcaatcgaaaaataatcttaaaagcctcttgaaaaatgctatttagtgtattcaaatattatgtgtttattttatctaattgagctttatcagaaaatgattatctgttgtacaatagttgttttaattcatagttgaatttagatatatgtgttttaggatatgtcttacaccaaaaactgaatacaccttcggctgaaacccttttcccattttaagcgagtcttgaagtgggtcaacaaatcggcgttaaaaaaccggctttaattatacagcacccaaggctatgaaaggcaccatcttttaaccgcttccccacttctgtctccccaggggctacaacaagtatgccgaggacacaacgtcccgggacagcgactcgctcatccaggagtacggcaacctgcccacggaggagaccaacacatactgctggcggcatcccaaggtgcgtgagaactggcgcacagtgctggccgcctttacgctcctggtcgtgggcacgggcctctttgtgatgggcacctttgccatcgcggatccgcagaacacgtcgcagggagtcgtgttcttcgtagcgggactcatctgcttcatacccggggcctatcacgtcgtgtacatctggctggcagccaaaggatatcgagggttcgacttctatcacctgccgctgttcacataagcgtaagcggacatctggacagtcgagctggttgatccatggacgaagagagtgggagaagccccatctataaatataaatctgtgtttgtttatacccgacccgtataaacaacttattttctacattgtaatcgtaattaactcgaaacttggtttgtgtaacgtactttttgtgtttagcggcaaaaaatttcgtttagacaaatatcccttacccctgaaatccgaattgaaatctagcaatatatagattatatattttacaatattttctattatgtactcggtaaagtgttttttgtatgccccttctccaaaaccgaacccaagaaagcgaaaaacattcatacgtacactcgaaattgatttaaaaacaaaaaaagagaagaaacaaacgaaagactttgtatatgatgctaacatgttgaggaagcagcgctagagttataacgtatactatatataaattgtaatttattgaaatttaattgcaccaaaaacgccgcgaggcgtgcgaaaatgttttacgattttcaaaaccaacactcaagaaactaaaaagattaacaaccgtacacccacgaatctatgtatgtatatgattagtgagcgtctgtccagggatgcgccttaaagaactagatctagaccttagtcaacgtcgaattatgattatgattatgttaaagcctaatggcaatgcagcgaggactcctcgagcaaccattataataccaagctactagtgatgtaagacgatgcgccgatattgcaatacgttcttttatagctatagtgatgacgcgtctcttttccgctgacctttaaccccgtcccctaatgaaattacatctcacactcacactgatttcatttctgataactaatcactcacacacctcatcagccgcttagttgttaatgtcgtataatttcattttaagaatgaatgctgaatatggttgtattaaaacgaaaacgattatcacatgcgaaaa

SEQ ID NO: 380 - DNA, 825 bp, DROSOPHILA
ccacccccgaggaacggtcacattgctgcgagtctgaatatttttttgctttgtgtcgcgttttaatgtgaaaagaaaaacactttttccacggttacgggcgcagaaatcagtgcaaaacattgcgaatacggagtgcccgaaaatgcaggcggggcagcactaagtcggagccgcatctcccccgatttccgccgtgctggcagccaacgttggcagcccgaatccgaatctccagcgcactcgtttattattaaacaacgggcaacggaaacagggaaagaaaaacgcagagaatccaagccagaaaatatgtacaacaacggggccaggggcttctccattcacgacgccttcgaggaggagaccgacgaggcgatacgcgtctatggctccaccgtgatatccacgcccatgagaggcaagcaaggtcgctccaccgaagacgtctccatccggattcaggaccccaagggctacaacaagtatgccgaggacacaacgtcccgggacagcgactcgctcatccaggagtacggcaacctgcccacggaggagaccaacacatactgctggcggcatcccaaggtgcgtgagaactggcgcacagtgctggccgcctttacgctcctggtcgtgggcacgggcctctttgtgatgggcacctttgccatcgcggatccgcagaacacgtcgcagggagtcgtgttcttcgtagcgggactcatctgcttcatacccggggcctatcacgtcgtgtacatctggctggcagccaaaggatatcgagggttcgacttctatcacctgccgctgttcacataa

SEQ ID NO: 381 - protein, 170 aa, DROSOPHILA
MYNNGARGFSIHDAFEEETDEAIRVYGSTVISTPMRGKQGRSTEDVSIRIQDPKGYNKYAEDTTSRDSDSLIQEYGNLPTEETNTYCWRHPKVRENWRTVLAAFTLLVVGTGLFVMGTFAIADPQNTSQGVVFFVAGLICFIPGAYHVVYIWLAAKGYRGFDFYHLPLFT

SEQ ID NO: 382 - DNA, 4417 bp, DROSOPHILA
ggggtcaggacatcttgcagacgtggtgggtcaaaggctcctgcgggtattccaaccggtcactgttcccaggtaagtcggaaaaaacacaaatggtttacttaaattacggggctaagaaagaaatgaaaatgcgcataaaatttttatactttgtcgaatttcacgagcgttccttcccatcgattcatctgtgcactttgcagtcgacgcttgcggaataaaatccactgcccctcaattcctcaaattaagtaaagtgagtaggggaatccccttttccatttaaatttgcataagaggcatcggcgaaagcggatgaggatgcggatgggttgcagtgtaattgggcgaagtgaaattgcgttaatatttaacaagccagcgaaagtgcaaaagcgaagcgcattaaatgcggaaaagggatacggaaacgtagtccttcggggcaaagtgcgaaattatgcggagttcagggagatccgcaagccctttcctttgcgagcacggacctcaaatgttaaatgttagccataaggtcagccaaatgtgaaactcgagccgtgaaagcgaaatgtttgaccgcgaagagcagcgctgattttgagtggtaatttcatttctcattatcgtcgttatggtaattcaataaaatcatgacaattcaaaatttcgtgcccggcatgcgattggaatctgattattgcaaattcaatttatagtgctataaatataaaaaatttacaaaagatattaaacatgaattttaacccatataatatagtacagttatacataataataataaaatccgcaaagatctatttatcgtaaatttcaaacatatacgatattcaaatattttggcgccattacaggtactgaaaaataccaaaaataccgtaaggtaactatcgatgacggcgatcagctgtgatcatcaatggcgaacagctgatctggctcgcgaattttcatcttgttgttggactttctgttgtggactttgaaacgtcgcctctcgagtttaaacaacaaaagttactcaatttggaaagccatcgagtggatagccatgtttcggacccgggtgcaccgcaatctgtcgtggatatcgacgaactcgtcgaggacaacgaccactcatggccagcactaccaatacctgcaatgttccaagctgccaacgctgtactttcagcgctccttgccgcgattgcccattcctctgttggagaacagctgtcggcgtttcctggaggccaccaagccactactctcgccggcggagcaggcgcagacccagcaaacggtggaacagtttcgccaggggatcggcatggaactacacgcgaaactcaagagccatgatgcagagaacaagcataccagctacatctcgcagccctggttcgacatgtatctagccgatcgagcgcccctgccactcaactataatccgctgctggtgatgaaaagcgacgcgcgaccggagtaccagcaacaggtggttagggctaccaacctgatcatcagctcgttacggttctggcgatctctgcaggcggatctcctggagccggaggtgtaccacatgaacgccaagaagagcgacacttccagctaccgcaggtggatgaaggtggctcccaaagcctttgccacctacgcgtcttatgccttcaaggcctttccgctggacatgagccagtacaaccggttgtttggcacctctaggattcctaggatcggcaaggacgagctggtccagtcaccggacgccaagcacattctggttatgcgccgcggtcacatgtacgccgtaaatgtgctggactccagtggatacatcgagagtcccagtgtgattctgggcagactaagggctgtgcttaagcttgatgcagatcgcgaggcagccagcgtgccacttggtgttctgacctccggacagcgtgatgagtgggccaagacaagacagcattttgttagcaacaccaaaaatgccgatcttctggagagagaggtggatgcggctctgttctgcgtttgtctggatggcgaagaagatggagtctttaacgaaaaccagcaggagccgctgctcaagcatttgctggcgggaaaagcgcagaatcggtaagaagtcgacattatgtaaagcctgcctgattcacaaaatcatcctgttctgttacagttggttcgacaaatccatttccctgcttataagtgcagatggaacaacggctattaacttcgagcactcgtggggcgatggagtggctgtgcttcgctactttaacgagctctacaaggatactttgaagcagccgtttgtatccacggagacagtgcacactcccgccgaaggcgattttagcaacgtgcggcccatcaacttcgaaatcgacgatgccaccaagtcggccgtttcggaggcttataataaaaacgccagcattgtagataatctggacatgaatgtgctgaagtacccacacatcaacaagcccacatgcaagcagtatggcctaagtccggactccatcattcagctgtccttccagctggcttatcgccaagcctacagcggctatgtgggcagctacgaatcctgcagcacatccgccttccgacacggacgtaccgaaacgatgcgaccgtgcacaaatgccacacgggacttctgtgaagctatcctccagccggagaggagcaagcccagcgccggagaactacgagcaatgatcgacaattgcagcaaggtgcatggccagttaaccaaggaggcggctatgggccagggcttcgatcggcatctctttgcccttcggcacacggcccaaaaggagggaataccaattcccgatctctatgagactgaggcttacaagcgcattaataacaacatcattagtacctcaacactgggttcagatgccctgctagcgggttcctttggtccggtggtcaagaatggcttcggaatcgggtaagctgactgcctgtcgagattgggtatttgaatgtacaaatgcagcacctatttttcaagttgcctcgacaaattgttcactagctgacagttgataacccattattctttcagctattcgattcagaacgattttgccggcgccattgtcaccacgtacaaaaaccaggccgatgggaaggtgttcatagacagtctggaatcggcatttgataaaatttgcgctgtcatccagcagagcagcagtagcaagaagtaggagaaaatcgtgaggagtccgaccccgaatccaatgaatatggctttaacgtaacagggagatttattttgatgcttttacattgtatcccatgtgtctgaattgcaatatctttatctacaatttatagattatacactgaaaacattctaccccatctaaagcatctgtgtctttgcttttatacccgctgctttaatggcttttgcggctgatgggataataaattggctaacatattgttgggatgctgctggcttgacatttgcaattgaatacgagaaataactcacgttttaaaacaatgctgaaaacaactttaaagtaaagagtttaagaagtttatattaaaattgaacatagagttatgataaacgagctgaagtaaaatcgaataagagcggttgaaagcatttaagattattttgcgtaagaaaatgttttttttttaagaaaacatctttcgatcctttgttttcctaagtaaaatcaacacacagaacgatgtatggcacaaacccttttgagttggtttaactattgagtctccttttaagcatgcgtaaactttgacctttcattgtcacttaagttaaacaagatgtgtgcccacgcacaccctgttcccaacttgtttatcccggaataagtgggggaaaaacccttgcattaaacagtttctgattaaagatttcccacacgctgacccagaaaacttggccaccaacccttcgggccaagttgttgcctttcgatttgtgtcagccgcacacgtcaatcgcgaactccgcctaaacatggcgaaaagtttatcaaaacgttgcctttttggctgggaatggggatgtcgctaaatgtgctgacgttatcagttgatttatcgtcaaattttgtgccaactggcgtggcgttgtaaaaattaattaacttgctcgccgagtcttcctgatacgtacacgattccgccttaatgggcggcattaaaaattaaaaaaggagacatttacgcggcggagaggtcattaaagccaagtagactcttctgccagtggcggacaattaaaaacatattaaactgacgtgctggaaaggatgtgcatgtggatgtggctgtggctgtggatgcgcagtctgtgtgtgcgaggatgtgggtcgatgat

SEQ ID NO: 383 - DNA, 2239 bp, DROSOPHILA
tggactttgaaacgtcgcctctcgagtttaaacaacaaaagttactcaatttggaaagccatcgagtggatagccatgtttcggacccgggtgcaccgcaatctgtcgtggatatcgacgaactcgtcgaggacaacgaccactcatggccagcactaccaatacctgcaatgttccaagctgccaacgctgtactttcagcgctccttgccgcgattgcccattcctctgttggagaacagctgtcggcgtttcctggaggccaccaagccactactctcgccggcggagcaggcgcagacccagcaaacggtggaacagtttcgccaggggatcggcatggaactacacgcgaaactcaagagccatgatgcagagaacaagcataccagctacatctcgcagccctggttcgacatgtatctagccgatcgagcgcccctgccactcaactataatccgctgctggtgatgaaaagcgacgcgcgaccggagtaccagcaacaggtggttagggctaccaacctgatcatcagctcgttacggttctggcgatctctgcaggcggatctcctggagccggaggtgtaccacatgaacgccaagaagagcgacacttccagctaccgcaggtggatgaaggtggctcccaaagcctttgccacctacgcgtcttatgccttcaaggcctttccgctggacatgagccagtacaaccggttgtttggcacctctaggattcctaggatcggcaaggacgagctggtccagtcaccggacgccaagcacattctggttatgcgccgcggtcacatgtacgccgtaaatgtgctggactccagtggatacatcgagagtcccagtgtgattctgggcagactaagggctgtgcttaagcttgatgcagatcgcgaggcagccagcgtgccacttggtgttctgacctccggacagcgtgatgagtgggccaagacaagacagcattttgttagcaacaccaaaaatgccgatcttctggagagagaggtggatgcggctctgttctgcgtttgtctggatggcgaagaagatggagtctttaacgaaaaccagcaggagccgctgctcaagcatttgctggcgggaaaagcgcagaatcgttggttcgacaaatccatttccctgcttataagtgcagatggaacaacggctattaacttcgagcactcgtggggcgatggagtggctgtgcttcgctactttaacgagctctacaaggatactttgaagcagccgtttgtatccacggagacagtgcacactcccgccgaaggcgattttagcaacgtgcggcccatcaacttcgaaatcgacgatgccaccaagtcggccgtttcggaggcttataataaaaacgccagcattgtagataatctggacatgaatgtgctgaagtacccacacatcaacaagcccacatgcaagcagtatggcctaagtccggactccatcattcagctgtccttccagctggcttatcgccaagcctacagcggctatgtgggcagctacgaatcctgcagcacatccgccttccgacacggacgtaccgaaacgatgcgaccgtgcacaaatgccacacgggacttctgtgaagctatcctccagccggagaggagcaagcccagcgccggagaactacgagcaatgatcgacaattgcagcaaggtgcatggccagttaaccaaggaggcggctatgggccagggcttcgatcggcatctctttgcccttcggcacacggcccaaaaggagggaataccaattcccgatctctatgagactgaggcttacaagcgcattaataacaacatcattagtacctcaacactgggttcagatgccctgctagcgggttcctttggtccggtggtcaagaatggcttcggaatcggctattcgattcagaacgattttgccggcgccattgtcaccacgtacaaaaaccaggccgatgggaaggtgttcatagacagtctggaatcggcatttgataaaatttgcgctgtcatccagcagagcagcagtagcaagaagtaggagaaaatcgtgaggagtccgaccccgaatccaatgaatatggctttaacgtaacagggagatttattttgatgcttttacattgtatcccatgtgtctgaattgcaatatctttatctacaatttatagattatacactgaaaacattctaccccatct

SEQ ID NO: 384 - protein, 667 aa, DROSOPHILA
MFRTRVHRNLSWISTNSSRTTTTHGQHYQYLQCSKLPTLYFQRSLPRLPIPLLENSCRRFLEATKPLLSPAEQAQTQQTVEQFRQGIGMELHAKLKSHDAENKHTSYISQPWFDMYLADRAPLPLNYNPLLVMKSDARPEYQQQVVRATNLIISSLRFWRSLQADLLEPEVYHMNAKKSDTSSYRRWMKVAPKAFATYASYAFKAFPLDMSQYNRLFGTSRIPRIGKDELVQSPDAKHILVMRRGHMYAVNVLDSSGYIESPSVILGRLRAVLKLDADREAASVPLGVLTSGQRDEWAKTRQHFVSNTKNADLLEREVDAALFCVCLDGEEDGVFNENQQEPLLKHLLAGKAQNRWFDKSISLLISADGTTAINFEHSWGDGVAVLRYFNELYKDTLKQPFVSTETVHTPAEGDFSNVRPINFEIDDATKSAVSEAYNKNASIVDNLDMNVLKYPHINKPTCKQYGLSPDSIIQLSFQLAYRQAYSGYVGSYESCSTSAFRHGRTETMRPCTNATRDFCEAILQPERSKPSAGELRAMIDNCSKVHGQLTKEAAMGQGFDRHLFALRHTAQKEGIPIPDLYETEAYKRINNNIISTSTLGSDALLAGSFGPVVKNGFGIGYSIQNDFAGAIVTTYKNQADGKVFIDSLESAFDKICAVIQQSSSSKK

SEQ ID NO: 385 - DNA, 3581 bp, DROSOPHILA
tttctttttggtcacgttcgaattcgaaaaaccatcgatgcagttgagtttagcacgcccaacaaacattgaaaaccaactgcaaacaacgaattaccccatagaaagagacaagctggagataaaggaagttattagacgtctgcggtttgtctgtctggtcgagtgcaattttcccgagactcgcttttcaggctctgcatgcatgactcacggccaagattttccatcgattcgattggtatgggccaagttatcacgtgccgacaggaaagttttcatcgtcttatttactgggttgggctcgtagtatgtttgttctgctcgggccgactctctcttttgttgttagcattgttgtgttaatcgattccacttttgccttggactcgaacttcaacttccaactcccataattgagtcttattctctttgtttgccatggctttaattcaccataatgagccaatcttgaccaagttccttttgttgtacttctcacgggcagatacttttgtgtttgtgttacagtttcctcagtttcgaaatcaaaataaatgtgataaattaagcgagcgcacaaggctgggaaaacttgttggaatgaaaagctaatgaaattacattttaggggcatatttttcgagtctttcaataaagatctgatcgaatcgcaaacgagtttattgatcgccagccagtttgggccatgaatcatggctaaaattaggcagtcaagacacacagatttcgcataatgactctctccctttgacatagaattagtggcagatatgaggcaatagtggaaagagtcgttagcttttggccaaataattgctgatttacataagcaaaagcaaaaatgtggcccccggccacttctctctccccggtttcgcgattatcattcgcattcgaatgtgttttgattgaagtgaaggggaaaacctcataaaaaacatgtttaatgatttgaaaatgttttcgagtggacccgacacatgcagatggatggaaagttatcatttgccaaatactcggtcacctcttgcatcagagttccctgactcaaaagcattactctatcgccacgaggtcatcaaaccgaaagctggccaatttaataggattaagtaaagagcgccccaaaaccgatttatgaccagcagaaacgcaattgttcgggttgccctgattgcgttggttccatctttcaattattaaccagcaagttggtcgccaaacacttatccacgctcgactcactccattcattcacaggcagacaaagcagcattccccactctctaaaaaatgggaacgaagatcgagtacgtggacaccacgcacctgtacgcctccaagtacatccgcaactccaaggcgatcggtgtgctgtgggccatcttcaccatttgctatgccatcatcggcatcgtggcattcgtgacaccaggtgggctaattcggtctcatttattggcaatagttccgtgactgatctgctttacgcccctttattccagagtggatcggtgatccggacaacgatggagctggtcgcctgggcctctggcagcagtgccagcgggacgagatcttcgacaactgccgtcgacgatgggagagcatcttcgaagtgcccacattctcgtttcaggtaagtgagccgaggaatagtggactagaaatgatatatatgtaggtgtttctttctgattcatacatatgtatatatttcactaacttctaagcgcccttcccaaaatacgattactcgccagatacctgtacttgaccaatttcaatttttacttacctgtcttcagttggccacattctttatgctgggcgccatagcactggccttgctgaccatattcttcttggtttgtttgctgtttatgaagtcgacgcgtgttttccacctttgcggttggatgcaaatcatatcaggtatgtgtgctgacctatctcccactctatcaccttgtgttaactagttaaccatatcgaaaacatcacgttcatgtgtatacacagtgtttttgatgttttcccctattgatagttgttgtatgtgttgttatctctgttacatatggctatttattgattccagctatttgcatgattgtggcctgcgcggcgtttccctttggctggaattcggacgatttccgtaagatctgtggaccggaagcgaatcgcttcgagctgggcttgtgcggcatccgctgggcttatccactggccataatcggttgcatagatggcgtggtcttggccactctggcgtttatcttggccacgcggcacgtgcgcctgcagccagatccgatataccagaactcgctatacaaaggtgggttatgcgatgcttcttttccgttgaagaaatctacttgtggtttaatttttcgcaggtgaaatcaacaatgcttacctcacagatgccatcagcttggcgggctcgaggaaatccaacccacgcataactggcttgaatttgcagcccattttgctggtggctccgccaaacgaggatagcatatcgcagttttctcgttatcactgagcacaccattcaaacagccaggacgccaaccaattaagcttagcacgtgcaagaaccaggggtgaaactcagcttaaagttttccataaatcgttcaaacgatttttaaccgattttcgccgcaaccataagatgaaactatgaaaatgtgtgtggtatgtgtatttgagtgtgaaagtcagcgagtgaatgatttgtatatgccgcttagcccgactgaatgccaacttgtagttgtaagattggattttaaactataatttaacatttcgtgtgaatagcttgtgcctaagtgtatgcttcgaataagttaaaagttaaaagagagttcccgaagctctgcctgtaaattatatacccataaacaataaacatgtacaaatattaaacataaaaccaatgtttatttcgaccacaaatagccgcctcaattatgccatcatcatcatcatcaaggtcagcaacttctggactaggcaaaatcaaattatgaccaacccacgcataaaagcccataacgaacaacttagcgcccaatttgtttgtccttagtctggattcgaattcggattcagatccctccccactccccctttcaataaccatttggcacatacttttccaataaagtatttccaaaagatccgggagcatactcccccttccacagtgggaggcaattgaaatatcccgggcaggagatccgtgccgagtgcaagtggctccggctcttccccggcacgttttaatattcttgtataattcataagcaattccatcacgggcctaagtggccaaccagctgacgccgagcaaatcgctccaaattcgacagggaatccaccccgagatgggatttcacttgacttctttgagatactctcaatcggtgttgtatacattttatagggacttagttacacataaaactataattgtttcttcttttattcgttagtgaaatgttaaaaatattttcttaaaaatctacccattgaaa

SEQ ID NO: 386 - DNA, 1061 bp, DROSOPHILA
acacatgcagatggatggaaagttatcatttgccaaatactcggtcacctcttgcatcagagttccctgactcaaaagcattactctatcgccacgaggtcatcaaaccgaaagctggccaatttaataggattaagtaaagagcgccccaaaaccgatttatgaccagcagaaacgcaattgttcgggttgccctgattgcgttggttccatctttcaattattaaccagcagacaaagcagcattccccactctctaaaaaatgggaacgaagatcgagtacgtggacaccacgcacctgtacgcctccaagtacatccgcaactccaaggcgatcggtgtgctgtgggccatcttcaccatttgctatgccatcatcggcatcgtggcattcgtgacaccagagtggatcggtgatccggacaacgatggagctggtcgcctgggcctctggcagcagtgccagcgggacgagatcttcgacaactgccgtcgacgatgggagagcatcttcgaagtgcccacattctcgtttcagttggccacattctttatgctgggcgccatagcactggccttgctgaccatattcttcttggtttgtttgctgtttatgaagtcgacgcgtgttttccacctttgcggttggatgcaaatcatatcagctatttgcatgattgtggcctgcgcggcgtttccctttggctggaattcggacgatttccgtaagatctgtggaccggaagcgaatcgcttcgagctgggcttgtgcggcatccgctgggcttatccactggccataatcggttgcatagatggcgtggtcttggccactctggcgtttatcttggccacgcggcacgtgcgcctgcagccagatccgatataccagaactcgctatacaaaggtgaaatcaacaatgcttacctcacagatgccatcagcttggcgggctcgaggaaatccaacccacgcataactggcttgaatttgcagcccattttgctggtggctccgccaaacgaggatagcatatcgcagttttctcgttatcactga

SEQ ID NO: 387 - protein, 265 aa, DROSOPHILA
MGTKIEYVDTTHLYASKYIRNSKAIGVLWAIFTICYAIIGIVAFVTPEWIGDPDNDGAGRLGLWQQCQRDEIFDNCRRRWESIFEVPTFSFQLATFFMLGAIALALLTIFFLVCLLFMKSTRVFHLCGWMQIISAICMIVACAAFPFGWNSDDFRKICGPEANRFELGLCGIRWAYPLAIIGCIDGVVLATLAFILATRHVRLQPDPIYQNSLYKGEINNAYLTDAISLAGSRKSNPRITGLNLQPILLVAPPNEDSISQFSRYH

SEQ ID NO: 388 - DNA, 4294 bp, DROSOPHILA
tctgctatgttcaatcgaaaatgggaaatattgacaaaaacggttttattttgtatacacgacttgaccattatggcagtcgataaacaaaagtcgcctaagggcgatccaaaattggtcgaaaggaaaagtaatcatatttgcgcacttattcgaaattattctttgactactagatctataaaaagctttgagtcttatcaagtagcctagatatttttatttagacaaataaatggccaactgagaaaggttgaaagttcatcaaataaacaaagcacctcgttctatttttaaaattcaaaatctatgaacagtgcgaaaggccgtgccctatagttttatagtcttgaattttaataagctgccatcaatttgttaattgaaaaatagaatagaatagaatttctgatcaaaacttcctcccaaaaaatgctttacttttaggtacaaattcttttgaatctataaacacataacccagttgtctaggcctgttgaaagtttagtgcacttctgaatttcaatggcctttacccttgaattcccccacccaagttgaatgacttacacaactcaaaaaattaccgaaaaatttgtttggttagcactttgtttatcttttgataccaggccgcgtcggtttttgtgtgactgccactcggaataaataaaccaaaaacaaaaataaaagccagaagaataacaaaatattgcaaactgatttaatacgaatcggcgagagtcgttggctctgataaatggcgcacacctggtctgtcagtcgcgggctgataaaaaattaaccttatcagcagaacactaaacggaaaagacgcaccgctcccatcaatattggcagagctgccatcgtttattgtccctgattaatggctgcgaattcccctcttcactgattaggcttagatcacaattggtgcaaatggggaaatatcttaagaaatcgcttaggctcactccgctccctgtctcttgcagaatggtcgactttaaggtccaacaacgacgatacaggaccagcgaaaagactgtcgtcagcaccacctacggacccatcaagggtgtaaagaggaagtccatctacggccagtcctacttcagcttcgagcggatccccttcgccaaaccaccggtgggcgagctacgctacaaggctccccagcccccggaggtctggacggaggtcaggagctgcacctcccagggtcccaagccactgcagaagcacttcgtgttcgagatgaccgatggctccgaggactgcctctacctcaatgtctacacaaagaatgtgagtgcatagtagtaagctatcttttttccttcacggacaaaacagcctttttaagcgtatctgtgatctattcttcagttgctttttatcgaaaagtgcaatcaaattttatattattttgctggctatcacactgcatcactatggtatatttaatatattatttacttcacagttgtatcccaccaaaccaatgcccgtgatggtctggatctatggcggtggcttccagtttggcgaggcctcacgggaatgttacagtccggattatttgctgcgtgaggatgtggtggtcatttctatcaactacaggttgggaccactgggtacgaatgatgacacgtggaaaaaaaaacatatatttaacataagccttccaggatttctgtgcctggacgatcccgaactcgatgtgcccggcaatgcgggactcaaggatcaagtgttggccctgcgctgggtcaaggccaactgttcgcgtttcggaggcgattccgcgaatataacaatttttggggacagtgcgggaagtgcctcggttcactacatgatgatcacagagcagacgcatggacttttccacaaggccatctgcatgtcgggtaatacgctttccccctgggcagtgactcctcagagaaactggccatatcggttggctgtccaggcgggttacgcaggtgaaaacaacacccgcgatgtctgggagttcctgaagaacgccaagggatccgaaatcatcaaagccaatggagaactctgcattgacgaggagaagaaggagcggattggattctcttttgggcccgtaatcgaaccgtatgtaaccagccactgtgtggtgccgaagaaacccatcgaaatgatgagaaccgcctggagcaataatatcccacttatcatcggaggcgtttccaacgaggggcttctcttgtactcagagaccaagacgaatccgaagtgtctaaacgagttggacgactgccggtttgtggtgcctatcgaattgaatatggacagggaaagtgccctgtgccgggagtacggcgatcagctgaggcagtgctactacggcgataagacgcccagtctggacaccctgcatgaataccttcaggtgggtgaaacactaatattttattaaagactatgggcaataaatcttaagattggagttcggaaatattattgttttttagttacacttatataccgacataaccaagatgacttataaaagcaggtgttctatgattgagtgtataagtcttaaatgtttctatgaatcaaaaaaagagtgcccaagttttttagataggactgacaaagatattccatattgcattaaagacagactgcatttttggtctgttctaaatcaggcagcgtagatttacataggcataccctgaatagatagcgcatattttaaatttatgcaatatcttatggtaatgccaatgtgttcatttattgtagaataacttttaaaaaaaatattgaatatattgcagatggtttcccacgagtacttctggttcccaatataccgcacagtattgtcccgcctgcagtacgctcgcagtgcgccgacgtatttgtaccgcttcgacttcgactccaagcacttcaaccacctgcgcatcctgagttgcggcaaaaaggtgaggggcacgtgccacggcgacgatctgtcctacttgttctacaactcgctggcgaggaagctcaagaaccacacgcgggagtacaagtgcatcgagcggctggtgggactgtggacgcactttgcggcatgtggaaaccccaacttcgatccggaacaggaggacctgtggcagcccgtcgatcctgcggccgtcgagaaacaccagctgaagtgccttaacatatccgacgagctgaaggtgatcgacgtgcccgacctcaagaagttgatggtctgggagagtttctttcgacgcgatgagctgttgtagggatctgcaggaatccatttaggctagacatgcagctttaatagtacaagggtgggggtcacatttggagacaagataacttgagctttgaatgcaatctgatcattacttggagtgaaatttacaaaattcaacataatttttgtctctgtcatcaaaaggtctttattcctgatggagagaaccaccgctttatgtgaacattttgaagaacttgccctcagattgcccaacagacttatttttggcaagaatgataagtgaacccaccctaaccttttacgattggaaaagctttacgttgaagcctatgtttgaaacaatgcaaagcgtagctttagacataaaatatgagagtttattgttaagtttgtcaacgagaagaagagttctaggtgtgttaaagttcatccgtttcttactatatcttatcggatcgaatctgtagtctaagcaggctgttcgtatatagtcatgatgccgcacgacctatgagtgtgaaacaagtcgcaactgaagtaccttctatgagaaactaccaaaacccactaaaccaaactcgacaaacaagacagccaaggaatctgagctaagatcttatatttaacgttcctttaagtctcgctgatatctttaaaagccaactaatatcaaacgtattttatacaactcattttattcgagatcgttttaagtactcagcacaaacttgagttagaagatccagtatattttcttccagtatcacgaacgcacacatttacaagaagggaatttccatttgagtttttgagatgtatatttaactgaaactactagttaaccgtaaccaatttatttatattcttagcctaagtctttttagatatatatcttttgtatgcataggttgtttttggtaaaatgttatatttgaacaaacgataaacctgtccaagttttacatcatttttagaatataaaataatgaaaacaaaaacaaattttttggaatcgttta

SEQ ID NO: 389 - DNA, 1665 bp, DROSOPHILA
atggtcgactttaaggtccaacaacgacgatacaggaccagcgaaaagactgtcgtcagcaccacctacggacccatcaagggtgtaaagaggaagtccatctacggccagtcctacttcagcttcgagcggatccccttcgccaaaccaccggtgggcgagctacgctacaaggctccccagcccccggaggtctggacggaggtcaggagctgcacctcccagggtcccaagccactgcagaagcacttcgtgttcgagatgaccgatggctccgaggactgcctctacctcaatgtctacacaaagaatttgtatcccaccaaaccaatgcccgtgatggtctggatctatggcggtggcttccagtttggcgaggcctcacgggaatgttacagtccggattatttgctgcgtgaggatgtggtggtcatttctatcaactacaggttgggaccactgggatttctgtgcctggacgatcccgaactcgatgtgcccggcaatgcgggactcaaggatcaagtgttggccctgcgctgggtcaaggccaactgttcgcgtttcggaggcgattccgcgaatataacaatttttggggacagtgcgggaagtgcctcggttcactacatgatgatcacagagcagacgcatggacttttccacaaggccatctgcatgtcgggtaatacgctttccccctgggcagtgactcctcagagaaactggccatatcggttggctgtccaggcgggttacgcaggtgaaaacaacacccgcgatgtctgggagttcctgaagaacgccaagggatccgaaatcatcaaagccaatggagaactctgcattgacgaggagaagaaggagcggattggattctcttttgggcccgtaatcgaaccgtatgtaaccagccactgtgtggtgccgaagaaacccatcgaaatgatgagaaccgcctggagcaataatatcccacttatcatcggaggcgtttccaacgaggggcttctcttgtactcagagaccaagacgaatccgaagtgtctaaacgagttggacgactgccggtttgtggtgcctatcgaattgaatatggacagggaaagtgccctgtgccgggagtacggcgatcagctgaggcagtgctactacggcgataagacgcccagtctggacaccctgcatgaataccttcagatggtttcccacgagtacttctggttcccaatataccgcacagtattgtcccgcctgcagtacgctcgcagtgcgccgacgtatttgtaccgcttcgacttcgactccaagcacttcaaccacctgcgcatcctgagttgcggcaaaaaggtgaggggcacgtgccacggcgacgatctgtcctacttgttctacaactcgctggcgaggaagctcaagaaccacacgcgggagtacaagtgcatcgagcggctggtgggactgtggacgcactttgcggcatgtggaaaccccaacttcgatccggaacaggaggacctgtggcagcccgtcgatcctgcggccgtcgagaaacaccagctgaagtgccttaacatatccgacgagctgaaggtgatcgacgtgcccgacctcaagaagttgatggtctgggagagtttctttcgacgcgatgagctgttgtag

SEQ ID NO: 390 - protein, 554 aa, DROSOPHILA
MVDFKVQQRRYRTSEKTVVSTTYGPIKGVKRKSIYGQSYFSFERIPFAKPPVGELRYKAPQPPEVWTEVRSCTSQGPKPLQKHFVFEMTDGSEDCLYLNVYTKNLYPTKPMPVMVWIYGGGFQFGEASRECYSPDYLLREDVVVISINYRLGPLGFLCLDDPELDVPGNAGLKDQVLALRWVKANCSRFGGDSANITIFGDSAGSASVHYMMITEQTHGLFHKAICMSGNTLSPWAVTPQRNWPYRLAVQAGYAGENNTRDVWEFLKNAKGSEIIKANGELCIDEEKKERIGFSFGPVIEPYVTSHCVVPKKPIEMMRTAWSNNIPLIIGGVSNEGLLLYSETKTNPKCLNELDDCRFVVPIELNMDRESALCREYGDQLRQCYYGDKTPSLDTLHEYLQMVSHEYFWFPIYRTVLSRLQYARSAPTYLYRFDFDSKHFNHLRILSCGKKVRGTCHGDDLSYLFYNSLARKLKNHTREYKCIERLVGLWTHFAACGNPNFDPEQEDLWQPVDPAAVEKHQLKCLNISDELKVIDVPDLKKLMVWESFFRRDELL

SEQ ID NO: 391 - DNA, 4294 bp, DROSOPHILA; identical to SEQ ID NO: 388

SEQ ID NO: 392 - DNA, 1719 bp, DROSOPHILA
atggtcgactttaaggtccaacaacgacgatacaggaccagcgaaaagactgtcgtcagcaccacctacggacccatcaagggtgtaaagaggaagtccatctacggccagtcctacttcagcttcgagcggatccccttcgccaaaccaccggtgggcgagctacgctacaaggctccccagcccccggaggtctggacggaggtcaggagctgcacctcccagggtcccaagccactgcagaagcacttcgtgttcgagatgaccgatggctccgaggactgcctctacctcaatgtctacacaaagaatttgtatcccaccaaaccaatgcccgtgatggtctggatctatggcggtggcttccagtttggcgaggcctcacgggaatgttacagtccggattatttgctgcgtgaggatgtggtggtcatttctatcaactacaggttgggaccactgggtacgaatgatgacacgtggaaaaaaaaacatatatttaacataagccttccaggatttctgtgcctggacgatcccgaactcgatgtgcccggcaatgcgggactcaaggatcaagtgttggccctgcgctgggtcaaggccaactgttcgcgtttcggaggcgattccgcgaatataacaatttttggggacagtgcgggaagtgcctcggttcactacatgatgatcacagagcagacgcatggacttttccacaaggccatctgcatgtcgggtaatacgctttccccctgggcagtgactcctcagagaaactggccatatcggttggctgtccaggcgggttacgcaggtgaaaacaacacccgcgatgtctgggagttcctgaagaacgccaagggatccgaaatcatcaaagccaatggagaactctgcattgacgaggagaagaaggagcggattggattctcttttgggcccgtaatcgaaccgtatgtaaccagccactgtgtggtgccgaagaaacccatcgaaatgatgagaaccgcctggagcaataatatcccacttatcatcggaggcgtttccaacgaggggcttctcttgtactcagagaccaagacgaatccgaagtgtctaaacgagttggacgactgccggtttgtggtgcctatcgaattgaatatggacagggaaagtgccctgtgccgggagtacggcgatcagctgaggcagtgctactacggcgataagacgcccagtctggacaccctgcatgaataccttcagatggtttcccacgagtacttctggttcccaatataccgcacagtattgtcccgcctgcagtacgctcgcagtgcgccgacgtatttgtaccgcttcgacttcgactccaagcacttcaaccacctgcgcatcctgagttgcggcaaaaaggtgaggggcacgtgccacggcgacgatctgtcctacttgttctacaactcgctggcgaggaagctcaagaaccacacgcgggagtacaagtgcatcgagcggctggtgggactgtggacgcactttgcggcatgtggaaaccccaacttcgatccggaacaggaggacctgtggcagcccgtcgatcctgcggccgtcgagaaacaccagctgaagtgccttaacatatccgacgagctgaaggtgatcgacgtgcccgacctcaagaagttgatggtctgggagagtttctttcgacgcgatgagctgttgtag

SEQ ID NO: 393 - protein, 572 aa, DROSOPHILA
MVDFKVQQRRYRTSEKTVVSTTYGPIKGVKRKSIYGQSYFSFERIPFAKPPVGELRYKAPQPPEVWTEVRSCTSQGPKPLQKHFVFEMTDGSEDCLYLNVYTKNLYPTKPMPVMVWIYGGGFQFGEASRECYSPDYLLREDVVVISINYRLGPLGTNDDTWKKKHIFNISLPGFLCLDDPELDVPGNAGLKDQVLALRWVKANCSRFGGDSANITIFGDSAGSASVHYMMITEQTHGLFHKAICMSGNTLSPWAVTPQRNWPYRLAVQAGYAGENNTRDVWEFLKNAKGSEIIKANGELCIDEEKKERIGFSFGPVIEPYVTSHCVVPKKPIEMMRTAWSNNIPLIIGGVSNEGLLLYSETKTNPKCLNELDDCRFVVPIELNMDRESALCREYGDQLRQCYYGDKTPSLDTLHEYLQMVSHEYFWFPIYRTVLSRLQYARSAPTYLYRFDFDSKHFNHLRILSCGKKVRGTCHGDDLSYLFYNSLARKLKNHTREYKCIERLVGLWTHFAACGNPNFDPEQEDLWQPVDPAAVEKHQLKCLNISDELKVIDVPDLKKLMVWESFFRRDELL

SEQ ID NO: 394 - DNA, 4242 bp, DROSOPHILA
gataggtctgccatattttctgccctatgggcatgacatggcggtttttacatttttacatttcttttcacaaaagatacattaccgatataatacaaactcggatatagcttattctaacatttatattgttagtcatcctattcactttttgtcgtcaagccattgaattttaaataatcgaaatgttgattaactatatcgcactgcattgattgtttgtcgaatgctttaagtatttctgatacgactaaacttaattttgattactttgcgcatttgctttgtgtttaaagtacaatttgaatgcttttaccacttataaaagtgttaatccttaggttaactgagtgaattagtctaaatttattaccttcatttgtttcgctctgctgctttcctgctgcctattaggccatttaaaacgaactacactgaagaaaagtatttcaatgacaaactcagatcttcgaaaaatattgaaaggcgttatatcttggatgttggctttcgcggacccacagcagtcacgtacaatccaatctggtatccaatctgatctcgcctttctctcgatttcaaacgtaattaccgatttgtatgcattcgtgtgcaatgatgttgaatcaaactatgtcagtgcatttgcagaatgccagttaaatacactatttgtgcctcaatcgacggtgggcaatgcgaacaaataaaaataggccattaaatgcattaaaccgcctcacgcccacccacaaattagccataaaatcagaaacaaaaaaagtctcaggcaaaaaacaaaggtgaattgtagaaaatagaaaactggtcgtgcatgcaaaacgtgaggcgtcgagttgaggttggtcaaaagccgttgacaattcgcaagactttgaatccaacaaaacaaaatccaatgacattgaaagtgggttcctctccactttgctgtgggactggagcacactgcttagtgttcactgtggtcatgttaccaatgcgtgactgcggtgagcggattagatcgcgagcaatattgtataaatattttaaacaggatttatcttttaatgggacagtgggtattatgacatttccaagaagttaacaagccacttgatttgatgatccgacatattgatatgaaacgattattagcatgattaccgttccttaagcaaaaatatttttaagtgctcagtatatacatagtattcacaatttaaagaaactatattctcctgtagattcacaaggttttttttcagtgcaccgcctgcagtaattcaactaaaactggtataaacacatcatcatctttaataattattgtattcgactataacagctttttaaagtgcataatatacggttattaatgtaattattatattatatattaattattttaactagctaaccaaaaaacgtataataaacacttgtttttacagggtaataagcttcaagtacgagcagcgcaaattgtcaacagcaatatattccgtcataaagacgaaatcaggtcctgtgcggggagtgaagagaaacacaatctggggaggaagctacttcagtttcgagaagatacccttcgcaaagcctccggtgggagatctgcgcttcaaggccccggaagcagtggagccatgggatcaggaattggattgcacttcgccggcagacaagccccttcagacacacatgtttttcagaaaatacgcgggctcagaggactgcctctacttaaatgtgtatgtcaaagatgtaagttttgggctcatgtgcttatggatcgtatggagtttgtgcttacggatgtaattgtccttcccatttcagctgcagccggataaactgcgtcccgtgatggtttggatctacggaggaggctatcaagttggcgaagcttctcgggatatgtacagtcccgactttttcatgtcgaaggatgtggtcatagtcaccgttgcttatcgactgggtgccttgggcttcctcagcctggatgatccccaactaaacgttcccggaaatgcaggtctcaaggatcaaatcatggccctgcgatgggtgcaacaaaacatcgaagcattcggcggtgattccaacaatattacactctttggcgaaagtgccggcggagcctcgacccacttccttgcactaagtccccaaactgaaggtcttatccacaaagctatcgttatgtcgggcagtgttttgtgcccctggacgcaaccaccgagaaataattgggcttataggctggcccaaaaattgggatacaccggtgacaataaggacaaggcgatctttgagtttctgcgatcaatgagtggcggggagattgtcaaggccaccgcaacagttctcagcaacgatgaaaagcatcatcggatccttttcgccttcggacctgtcgtagaaccatatactaccgagcacactgtggtcgctaaacaaccgcatgaactgatgcagaatagctggagtcacaggatacccatgatgtttggaggcacgagcttcgagggattgctattctatccaggtaagtgaactgatatttttatttggaatagccttaaattaaatataattgtttttcagaggtttcaaggcggccagcaaccctcgatgaggtgggtaactgcaagaatctgctaccgagcgatctcggtcttaacctagatcccaaactgcgtgagaactacggcttgcaactgaagaaggcgtatttcggcgacgaaccctgtaaccaggcaaacatgatgaagtttctcgagctatgctcatatcgagagttctggcaccctatatacagggcagctttgaaccgtgtccggcaatccagcgcacccacgtatctgtatcgattcgatcacgattccaaactgtgcaacgccattaggattgtactttgcggccatcagatgcgaggtgtttgtcatggtgacgatctgtgctatattttccacagcatgttgtcgcatcaatccgctcccgattctccggaacacaaggttataaccggaatggtcgacgtttggacgagtttcgcagcccacggagatcccaactgcgaaagtataaaatcactcaagtttgcacccatcgaaaacgtaaccaactttaagtgtctcaatattggggatcagtttgaagtcatggcgcttccagaattgcagaaaatcgaacctgtgtggaatagtttctacgccccaaacaaactgtagatgcagtgcatcattaatatggttatatagctttagctgtctcaattccatggatttggataatcgtaattagtgtaaatacgttgtacatatgttatgcggttaatgtaggattgagtatgttgattaatttaaaaatatgcagtttttaatgatttgcaataattatcgtaatttaaacaattgtttaaatggtatttgtcttctgcctaacgattttataataataaattcatcgtataaaattaaattaaagacagttgattagtcacttcgaagctgacttttaaattaaattaaataaattctgttagctcagaccaattaaatatatctgaaattagcataaaaactcaataatcatttatgccgtttattcgagagctaaacgagttttacgtgcatttctaaaatcctaactctttcgtgtgagagatccgctttaagatttagtttagtgtcaatggcgacagccctttttccaaacctgctggattttttaaacgtttatttcgtcgctcatctatacggctaacaccgggcagaagcatccacccacttggctatatgctgatgtgacatttatgtgtgtaagccgactcttgacaatcaaaggggacaacaatttccgcaatgccaccgccaacaacggggcaggatgggcaggatgacaccatggactgggagcgtgggagtgtagaaagaatgaaaaaaattccattaaaatttttgcaagtttttaattcgtttttttttttttttttttttgttaggaaaaggggctttgccggaacacggccaaaatgtttgtgtggtaaatgcaaaggggctcgttcgccgtgtgttcgggatgcgtgttaccgtcagcagcgtgaaaattcattttgtggacaggttcgcagagagttgggcaatttttcgttaaatttttcctatatatacaatttttttgcacagaattagactgtgttatggtcatggctgtggcatgcggccgggc

SEQ ID NO: 395 - DNA, 1593 bp, DROSOPHILA
atgcgtgactgcggtcctgtgcggggagtgaagagaaacacaatctggggaggaagctacttcagtttcgagaagatacccttcgcaaagcctccggtgggagatctgcgcttcaaggccccggaagcagtggagccatgggatcaggaattggattgcacttcgccggcagacaagccccttcagacacacatgtttttcagaaaatacgcgggctcagaggactgcctctacttaaatgtgtatgtcaaagatctgcagccggataaactgcgtcccgtgatggtttggatctacggaggaggctatcaagttggcgaagcttctcgggatatgtacagtcccgactttttcatgtcgaaggatgtggtcatagtcaccgttgcttatcgactgggtgccttgggcttcctcagcctggatgatccccaactaaacgttcccggaaatgcaggtctcaaggatcaaatcatggccctgcgatgggtgcaacaaaacatcgaagcattcggcggtgattccaacaatattacactctttggcgaaagtgccggcggagcctcgacccacttccttgcactaagtccccaaactgaaggtcttatccacaaagctatcgttatgtcgggcagtgttttgtgcccctggacgcaaccaccgagaaataattgggcttataggctggcccaaaaattgggatacaccggtgacaataaggacaaggcgatctttgagtttctgcgatcaatgagtggcggggagattgtcaaggccaccgcaacagttctcagcaacgatgaaaagcatcatcggatccttttcgccttcggacctgtcgtagaaccatatactaccgagcacactgtggtcgctaaacaaccgcatgaactgatgcagaatagctggagtcacaggatacccatgatgtttggaggcacgagcttcgagggattgctattctatccagaggtttcaaggcggccagcaaccctcgatgaggtgggtaactgcaagaatctgctaccgagcgatctcggtcttaacctagatcccaaactgcgtgagaactacggcttgcaactgaagaaggcgtatttcggcgacgaaccctgtaaccaggcaaacatgatgaagtttctcgagctatgctcatatcgagagttctggcaccctatatacagggcagctttgaaccgtgtccggcaatccagcgcacccacgtatctgtatcgattcgatcacgattccaaactgtgcaacgccattaggattgtactttgcggccatcagatgcgaggtgtttgtcatggtgacgatctgtgctatattttccacagcatgttgtcgcatcaatccgctcccgattctccggaacacaaggttataaccggaatggtcgacgtttggacgagtttcgcagcccacggagatcccaactgcgaaagtataaaatcactcaagtttgcacccatcgaaaacgtaaccaactttaagtgtctcaatattggggatcagtttgaagtcatggcgcttccagaattgcagaaaatcgaacctgtgtggaatagtttctacgccccaaacaaactgtag

SEQ ID NO: 396 - protein, 530 aa, DROSOPHILA
MRDCGPVRGVKRNTIWGGSYFSFEKIPFAKPPVGDLRFKAPEAVEPWDQELDCTSPADKPLQTHMFFRKYAGSEDCLYLNVYVKDLQPDKLRPVMVWIYGGGYQVGEASRDMYSPDFFMSKDVVIVTVAYRLGALGFLSLDDPQLNVPGNAGLKDQIMALRWVQQNIEAFGGDSNNITLFGESAGGASTHFLALSPQTEGLIHKAIVMSGSVLCPWTQPPRNNWAYRLAQKLGYTGDNKDKAIFEFLRSMSGGEIVKATATVLSNDEKHHRILFAFGPVVEPYTTEHTVVAKQPHELMQNSWSHRIPMMFGGTSFEGLLFYPEVSRRPATLDEVGNCKNLLPSDLGLNLDPKLRENYGLQLKKAYFGDEPCNQANMMKFLELCSYREFWHPIYRAALNRVRQSSAPTYLYRFDHDSKLCNAIRIVLCGHQMRGVCHGDDLCYIFHSMLSHQSAPDSPEHKVITGMVDVWTSFAAHGDPNCESIKSLKFAPIENVTNFKCLNIGDQFEVMALPELQKIEPVWNSFYAPNKL

SEQ ID NO: 397 - DNA, 4313 bp, DROSOPHILA
ggaaatgtaatttcaagttcattgggatggtagcagaactgcaagaacttacacagattgtacttcttgtggaccagcgagtgccatataattcgcaaattggttaccatcaggcgaccagtgtcccccggatttcctttgctgtcttcgatgtggtaaatgtagtcgagcactcgttctccgctccgcaggttcttgtgcctgaaacgaatctctccaattgagggtccaaaaaccaattaaattagcgtctacttacagttgaggcacatcaaatttgacctccttgtcctcccagagcaactgcagcacgggctgttggtttccttcgatcggagctagcgactttaacatttttccgagacaactaacgtctttgttggggtgcaaatccactggttaaacggttgctaggcaacctttagtccaggaaccaattccaaaaccaagaaaacataaattcccaggccgaatgcgaaatgcttaaaccaaaactcaaacagccaattaaaaatcgatgtacagatgtttagattattgagaaagtaaaattccaaagaacaacttgaacttaatatgaaatcaaatcatgaaattaggaaatacacaacattttaaatcccaccatcggaagaggcccaataataaaagcccaatcttttaattttttaaatacgtatgtaatatatttgactaacgtatagaattttaggagtataactaatgcttcgcttatcaaagtacaaaaacgttcaactaacgcgattaagcttaaactataagtcagtttttcccccttcgccagggaaggagaaagagctggcgtttataaatagttagcaacgctaactgctggaaatgttattcttttttttcatagtgtcaatattgcaaatcgtaggtgagagcagttcagcaaaaggcacctttatagaataccgaaacggcggaactgaacaaaaatagattgtatttacaatttatgatttgggccaccgcctcacataatgatctgcggttctgggacactggccgcaatgcttttatggggcaagacctggcctccattaatgtagagctcatccttcacgattacatcctcgcctagcacggtgatgccttcgatgcgaacccaacggccaactgtagaacgccaaccgacaatgcaggagtccagccatgagtgtgagcgaacgatggcgcctttgaggatggtcgagcgcttaatgcacacgccatcctcgatgaccacgtccggtccaatggttacattaggccctatgcgacaaccctcgccgattttggccgtgggatccaccaacacgttgcccaccactccagggcctgtgtacagcttgggggattgcttctggcgcagcgagcttagatacagacacatgcctgaaaaggaataaaatggtgcaataagtaaagcgataaagtcgatgtgttcaagcccattcaatagccttcacttttaacgttcaatggtgaccaaaaaacatttaagaaactgactattgccagtgtacttcgcatatttgatgagcgttacttagatcctatgcagttaagtaagtaagtaagtaagtaagacagcaatgtatcgtcccagtacatgtattcataagtcgtgaatcgcatccacatgaacccaacaaacaatttactcttctacttggtttctcccatcgcccactatcggcctaatgagcctcacttcatttaaaaagaaatcgttctatcaaacattagctatagttccaggaatgtcaataatagataaagccgaaagccgggtgggtaaaaaggcacagcacaattaacaacgacatccacatttgctttcaaagcgataagaccaattaggcaatcaagattgagcgagcaaacgagtgattctgtctgtcgtaccggttaggaagtcttttggctgtccgatgtccatccagaatccagttaaatccattgcatacaactcctgttgctgcgtcatttcagggaacacctccttctctattgatgtgggcttaacttcgatccggtcaagcacggagggattaaagatgtaaatgccggcattgatcttattgctaacgaactcttgtggcttttcaataaagttttttatacagccgttctcatcgtacagcacaactccgtatttggatggttcttcgacctttgtgacaacaattgtgccttcttttccgtgattacaatggaattgcactagttgtttaaatggaaaatcgcatataacgtccgaattgagcacgaaaaatggctctgagctggctgctaaaatcgtttttgctagggccagaggtccagctgttcccaggggttccgtctcgtgtgagaagatcaattccacgcccagtttcttggcttcgactttaagctccttttccatttgctcggctcgatagctgacggctaaaataacctgcgagaaagaagtatgcattattttagaaatataaaacaaaagaataatctcttttagaggaagttgatttgattcttagcgtgttatgtaaccgtcttccctaaatttggcaacggcaaccaatatggaacaagatcaactgttttctaaacatccaaaggtgtttaaaaaaccttgttttaagaatgatgtgccatatttccattctcctaagcaatggggcagtttgggcgtcattagtctaaaaaactggatatacctgacgacatcccgcatcgacgagtgcctccagttggtggagaagaatcggcttattggcaaactccaccagtggcttgggcgtgctgagggtcaggggtcgcagccgggtcccataaccaccgaccagaatcaacgccctcgtcccgtttcccacagctggatttccacacatcacttctccgcttccgcttccgcctcctttccgttctccggtttctatagtccgtaagcgagcgacacgtcacaccttaaagttctcgagactttctccgtacaacgagattccgtttcagcggtcaaacaactgcaatcgacgaaggcaagtgagtgactcagttggttgtctttagtttattgtttactcaccttgttgcgctatctatttccttgttgttgtttttggaattgtcttttttcgtgataagaacctttgtgcttctggttggatgcacttgcctgtcccaaaacaataatagtttctattagttttagatggacgttttcaaggcttaggaatatcgatcttgtcattgaacattcaatatggtctttgtgtattttattatcatttgttttatgagtaaactcgccgcacaggaaagtaaataaaaaccgagctggcaaagttgggataacactatcggaagatggcgatgattgcgcttcgtcccactcgcagcagcgctgatagccggattccaccgaacattttacgctaaattaataaaatttattaaaattcatttcttgttaaattgaagaatcttaaaaaatacttttcagtttaatttaaattaaataacctatctaaagaccacaatcaggcatgttccggtaatagtaatattttttcgattacgatttggcaaaatctttcgacttcgtttttaggtgctcgggttttcgcggaatttttgcgatcggaatgttttgtaaacaggaaacagatgtctaagctgtattccagacaatggagcgaccaattttttcacagttttagttccgatgttcgcactgcactttgtccatttaagtaattaaattaaatagtattatttacgaacagtactttcgaccctcctttaaattaattacgaattttttttcattacatcttatatgcatttatactgtttatactgtattgtttcaccaatagtatagcagtcttcctgatagcttttgtcgacataattatgaacacttgccaaatcgaaactttttgttgccaactgcaaaattttgtttgtcaaatttcaggtggggtcagaaattacttttgtttaatataactaagtctaaaaatgatcttatggtgatgtggaacataaacatcaattaataaatatcaatagaccagcaaactattttttccccttagttaataagatctgatttgatataaaaaaggcatttactttttaaaaggccgttttacaaattaaaattttcttacgaattcgattaccggagcattcccgaataatattgtagagagcaaaacgggttgatggtttctaaggtttcaacggcattactgttttgactattccctacatttcaaaatatatcaaaaagaaaatcctaaaatgtacagtag

SEQ ID NO: 398 - DNA, 1476 bp, DROSOPHILA
ttcctgtgcggcgagtttactcataaaacaaatgataataaaatacacaaagaccatattgaatgttcaatgacaagatcgatattcctaagccttgaaaacgtccatctaaaactaatagaaactattattgttttgggacaggcaagtgcatccaaccagaagcacaaaggttcttatcacgaaaaaagacaattccaaaaacaacaacaaggaaatagatagcgcaacaagttgtttgaccgctgaaacggaatctcgttgtacggagaaagtctcgagaactttaaggtgtgacgtgtcgctcgcttacggactatagaaaccggagaacggaaaggaggcggaagcggaagcggagaagtgatgtgtggaaatccagctgtgggaaacgggacgagggcgttgattctggtcggtggttatgggacccggctgcgacccctgaccctcagcacgcccaagccactggtggagtttgccaataagccgattcttctccaccaactggaggcactcgtcgatgcgggatgtcgtcaggttattttagccgtcagctatcgagccgagcaaatggaaaaggagcttaaagtcgaagccaagaaactgggcgtggaattgatcttctcacacgagacggaacccctgggaacagctggacctctggccctagcaaaaacgattttagcagccagctcagagccatttttcgtgctcaattcggacgttatatgcgattttccatttaaacaactagtgcaattccattgtaatcacggaaaagaaggcacaattgttgtcacaaaggtcgaagaaccatccaaatacggagttgtgctgtacgatgagaacggctgtataaaaaactttattgaaaagccacaagagttcgttagcaataagatcaatgccggcatttacatctttaatccctccgtgcttgaccggatcgaagttaagcccacatcaatagagaaggaggtgttccctgaaatgacgcagcaacaggagttgtatgcaatggatttaactggattctggatggacatcggacagccaaaagacttcctaaccggcatgtgtctgtatctaagctcgctgcgccagaagcaatcccccaagctgtacacaggccctggagtggtgggcaacgtgttggtggatcccacggccaaaatcggcgagggttgtcgcatagggcctaatgtaaccattggaccggacgtggtcatcgaggatggcgtgtgcattaagcgctcgaccatcctcaaaggcgccatcgttcgctcacactcatggctggactcctgcattgtcggttggcgttctacagttggccgttgggttcgcatcgaaggcatcaccgtgctaggcgaggatgtaatcgtgaaggatgagctctacattaatggaggccaggtcttgccccataaaagcattgcggccagtgtcccagaaccgcagatcattatgtga

SEQ ID NO: 399 - protein, 369 aa, DROSOPHILA
MCGNPAVGNGTRALILVGGYGTRLRPLTLSTPKPLVEFANKPILLHQLEALVDAGCRQVILAVSYRAEQMEKELKVEAKKLGVELIFSHETEPLGTAGPLALAKTILAASSEPFFVLNSDVICDFPFKQLVQFHCNHGKEGTIVVTKVEEPSKYGVVLYDENGCIKNFIEKPQEFVSNKINAGIYIFNPSVLDRIEVKPTSIEKEVFPEMTQQQELYAMDLTGFWMDIGQPKDFLTGMCLYLSSLRQKQSPKLYTGPGVVGNVLVDPTAKIGEGCRIGPNVTIGPDVVIEDGVCIKRSTILKGAIVRSHSWLDSCIVGWRSTVGRWVRIEGITVLGEDVIVKDELYINGGQVLPHKSIAASVPEPQIIM

SEQ ID NO: 400 - DNA, 4720 bp, DROSOPHILA
ggtatgaaataagtgattttgctgttaaacagcgactagatgttcacttctaaggactaacataaataatggtaggctacttcactggtgagtagtgttaattgactgcggattaaacggcgcccaacgaaagaaaaggggtttcgaaccgccctctgtgacttttgcaatgctcttctctagcctttaatgatttcggagtgaacttattttggggggactgacctatatataaacgtgatcgtgatgatgctttctacaagggttaatatgaggcttacacaaccagttctcggggagtttgagttggtccttgttgttttcggttatgttaacattcgctatggaaccgctcccacttgaaccggtccgcaaaacccgactaaatattgctttgcgtttcgtttttgtttgcttgcttttgattaatttgtatcgttgtcattatatcgaatctaaaaattgttgagtgcttaaatgtcgctttcgtgtgacttagtttaaaattgcttagtggctagcactcgtaattactgcttatagataggctgcccttaagtcctaattcgttgtttgagaaacattgcatttgcttttgtattcgttgcattaattttaatcacttcgtcgtcgtcgtcaacgttgtcgattaaagagatagagataggagagtagagagatattgttcgagtaagagttagggttagctagaggagtgttcatcgagagttagttggagagagtgggtagattaaaacgttcgtttggtttcgctacgggttataagtacactctatatatgcatttaaatatagtactcttatgtgtgtgtttttgttttcgattcgtattcgtattcgatttggtaagtagttagatagataagatagctgctagaattgcttagatttcttcaggttctcggaatgcatgtggcgtagcacctcatacacaaggctctctgtgtgtttggggtgtattgtgttcttttttgtttttgttttcttttttttttttgttttgtggaatgctttggtttttaggaatgttcaactcacttatgcttaaaagaagaaccattttgagttggttattatggggttgttttcaaaatctgaccatgaatttggatatttccattgcatacgtttagaggcaccttttaaaaaaatgagttcgcaaaccaaataacagattttgaaaacacacccattgagtattttgttgcttggctgcctaatgcgaatttctacagtctctgtgttactctactacactttgctcttggacgtattgtgatgtatgtatcttctataaaaacggctatcggttaacctagttgtaaatggtaacggtaactttaactttaacggtaaattaactaaccagctatgcagttacagcacatccttccgcttctgtttatcggttgtgcaacagagatgtctaagtctggtcacccgagccggattgcgacttggcttcaagtccttagagatttctgtagcgcgcccaatgtattctatgcttacatggcataagtggctcctccactgccctcgagtttgacgcgctcaaggaactcgtgtggcggcgacgaggccatactggccccactctcgctattgctgtcgtgcatcgacagcgacatggacatcatcagctcctcctcgtccttcaggcaagccgattccaaatgcttgttgaggtatgacttcagggcgaaggtcttgtggcaccgcttgcactcgaagttcttgtccaccgaatgggtctgcatgtgtgctcgtagattggaacgatcggcgaaggccttgccgcagtgcgcacatccatagggcttctcgcccgtgtgcgatctcaggtgaccctggagcagccagggcctcgagaacagcttgccacagacgccgcaactgtgggatagcttgtgcgtgagcaagtgcatcgccagggcgggcatggaaacgtaggccttgccacaggtgtggcacttcttggcggactgcgagtccagcgagcgatgggtttgtttgtggcgcgacaggttcgaggaggtggcatactgcttgccacactcggagcacgtgtacttggtcttctgctggtcaggagtgggcactccgctggcggcagctgcaggatccgccacatgtttgcgcttcgaacggccatcgctgacgaagaaggcctcgtaggtgtaggccaccgttttggccgacgctccggaggcgccactgtgctcgccatcctgaagacatccatccccatccgggttcgtgttggtggtgttgctgttctcgttctgcacctggctgctgctgctgctcgagttgctgctgggactgctgggcatgtgattgctgctggcactcgaggcattgctggcggggcgttgctcatttaccacactggccgctgcagccagttcggcaatcgatgacgtgctgcgcagatgcgcatgcgcctcgagagttggcaagtgggtgtggtgtgcctgctgctgctgttgctgctgcagtggcaagtagtgatgttgctgcggggcaaggtgttgctgctgggagtggtgatgctgatgctgctgctgctgctgctgttgctgctgctgcaactggtgaggttgcgtgggcgggtggaaggctgtgctcgcactcagatccaggatagcatgtgccgcatgcaggtcctcctccgccggtacccttcttcgatagccgtgcgccggcttgtcgtccaaggaatacggcctgtagatgtccttcttcttcggcggcagcgacagtgtggctcccgtactgctgaagcacttcctttcactggaggtctgtccactcgagagcggactgtaccgatcgccggcgccgctgggcgaacaagagggtgatgacgtggtggacgagggcggcgtttggtaggcggccaggtgctgatctccacttccgtttccggatgtcctggctgccaccagagctgtagccgcggcacggatcacggttatctcgctctccatgcggggcaggtacgcggtgtagtgcagcggcgaaagttcgcgggtgtagcctgtaaaaagcagaaaaaattaaatcatgggttaagttttattcagcagcatttatcatggttcctgaagtatgctacacttttttcttttgaaataagagtttcagtcattgtaatgtttttgtgccggaaaatatacttaatgtagtcggatgtagagtatatgattcgcttaaacttcctagacatgcacttataatttctttgtgattataatttttccgtttccttttctttataagctgccaaaacatttaccctctgccattcttaagatattttctttaacaaactttaaacaatagctttcatttaaatatgaaggactgacacatgcgtataatttcttttaaccaagggcaaactttaaaaggtcaacataaatatcaaagaccacgcctggagttgtgctaagataactattttgtatgtgctggaaaatattatgtttgctcaaaggattttctccgcaaaataagaactttggcgaagtagaaaagtacacagaagagcaacagctcacagctaaaaaatgggttagtgcaattactttaaatctgtttcgtagtaagttatttttagcttttaaagcctaaacctatagaaaggatgtctattgtgagtggtttttaggtctgccttgcttctaatttccactgaataattaatttcgcaattgtacgtggaaaacagtgacaggcacacattcaacaaaaaggacgaaggcaaacggtttaattttggcctgtaccattgttttcacgccaaagggaatggaaaccgagctggaagttggcagtaggaagtcggcgagggtctgtgcgttctgcgttttgtggcccgctggccggaattgcaaacaatattgagtgacaacaaaggcaattaaattgattcggaattgtttcgcaatcgcacaatggccacatcaatgacagcgattacgtgcgccccatctcgatttccaccacccccgcctcactggctggagcagtgttttccgatttcccgactttcccgagggctaacttaccgttgtaaacattgccggccactcgcgtcgccgcctccggcgaatggggaggcggacttggagccgtggtgcccgccgtgggtgaactgggtccccagcacttggacgtcgtcgtcgtcgccgatgcctccatgttgctgctgttgctgctgtgcgatgttgctgcttcggatgatgttgctgctgctgcggcagcatctgctgttgtgcgttgcttctccaatttgatcaggaatttgtcgcccaccacatcgatctcctcgtcgtcgtccagggtggagcgtctggacttgagatgcagctcctccagttcgcgaggcgagttgggggcactctgctcctgctgctgttgctggttgctagtatcctccgtccgatccagccagggataggccttccacttcttggctatcaggcagcgcggcattttctgtgtttttttttttctttgtagattagaggttttggagttggagttggagttttggctaggagcttgatcaggatccagttagtagatcttagagggctaagtgctgaagctagtgtcgagtttcgagcgagcaaagaccgtctcagggggtattatttgtggcaaaagcggaaaggaaacgttgctgttgt

SEQ ID NO: 401 - DNA, 2687 bp, DROSOPHILA
acaacagcaacgtttcctttccgcttttgccacaaataataccccctgagacggtctttgctcgctcgaaactcgacactagcttcagcacttagccctctaagatctactaactggatcctgatcaagctcctagccaaaactccaactccaactccaaaacctctaatctacaaagaaaaaaaaaaacacagaaaatgccgcgctgcctgatagccaagaagtggaaggcctatccctggctggatcggacggaggatactagcaaccagcaacagcagcaggagcagagtgcccccaactcgcctcgcgaactggaggagctgcatctcaagtccagacgctccaccctggacgacgacgaggagatcgatgtggtgggcgacaaattcctgatcaaattggagaagcaacgcacaacagcagatgctgccgcagcagcagcaacatcatccgaagcagcaacatcgcacagcagcaacagcagcaacatggaggcatcggcgacgacgacgacgtccaagtgctggggacccagttcacccacggcgggcaccacggctccaagtccgcctccccattcgccggaggcggcgacgcgagtggccggcaatgtttacaacggctacacccgcgaactttcgccgctgcactacaccgcgtacctgccccgcatggagagcgagataaccgtgatccgtgccgcggctacagctctggtggcagccaggacatccggaaacggaagtggagatcagcacctggccgcctaccaaacgccgccctcgtccaccacgtcatcaccctcttgttcgcccagcggcgccggcgatcggtacagtccgctctcgagtggacagacctccagtgaaaggaagtgcttcagcagtacgggagccacactgtcgctgccgccgaagaagaaggacatctacaggccgtattccttggacgacaagccggcgcacggctatcgaagaagggtaccggcggaggaggacctgcatgcggcacatgctatcctggatctgagtgcgagcacagccttccacccgcccacgcaacctcaccagttgcagcagcagcaacagcagcagcagcagcagcatcagcatcaccactcccagcagcaacaccttgccccgcagcaacatcactacttgccactgcagcagcaacagcagcagcaggcacaccacacccacttgccaactctcgaggcgcatgcgcatctgcgcagcacgtcatcgattgccgaactggctgcagcggccagtgtggtaaatgagcaacgccccgccagcaatgcctcgagtgccagcagcaatcacatgcccagcagtcccagcagcaactcgagcagcagcagcagccaggtgcagaacgagaacagcaacaccaccaacacgaacccggatggggatggatgtcttcaggatggcgagcacagtggcgcctccggagcgtcggccaaaacggtggcctacacctacgaggccttcttcgtcagcgatggccgttcgaagcgcaaacatgtggcggatcctgcagctgccgccagcggagtgcccactcctgaccagcagaagaccaagtacacgtgctccgagtgtggcaagcagtatgccacctcctcgaacctgtcgcgccacaaacaaacccatcgctcgctggactcgcagtccgccaagaagtgccacacctgtggcaaggcctacgtttccatgcccgccctggcgatgcacttgctcacgcacaagctatcccacagttgcggcgtctgtggcaagctgttctcgaggccctggctgctccagggtcacctgagatcgcacacgggcgagaagccctatggatgtgcgcactgcggcaaggccttcgccgatcgttccaatctacgagcacacatgcagacccattcggtggacaagaacttcgagtgcaagcggtgccacaagaccttcgccctgaagtcatacctcaacaagcatttggaatcggcttgcctgaaggacgaggaggagctgatgatgtccatgtcgctgtcgatgcacgacagcaatagcgagagtggggccagtatggcctcgtcgccgccacacgagttccttgagcgcgtcaaactcgagggcagtggaggagccacttatgccatgtaagcatagaatacattgggcgcgctacagaaatctctaaggacttgaagccaagtcgcaatccggctcgggtgaccagacttagacatctctgttgcacaaccgataaacagaagcggaaggatgtgctgtaactgcatagctggttagttaatttaccgttaaagttaaagttaccgttaccatttacaactaggttaaccgatagccgtttttatagaagatacatacatcacaatacgtccaagagcaaagtgtagtagagtaacacagagactgtagaaattcgcattaggcagccaagcaacaaaatactcaatgggtgtgttttcaaaatctgttatttggtttgcgaactcatttttttaaaaggtgcctctaaacgtatgcaatggaaatatccaaattcatggtcagattttgaaaacaaccccataataaccaactcaaaatggttcttcttttaagcataagtgagttgaacattcctaaaaaccaaagcattccacaaaacaaaaaaaaaaaagaaaa

SEQ ID NO: 402 - protein, 653 aa, DROSOPHILA
MPRCLIAKKWKAYPWLDRTEDTSNQQQQQEQSAPNSPRELEELHLKSRRSTLDDDEEIDVVGDKFLIKLEKQRTTADAAAAAATSSEAATSHSSNSSNMEASATTTTSKCWGPSSPTAGTTAPSPPPHSPEAATRVAGNVYNGYTRELSPLHYTAYLPRMESEITVIRAAATALVAARTSGNGSGDQHLAAYQTPPSSTTSSPSCSPSGAGDRYSPLSSGQTSSERKCFSSTGATLSLPPKKKDIYRPYSLDDKPAHGYRRRVPAEEDLHAAHAILDLSASTAFHPPTQPHQLQQQQQQQQQQHQHHHSQQQHLAPQQHHYLPLQQQQQQQAHHTHLPTLEAHAHLRSTSSIAELAAAASVVNEQRPASNASSASSNHMPSSPSSNSSSSSSQVQNENSNTTNTNPDGDGCLQDGEHSGASGASAKTVAYTYEAFFVSDGRSKRKHVADPAAAASGVPTPDQQKTKYTCSECGKQYATSSNLSRHKQTHRSLDSQSAKKCHTCGKAYVSMPALAMHLLTHKLSHSCGVCGKLFSRPWLLQGHLRSHTGEKPYGCAHCGKAFADRSNLRAHMQTHSVDKNFECKRCHKTFALKSYLNKHLESACLKDEEELMMSMSLSMHDSNSESGASMASSPPHEFLERVKLEGSGGATYAM

SEQ ID NO: 403 - DNA, 19175 bp, DROSOPHILA
cctcgactatcctagacactctggcagatgtgtgtatgtgcgagcgagttcgtttgaggctcgtaacaaattgttgggttaattaaaaaaacataaatcgttttactctttatccacactctctgcgcccctcggcggctaaataaccgtggcaggtatttgacggccctttcatcaactgaaatcagtcaaagatccccgcgctaaagaaatgttgggaaataaatcacgctcttttcgccagaaataatttcactttagacactttttcccaccgccttactgcccataatttttaattttagcagccctatgttttgataatgcaaattaaatcgcttagccaagcaaattgttggccattaaggtgttttgatgacttttagcccctggaaacttgatctggccatcacacacttaaattgtgtttgccagcctccgctgaaccaatcaaaatgaattaactaacttttgttgtaaatattcatgacaaagttccagatacaatgccaaccggctggagggtccgtaaaaaatgagtttaataaaaagatcaaaaatctacgaacttcatttgcatttcactcaaagcggaacgatcggaatggaatggccagcgtagaccgtgtgggaaccatatcaattgagacggaaatcagtccaaggtttcgaattggttatataatcggagcaggaaaccgaatttatccaaataaagtgttggccaaacgatgcattccatgactttggttggacctcggagcatcagaatttaaaaataatgtattctatttcccagatatattttttcaatgcaattttttacccattaagtgtaagttttgtcaaaaatgtcggtattgcattgttgataagattgcctggaagtttcactaaatttccataaataactcagtcaatgccgatatatccctaccatatgaatcagtggagtcctataaataatctcttaattcaccattaaaaataatatcaacacttttatttatagggctttttcagtttattttgcatgtttgtttttgtgggattttgtttgaaggtttttgtgataacttttaaatttattctgcgtacttaagctggaggaaatctaaggccgaaagtgtatgtacgtatatgcgacgaagcttccaatcccttcgatgtttttacagtgtattagttagcgatttttgtactagaaagctggcggatgggaggggatgacgagaatgaaagctgctccgacaaaaaattagctaagtcttaacggctaggtagtcaatatgcttaagtaactccgtttaaagttaaggttacgagtgcgtttttacatttatgcgataattaactcatattttatacatttacagtaagtttacgtcgaagttcgttatttttagtttgttttgttttgcaactagagaactacgtttaagtttacataacagttaaatagctaaaaattagtcaatttttcgatcgtacacctttttgttgaatagtaatatttaaaatacttaatagtcatgttcaaagacgaatcaaaataagagcttccgactttcgttcaacagcaaattttcaattatcaggtaaaaagttcaaagtgctttcttcaactttcagaaatatttggttttcacattgcgccacaagagccagattctgcagccgctggcagcagatccagtccagcgaggaggccgactcctccacacttccttgggctggtccagttcccccagcaatggtggtgggcgtggccatcggttgggcggccggcggtggcgcctcctcgggccaccagttctcccactctcaatacgccgtcgctgcgccgggatgcatcaggtggtggtggtggtgatggtgtccgaaatggttcagcgggttcatggcctccgcactgccgctcggcgccgtcgtgtggtaccagtcgctgggtgggtggtgctgggccgccgggtggtacagtaggtggtggttgtggtgcagcatggaggcggaggcagcagctgcccccggagagggcgccgcctggtggtgatgggggtggtggtggtgcgacggcggcggtcccagcggcggtggcaggtaggcggaggcagaagcggccatcagttggagggcaggcgaggacttcgggtcgctgggatgggcggtcagctgttgctgctgctgtgcctgctgctggtgctgctgctgttgttgctgctgctggtgctggtgctgctggtgctgcagcaagtgggaagcactgctgctggccgtgctgctgctgccgctgctcgaggctcccaggtggacactgtgcatcggattgggctccgacttgatcgagtgcggggaggacttgatgccgcttccgccgctcaggctgctcaccccgctgctgctgcctgcacttccatccagtcgggtcgaaggcggcgtctgggctccgccggtgatgatgctcgagctggagctctcctcgccctcgctgtcgtagccgtgggatgggctcttctcgtccacattgccatgcacctgaaggaaacgatgaaacaagcgggagttagtgggagtcatcaagtgagcggcactaagttatatgcgttgcaaattatgtatgatcttgaaaccgaggattcgagtcctttactgtgttttagtctagctcaacttaccttcatgtgcttccgcagcgaagagggatgcgtgtaggacttatcacagccattaatccggcaattgtagggcttgtccgacgtgtggacgtgggagtgcttcttccgatccgaggagttggcgaaccggcgatcacagccctcgtgctcgcacttgaagggcttctcgcctgaaagtaggcaggaaaacaggcgttcaatcagttttaataggtaagaatgtggatcttaaactataacgacttgctgttctgcagcaataaataccattatttatgtgacacgcataaaataaataatggcaccagcgagcacaacatggaacagacgatgaccatttatgggctcacaatttttatgaactgtcctgcacacacaaacacacacacacacacacacacacacacacacacacacacaattcaataaaggtgggaaaagccgagtgtccgtccaacttatttacagggaaaacaataacaaaacacaagatatacaactggggaaaaaatcatataaattattcgggatcagggggcccattgttcgagggatcccgaccctgtgacccgtccaccaatttcacctgtgccgatgccaattgtcctttttgttatgtgtccctgcgtccgtctgtccgtctgtccctttggatgcacaagaacaaagcggcaagggtaaaggaaaaggtcacaaggttatcgttattatttgattgctgtgcgcaacaccttttcaatcgaagagacactgcagttccccctttgacccaaagtgatattttatagcttattagaaaattatttttgacagcggtggggcagacggaatcttgacggcgagggtgagagagataaaatcaggactaaacataaataatatgggttagcctataatttggcggagatttcagggaaattaccgatgcaacctctgttttaaatctaattatatatatatctataattgcttgccagccctccctgtccttgccacattaagcgccatccgaagcccataaacaagccgagtgaattacgtacagaagtatctccgggtaagtccacttagcatatggcatttatgtcgcagataaacggccattacatgcaccacaagctttatgacaattgcagctaagcggctcagagccccgctcacccccgcccgcaaataaacccacgcggatccgctcacgatgacaataatcgaacattttcacacctcgagcttaaagcggacaatcgctgtggggcgggggcagcagtgggttaaagaaaagctgccagctggactccaggtggggtttcggggtagggctttgtgagcccgcctttcagaagacatccagcggcgacttcgcgcccagctcgggctcaacaagtttcagatcttttttcgccttcgtatttcgttttcgttttgtgtaatttaatactaatttatgtgctttattatccgcatttgaatacgctttttattttggggccttaataagtcagagatacacacttgtgtgtaaataaacagaaatcggacaaacgctcttcgatttgaatggcgtgtcgcattgtgattgttattttctatttgtcttttctattaatttgtcaaaatgtgaaactcataaataagcattacgaaagtgccatcgggaactcagttatgtattttgacagatcccaagggtcttaaggcagaacacgcgtgacgaatgcacttcgatgtgctttttgattgagttcgaacggaatgtggcgccagatgaatcgttatgggtcgctcaaatcatgatatccaaaggttatatgtatagataaaggaatgggagtcttgtatcccgaagatactcacagagcgcaaaacttaacaagcccgataaggactctcttgatgtaccccttaaatgcgctacacttttgcactcctcgatcatcacgggcggctatcaggtggctgtgggaaacgctatctgcgaacgctaattagtcataaatgggacaggcagctgactcggtgccgccaacccgctgggctcctatccgtgttatcagtcttatcaccttattttcggggaacccagcggcgcatcggtgcccgactgaggccatagcccataacccatatcccgactgaacgcggaacagagagcgcagaaagcagaacacgtccgcatatccacatatccacatatccacatatccatctcctggagcgctgcggtctaaactcagcgggggagacggctgaatgcggcacgcgctgcggccaaggacattaaagggttcgggtcccggctaagtgcagcgcagaatacgcataattttcacattccactgcgaactggcgggcattaaaagtggaatttaaatatgttttattgctttaagtttcgtggtccgatggctcggtccggggcaaaataaccgaaatatcgtcgcccatttataaaatgtcaatttcagacgacgttttccgacttcccttccgacggagcgacatgaaagacatccttggcgcacccttttcggccctggcaaggcgccataagtacagtgggccccctcccggaacgtcctccttcctccggcaaatcccacttaggctgtgcgaatcgacaaacttatttaaatatttcaataaagtaaatccgatggcaaagtctccgggcatttaatgtaggcgtagctgcgaaataggccggctgccttgtgatttgcatatttatcgggagctgctgttctccttttcttttccgcggaaagccccaaaatggttaatttcctttaaaaaaaaaaaaaaacgggaaaaaagctggcgctcctcgcggtcggaacgattggaatcggcacagactgcctgtcatggcgttttgtgtacagctgcagagttgtttgcttgttttttggggtggttcttatatttttggggttgctttgtaatctcctccctgcggacgtgtatgtgtttgtgtgtgtgtcagtacggtcgtatctgtgtatgcgtgggttaagccaagaaagttgtacatggccaaatatgtatgtatgtatgtgtgtgtatattaaaatatatgtaccgcattgtttgtcggtgtatatggcacatgttttggctttatgtaactgctgcaaagctggctgtcatttgcagacaagtgccgagccgacggcctttcccccaccccccatttccccatttccccaccgctcacacaaccacccacccacgcttccgtctgaaattgtttttgttgtggctattatggggcgttgtttctttttcgacgggtaatggggctctctgatgtttcgggccgtagacatcgcagaagaggaaaaacagaaatgagtttggccaaaatgattccatttgggctcgaagatttgcttggttgttattaaaatatgtttggatggtgaagacagcaatatgtttttcgttttttgcctgagaaatgggtggatttgaatcgtggctcttaaagttgacagactattgatacagagacacatacatcttaaggcatatgtaaaggaaaataataatggtaaatgtacataagaaattatttaacaagtttccttaaactaaccattctacgttgcctgaagagtctaccaaatcggatgctcaactcattattttatcattttatcaccagcatataccgtaagaacaacgaagtccagaaataccaaagacctgtcataaggaagcaacaggagatctggaatcgtccgtacgtacatatgtacatactagtgtgcgcatatacccgtacaataccctggctctggacgtgatcgccgctaaccaggcgatgcaaattaagcatcattgacagtcgttgattaattggagtgaatcaggtttttaatttgcagcaacaaacaacagatgaaattaaaaatacacagctcaagtaaaacatattttccggacgtcagagtgacagtcgcttattaaaggcatttcgcactggaataaattaaaagcgatgggcaaaaaacactaaacaaagcgattccagagctcggccatcgcgcacctctgtcttaattgccgctaaataattggtctggtaaatatttattgcctgcttaaggacctctcagcactcgtcctcaatgggaacaatagagatcctggccaacgccatcgccctcttttacgtaacaacgagtgcgaaagaaagggagggagctgggatctcgggccagagaatccgagggatgagcatcatcatcgctcatgtgtcaacagcatgcaatgcgatatgattattattatctaacaatacaataacaaaactgctactttttgcctgccggtctctccatccctgtcttcccagcacctccgcttgggttgttgacactcttcggatttgagaatcctgagcccattgtgtatctgtatgtatatctatatcagtgcttgtgttttagtatctgtatctgtttgtttgtttgtttgcttgcagcccattttttccgctgttgtcgcttctttttttcaccgctttgctccttttgttcctactgctaaagccggaaaagccaaaccccgatttcctggcggtttacatttcaatgggcaattttccatcgcttccccccttttgtctcacttttcagtagcgttgctagggagcagtgagtacgagtattgatgatgagcatattcttgggaacattgcgaggatccaaggatggtaaggcgggttcctcacgaatacaagcaggtggcctttgagagtagctcgtggtcggcaggagttggcatatcccaacgctatctgggaatccacatttccctgccgtctaatcatccatcccagacgcattttcccacatgccgcttactttgaatatttataacagttgcctgcatctgatgaccaaattaatggccagcaattccgctccattccataataataataataaaatcataatttaagtgcaatgaatgccgcttgtcaacggccaaatgcaaaatcctcgggctcatcattataatcgtcgtggatgaggatgatgtgcacccctcggccagagaagttacctatgggtctggtctgccacacagtcggtccattgtttgcttgtttgacaaaaaccatcgttgagtgaattcggtcatgatttatgatttctgcgtccctccccgacgacagcaatgcctataaacaccccgtcctccccggtttcctcggctaagcagctcggtcctcacataattttcgctatttgtttgcagctttgccgtttgctgtcaagtgatacgttaataattgacactggggtcagtggctggactcgcagcctctgggttttcctgcggtttttctccgcacttcccgagatactttcggaaactgtttcgaaacaaaaacagactgaattttccacttcgttggcggcctgtgcctaatgaggaaatgagaggatattacattgggaagactaaggaagagggggcatgcgtacaaggaatgtcaagggaggcatagccttcaacaactacgagtataaccacaacttgcctgtctttcgaatctttagctttttacatcagtcctacaaattttcaatgaatcaagagcatgaaaaactttccctcccttgccatacagcataaaatcacatgttcagagctcgactcgaaaattgtgttttgtgaacaaatttttgttattacacacggctgccacatgcagacgccagacgcacacacgtcttagtcagccgggtctggaaaagtttttctggctgccccagtcgaatgtgcagcttgaatgcattagatgcaagccgcactcccatgcaggaggtaggggcacacactcacagtctggcatttgcatatacatatctcgctgcgcacacacacctcgaaagcgttagaggcgttagtagcatggcaaacttgtcgaaaatttgctccattggctgctgggccacaaaaaagcagagtcgcagaaggagaaacccaagtcagagccagacgaactggccatgtttggtcttgtactcgtgttcagcaaggctgttgctgtcattgttttactaatagcttgctagttgtctatctgcagattgaattcatatagtttgtgtacacatgcctgggtgtgttcgttctatggccgcctactcgagcgaaagttagttcaaggttgggaatgggtggacttaaagagttgcatcatttgcaatgctacttcaacggataataagacttggaaagcgcactttatttatttttgaaatttaggaactgcttaccaagttgatactgtgcgaaagcacgtgtaaagttctcccttaacggccagcttctcccttaacgatcccttaaagactaagcagctaggtaagacataattgactgttcggttcggtttctatgtagtcaagtatctttttggattgcagggcttgaataacactcggaagagaaacggagcgaagacaataagcaaaagtagcactaagcccattgtctgaacccaaactgcgtacaaacaggggcatagctgaaatgggaagtgccctagtgcaaatgagtgccttggtgaaaatggtaactctagtcgcaccggttgacaaagaggcatcgggccgggattagccgacggagcagctgatgtcccaaccgcctcatgaatgaactgcttacgtggtgaaaacgctgcaaaaagaaagcagaggaagtggagtaaaggaccaaatccacaagaaagagcgacctggccgacgctctcaaggatgagaggtgtcgctttgtccctactcggtcacggtgaatcggtgtctgtatctgtttggtatctatctcctcggcctgatttttgctgcttagcgctctttaagatcttaatcttctcagcccactcacccttctcctcgcactctgatccccttctgtttgcctgtttgcttgtttgtttgttttttcgggttccatcaagtagaaaatctcttcggctgtttgtcagaaattaaaatgtcatcaagattgtcatcgcatggatatggatatgcgatgtgacaactccggcaactgaaggaggatgaaccgtcggttcggtttgttttcggattcgatttgattcgattcggattccttatcttaaatggcttgttaaagtttaaatgttgtcaattctaacaagatccgtgtggcgataaagccaatcaatgacatcaggcgacaaatatttggggcgagcgatcggaataagaggcgcaagccaagcagttgcaatagaccagttggctaagaagttcgattagaaattaaccctcttttatgttgaagtagatatgtgatacttattaaaaacgttcttctcacatcataaacatttcaatcgcacgttctctcacaccttcctcgtgacccttcgcacttcagcaccttcgttcgagtgtatcttatcgatactgcctaatgaacacatcaaaacatcaactaaaattgcatttgtgtttgcagcactccagtaacggagcacatccatatttcggggcaaacgaattcgcattgatcgccgaacactgaaagtcgaagggagaagtatcacatcgcagtggcccacatcccagtggcttacactcggctgagtcctgcagggctgcaaggaaattcgatcatgctgagaacgagaacataaatccgagtgccctgaattggctaagtataccgcaatacacctattttcacagtagccgtcggcagggcgtcatggagtccatagagtccatggatccattatgccattagatatttttggcgtcagcggttgtaatattagccaagaacagtctgcctgacaggcggttgtcacacaaactctgtgtaagttcagcctctaattacaactgacaatgtttttacaataaattgcgtgcccggcgaggctgttccgctgcctggggctttttgggttaaacaatcaaattctgtgccccagacaacttggaggcgttcaagtggtacaaattcgtctaaacgaaagcgacaaacgatacgaaaatgtcccaaaggcaacaaataggcataaatgtcgacctaagctgatttgacaagcacgcttatagcggtttattcagcgatcgcaatttttactatatgtttttttctaataatgggaattatactctggaaattcacagtaaaaatagccaaaaccccgcttttcgatcatgccacgcattcccaagtcataaccacacggttttggcaagagcatacccagatccacacaaaaatacctggttttgctgagcagttgccttgtggcctcgctgtctctgttctttttggctgtttaacatttttgcccatatgaataatgatttcgtttttcccatcagctaatttatacaagtggggcattgcgcgcggggcccttggcgcgatttagaggattagtcaggccttacttttccataattctcgaaaggcagcataagaatcagaatcagaaacagacacagaatcgcagaatcgcagaatcgcagaataccgagtcccgggtctctggtcccgggtgccagtcccagaaccgagacccagttccagtcccgggcttcatttcctacctgtgcgccagaccgaacgtgtgcagatataaaaaatatgcaagatgacagtttaattttatggtttgtctgttgctgatcagttctttatgcgttgaaattgtattcttattcggagtcgggctccgtctctatctgggacctctgagggtctctctttcggggatccgctggaatgcgaatggagtctggtacgtggctacttttggctcctttcaggtgaggaatttaattaatttgagcgcgacttctaatgacaaagtgggcgtgaccagggcttaggaattggaacgaaaacttgccaaaatgaaaggggaccgaggaagggaatttatcaaagctaagcctcatttattaactagccggggtaagcagcttacgtccgaccagccatgaaagtgaaacatccgagggctagctccgctgctcagatattatgcaacagcccaacaaaatggctacttaactaatagactcgaatggaagaccaaaacaatgatactgccaaagggttgcgagcacaggacaaacccctgccgcgacaaagcgctcgttttttacgtctctcgctttttggtaaatgaaattataattcctgctctgggccagtcgggggttaagaaggaatgtacatacgtacatacatacaaaactgttttgacatttggaaaatgcatggaaaatagagaggatgcaaagcaacccctcctgctcaggagcgtgacgggtggatgtggatcgactggcattgttagttccttgttagggtgccacaaaggggttccaaatcgggggttgtcactaattagaatgggtgcgtatgctcaattaccatagatgtgtaaatcactggcttggtactgcaatatagatcacataaggagccttgaaaaataattacttttccattaaatagtaacgaggccttctagatgcaaatttacacggagcagtacaactcaatcacattgtttcattcccgccgtttcaaatacatggcaaaagcattcgagtatacatttcaaatgaacagcttaaaagtacacagaattcggcactaaatgttagggcccataaatttacgaagcacaaaaaagtttcgctctagtctgtccagtcagtaaatctaccaactttgcttacattcagctgtcaaaggcttggaccacaccagaaatttatacacttttacttctggtacataaatccccaaatggcgagaagcgaacttttcagcttgtcaaacttttagccgattgcgatcgtgtgtcatgtttggtggtatttgacacttcaaattgagcgaaacgaatgcaaacatggtgtcctcgtagacggtttcagttgttagggatagcgacaagggtctccggcgggggtgctgctaattaaatgacgaatttccctcgctggccgttctggcctcgaaatgcattcgtcattaggcgagcagacccgagaattgctcctagggagcgtagctaattgattttcagtcgccagttgctcggccagcgggagggaggaggcaggagatcctggcccgaatatgcgaccaggtagtgaaggtaaggtaatcagctcgagcacatcgcaggttttttccaccgcctcctcccgctgactcttcctcgtctactggccattgttctggcaagagtcaaattctgagaaaccaaacacacagtttatccgcaaaataaaaagtgattctgtctctcgcttcgatgtatctgtagctatatccgtatctgaggctgttcggtgtctgtttttgtgaaaaccattgaacccgcaataaagtcatcaatcattgacatttgccagcgctttggttttcagaattttgtgttttgaaaaattattgaattggcgccgagcaagcaaaaaatgcattgagaagtgggcagtgcaaattattttgaagttctataatcatctgggttttggtcctgaaaacaacattgattcctacagatccgattagacaatctgactaacgtgtaactacttctcgtataactttctacgtgtggaatgaactatcattcccacctcagttaccccaaagctttctaaaagtgtaaataattgcataattcacttcatcattcagagctgaacaagtccataaaagactcattaaaaaaacacttgcactcaattaaatggagccgagttggggccgaaaggggcatcctggcaaaagggggagctaatcaaacaagggtcgcagctgccaggacaatgttaaatgctaaactttgccccgcagcataattgcacaacaacaaggcgcctggggaagcggaaagtgagaggttgcacttgaaaagcgaggaatagcggggaaaaccagaggtggtgggctttgggtggtgggaggttgaagggggcagctgggagctggttcgcagcagcttaatgagcttggaaggagcggatggggcgctacgaataaaatctaaccacaaagttgttgaatgctcttgtggcagtcggatcctgtggccgttgtaggtgttaatgaataaagttgtttgtggtccgccgggcggagcggagcggaatgtagtggagtggagtggagaggaaagaatcgtgtaaaagatggctatgtgtgtgcaaaccgcacagcgtgataaacgccatctatccagacacacagactctcgggccggtcaacagagccccaaacaacaaaaaacaacggccacagagcagacaaaccttgattgtttgccgggttttttgtgccgagtttaaggggcggagtctggtgctggggggggggggggaatacaggatggacaggatggacaggaggctagccaaaatttcagacggtgacggggacaagtgcaaaagttaacacaacgcagtgaccggacggaacggtgggaaagaaacaaaaagagacatatgcatgtggtggtttgtgtgagtttgggatctatattctgaaaggactcttcccactattactcatatatcagttgaatcgaatttgttttagatcatcgtaactattggtaaatcgaagcaatgcaatctttgttttaaataatagagatatatgtaagaaagtaaacataattattaagccgagagaaacacacaatttatgaggcaatagcgaaaaactggatttgactgagagttatttcacaactataatctcctactctcgttccacactcgaatcttaaagtcaactcctgccgcggtgtactgaccccttcgatcagttcgagctgctacagtggcaccatttgggcagatctatatcggctggatccataaacacgtacttgactgccctgctccgttttactcacccacttatcaaactcggacccctcacccgtcccatcggcgaggagtggaagccaggtcgtaaataacctttgcataatctaaatcaaaagcttaatgtagcatggcgagtaacccaaacagaacagcacagaaacaatcgcagcgcaaataaaataaagctagaggagtggaatgcgaatgtgcgaatgcgtccagtaatccggcgagtgttaccccaatttcggtttcgatggcttttttgagagggccagcacggagtgcctcggaagcatttccgagccatttcaaacggaagttttgacacgtgtcaacacagtgtgttcgagtgtgtttatttgccctgggtcggcggtgtcaatgcaataaaaacaaacaccagtgccaagggacatttagccgagccagcgatgctgattgaatttttgatttatgcggtgtggaggatgctacttcaagtgcccgagtcgtatggaaaggttaaaggccccgatcccagccagataccagaccgatcccagctcgatcccgatccgtaatgaagttgtgcgccggccacttgaaagctaatcaatatgttggctatctccgacaatgtgtagccaggtcaaccaatcataggcacacacaaatcagtcagaggtcctaaaatgcacttttctgctgcatcacggcggagaaaagaaatatgaaattagtcaaaaatatcatcatacagcaaccaactcattataatgccacatgattgttccaaaatcgaacacaatatggcggcgtctcgaaatcaaatcgaaacattttaattacctttcgatgagtgtgcaaaagaaaatactgttgtccgaacagatttacagaaatagcttttttgtgtggctaattctgtgatttatgaatttctttgtgagtttataatcgcggtaactacaagatgaagctataatgaagcccgacgtcttattttaattcaatttggaatcatgaggccaaattacaaaataatagaaataaagaggcaacaacaaatgccaaaagccaacattaaaacaacaaaatataagcatgctggatattgcggaatattgctggccatattttcattcttctcctccaatttccaagttaattacgccaaggctgaggtcaatcaaggataatccaggaccaagcgatatttgctggaaagtttattaacctgattggcgctcttttcaccaattatgcgaaactttgttttgtgttttcgcatttcatgtttgctttcccaacttccacttgttaattgattttaatggctgtgtttcgccgcttctaatgagccctacatgctcagccataaatttcaatggaacaagttcaacagccactggaatcaaagtcattaatttgcgttaagctccgtttctggctttatagttcgacttctcatagatcacgactataccgcataaattgtattttaaagcctccaactatggctatgttttttcaaaagtgttcaggctatgagctgcaaagcgattttaatttatttttgaaagacaattgaaagagaaatgcttgaaatgggcatgattaatgatggatttaagaaaaattaattatattgagaatttgcatagagcggttggctatcaaagtaatagtaagccattattattaaataatacaaaatctgaagccgacaacaaggcttaaagtataaaaaacaaaggagtagctaaactaaatttttcagttcctttacaaatttgaccaagtttccaaacgtagttaaatacatgccagtcaaaatccaaagtcaagagaagtcgcaggcttagggaaatactaagaccaaaagtcgaagtcaacctaaagccgtagagtaatcctagccgtaaggacaacatctttgcgggattttctgggcgcggaagagctttgggcgcaggttttacaggtgtcataaaagatgacccgcccggccagtggcgggttaagccaggtagtgggcgttgcaacgacttttgccgtcggtaacacgctcacatcgacaacgtccgggatttgcccaggcgggcaagggttatgcccacgcaaggtgaattctaagagattgcagacctagcatgtgctattctaaatataagcggttaaaatctgcataaggcttcgactttctattagtattaagatctttataaaacaggaataattacacacagaatttgactgccaaaccaaaactaaataaaagtattttcttagtttaatgaatggtttaatatggtttaaatataaagcggaatgcaccgccacacttacctgtatgcgtccgcttgtggatcttgaggttctcgctccgggcgaagaccttgccgcaacccgggtgcgggcaggcgaaaggtttctcgccggtgtggacgcggatgtggttgaccagcttgtacttggccttgaaagggcgtccgttgcgagagcagcccacccagaagcaggcgtgggtggtgcactcgggtccgcccacgtgctccacggtcaggtgggtgacgatctcgtgcatcgagtggaataccttgttgcaggtcttcctgccgcccgggggcaccaggcccggctggtcggggtctatccagaggcactgcatctcctgcttaacgctggaggcggacgaggccggctgatggcgcatgtagcgcaggaaggcccctgctccggccgggtgcatcgcggacatggcgtggtgggacgggtggtgcacgaccgggtggtgcactgccgccgtcgggaagttgccgtggtggttgtacgggtggccggcggcgtaggcatccgccatgcccattcgcatctgatggtggtgatggtggctgtggaaggggtgttgtccgaacccggagcccagctccgcggcctgagcgggaaagccggagaagagcatggaatccgctgcggcggaggcctgtccggcggatcctgccacaccgtactcggcctccctcctgcccagcaaaaagtcccgggaggcatagctgttaaagtgcccatatccggagttctgataggctgcagcagtggccgccgcggattcctgatcctgttgctgttgctgctgctgttgttgctgttgttgctgctgctgttgggtcatctccagttgctgctgctgttgctgctgcgcgttgctgttactggcggtggtgttgggcgacattcgcagcccgtagctggccaggtggtgctgagccggctcaatgaaggcgttcatcatcatggttacagtgttattgctcgcttatatgtttttaaaattaattcagaaagaactgaactacaagttttcgattcgcactttgctaggccaatgagcccatcacgcactgaggtcacctcacttagctgtatatactgtgcgcttatttcgctcttagatatttcgcatgcgacttgatacttatttacgtaatgcactcgcgcgcgatgcgtttctggggcgttcgaatcgcagcaagacttgacgctaaccgaatgccaagacttgacgtttcaagatgcgcagcaggactgaaatgctcctgaaattctaactcgctgctgtgttgcctcgtgaaaatatctgccgacgatcgcatgcgtgcgaatgggatcgacctatgcacgacgtaaaatgaatagagggtaacgaaagcgcgagtgcgagcaggccaggcgtatgacctgcctgtggtgagttgcgcttgccatggtgtattcggcacaagccaccactctgtcggataggcctgagccatgggtgcgagtgcgacaactctaagaaaatggccgcctcctcgcatgctccagagtcggacagaagagcacagaggctgcgcactcagtccaattggaacccacccgaccatagcgccctctcgctcggcaaactggtttcgcgaaaattaacacccactgcggttggccattgggtggtgggccgacagcgtgcggcgtgcgcctgtgcagggggcccaaatgctgattggaccgacgggcagccaattgaaagctcgcggggatgcattttccagcccgctcctcattgtcacggcggacgaatagcccgccacttcgggtagcccagctgtcagcttatcaaattagttgtttattttattgattttaatgatattaagcacattccgtgctcggacatcggagatttccagccgttttgtttaggttgcgccataaagacgtacgagatttcattagcgccaaacgctctgtttttcatttgctaatttatggaattttcaataagcagtagtcgaatcaatacataatcttgtatcaatcgacttgattggattctgctgagtgttaagtgccccggcaaagtggcttttggggcagactgtgaagtgatacttcgcctgcatagggcaaaaatgtataaatttattttcatacaaaacatttgctttgtgataatatggtataacactatgctgtatgtatatagtcagacgctcttctcaaaatatatgattttttctatttacaatccaaaaactgagcgatgcaaaag

SEQ ID NO: 404 - DNA, 2947 bp, DROSOPHILA
cagtcctgctgcgcatcttgaaacgtcaagtcttggcattcggttagcgtcaagtcttgctgcgattcgaacgccccagaaacgcatcgcgcgcgagtgcattacgtaaataagtatcaagtcgcatgcgaaatatctaagagcgaaataagcgcacagtatatacagctaagtgaggtgacctcagtgcgtgatgggctcattggcctagcaaagtgcgaatcgaaaacttgtagttcagttctttctgaattaattttaaaaacatataagcgagcaataacactgtaaccatgatgatgaacgccttcattgagccggctcagcaccacctggccagctacgggctgcgaatgtcgcccaacaccaccgccagtaacagcaacgcgcagcagcaacagcagcagcaactggagatgacccaacagcagcagcaacaacagcaacaacagcagcagcaacagcaacaggatcaggaatccgcggcggccactgctgcagcctatcagaactccggatatgggcactttaacagctatgcctcccgggactttttgctgggcaggagggaggccgagtacggtgtggcaggatccgccggacaggcctccgccgcagcggattccatgctcttctccggctttcccgctcaggccgcggagctgggctccgggttcggacaacaccccttccacagccaccatcaccaccatcagatgcgaatgggcatggcggatgcctacgccgccggccacccgtacaaccaccacggcaacttcccgacggcggcagtgcaccacccggtcgtgcaccacccgtcccaccacgccatgtccgcgatgcacccggccggagcaggggccttcctgcgctacatgcgccatcagccggcctcgtccgcctccagcgttaagcaggagatgcagtgcctctggatagaccccgaccagccgggcctggtgcccccgggcggcaggaagacctgcaacaaggtattccactcgatgcacgagatcgtcacccacctgaccgtggagcacgtgggcggacccgagtgcaccacccacgcctgcttctgggtgggctgctctcgcaacggacgccctttcaaggccaagtacaagctggtcaaccacatccgcgtccacaccggcgagaaacctttcgcctgcccgcacccgggttgcggcaaggtcttcgcccggagcgagaacctcaagatccacaagcggacgcatacaggcgagaagcccttcaagtgcgagcacgagggctgtgatcgccggttcgccaactcctcggatcggaagaagcactcccacgtccacacgtcggacaagccctacaattgccggattaatggctgtgataagtcctacacgcatccctcttcgctgcggaagcacatgaaggtgcatggcaatgtggacgagaagagcccatcccacggctacgacagcgagggcgaggagagctccagctcgagcatcatcaccggcggagcccagacgccgccttcgacccgactggatggaagtgcaggcagcagcagcggggtgagcagcctgagcggcggaagcggcatcaagtcctccccgcactcgatcaagtcggagcccaatccgatgcacagtgtccacctgggagcctcgagcagcggcagcagcagcacggccagcagcagtgcttcccacttgctgcagcaccagcagcaccagcaccagcagcagcaacaacagcagcagcaccagcagcaggcacagcagcagcaacagctgaccgcccatcccagcgacccgaagtcctcgcctgccctccaactgatggccgcttctgcctccgcctacctgccaccgccgctgggaccgccgccgtcgcaccaccaccacccccatcaccaccaggcggcgccctctccgggggcagctgctgcctccgcctccatgctgcaccacaaccaccacctactgtaccacccggcggcccagcaccacccacccagcgactggtaccacacgacggcgccgagcggcagtgcggaggccatgaacccgctgaaccatttcggacaccatcaccaccaccaccacctgatgcatcccggcgcagcgacggcgtattgagagtgggagaactggtggcccgaggaggcgccaccgccggccgcccaaccgatggccacgcccaccaccattgctgggggaactggaccagcccaaggaagtgtggaggagtcggcctcctcgctggactggatctgctgccagcggctgcagaatctggctcttgtggcgcaatgtgaaaaccaaatatttctgaaagttgaagaaagcactttgaactttttacctgataattgaaaatttgctgttgaacgaaagtcggaagctcttattttgattcgtctttgaacatgactattaagtattttaaatattactattcaacaaaaaggtgtacgatcgaaaaattgactaatttttagctatttaactgttatgtaaacttaaacgtagttctctagttgcaaaacaaaacaaactaaaaataacgaacttcgacgtaaacttactgtaaatgtataaaatatgagttaattatcgcataaatgtaaaaacgcactcgtaaccttaactttaaacggagttacttaagcatattgactacctagccgttaagacttagctaattttttgtcggagcagctttcattctcgtcatcccctcccatccgccagctttctagtacaaaaatcgctaactaatacactgtaaaaacatcgaagggattggaagcttcgtcgcatatacgtacatacactttcggccttagatttcctccagcttaagtacgcagaataaatttaaaagttatcacaaaaaccttcaaacaaaatcccacaaaaacaaacatgcaaaataaactgaaaaagccctataaataaaa

SEQ ID NO: 405 - protein, 609 aa, DROSOPHILA
MMMNAFIEPAQHHLASYGLRMSPNTTASNSNAQQQQQQQLEMTQQQQQQQQQQQQQQQQDQESAAATAAAYQNSGYGHFNSYASRDFLLGRREAEYGVAGSAGQASAAADSMLFSGFPAQAAELGSGFGQHPFHSHHHHHQMRMGMADAYAAGHPYNHHGNFPTAAVHHPVVHHPSHHAMSAMHPAGAGAFLRYMRHQPASSASSVKQEMQCLWIDPDQPGLVPPGGRKTCNKVFHSMHEIVTHLTVEHVGGPECTTHACFWVGCSRNGRPFKAKYKLVNHIRVHTGEKPFACPHPGCGKVFARSENLKIHKRTHTGEKPFKCEHEGCDRRFANSSDRKKHSHVHTSDKPYNCRINGCDKSYTHPSSLRKHMKVHGNVDEKSPSHGYDSEGEESSSSSIITGGAQTPPSTRLDGSAGSSSGVSSLSGGSGIKSSPHSIKSEPNPMHSVHLGASSSGSSSTASSSASHLLQHQQHQHQQQQQQQQHQQQAQQQQQLTAHPSDPKSSPALQLMAASASAYLPPPLGPPPSHHHHPHHHQAAPSPGAAAASASMLHHNHHLLYHPAAQHHPPSDWYHTTAPSGSAEAMNPLNHFGHHHHHHHLMHPGAATAY

SEQ ID NO: 406 - DNA, 4086 bp, DROSOPHILA
tccaactccagttcaccaatagcggtcaggaagctgccttctctgagcacctcctccgtcgtttgcaatcccctctgacggacgccagagaagaaaccaaacacatggtcgaagagggacagattggagggctcgtagttgtcgtagaccacgtccacgtccaagacggcggcactcaaggcgtccacaatctccacaccatggctctggttacgcaactcgaagggcatctcgttggcggattcgtgcagcaacttgtgttgttccgtccagaagccggcgaatccgcgcgttaccctgtgctcatgcagcttcacaatctgcagcactccactcacactgggcaccagggagctcctcagtggcaccccgatgggcgtcactgtgccccggattaccgcatatggtatcttcttgtcgcgctgccgctccaccaccgattttaggtctccatcgatgttgtattgtggtgccgcctgaaaagcagcagttcactcaataaacgccacttattacgtgcattagtatttctatacgcaccttcagcaccttggcagttcgcttgtagtgcacgtactcgcgcgcacacaggccaagtattagcagatccacgcccagtgcaacggattcgtgtaaaaattccattttgtgttatgctattttatttatattacgctacaaaaacatatgtttactcagtgttgctgtgtttcccgctgctcgtaacggctacaaatactaaatattcaccctgttgaatggaactagttcaacgtattagtatatgccatagagtgcagggtcactctaaaatactactttcatatttgaaatttaccgccaaaaagaagttagcttaattcaattcaattctcaatttgcaattagaaaacggccaatgcaaaccaatctatattttaaaactccatcacttttatgtattttatgcaagaatatttatcactaaattaagataattaagccaaaagaggtgcattgcttatggcttgccaatgatattgtcgatggtaaacagcgtggtctttgatcggttgctgctggccactggactgctcccaggtgcatccaccacatccttgatgccattaaaagcttcggcaaggacaggtgcacccgatgacgaggtttcccgtcgattgagaggaggagtaaaggcgctcggcgaatgtagctcctcgtgcagttccatggaactttgcattgctttgctggaactggacgaggcgtccacatcgtctgggcattccctgatctcgggcagtggtcggagtccgcgggcctcgttgttgaacagactgttgaagcccagggatacggacaagtactgcctgtgcagatccgtaatcctgtcggagtaattgggccgctcgttgcagaagatatcgaagtcactcagcggttcgctgggcgagcgaatctctgctgcactactgttgccatcatttgaatcctgcagataaattcatttattcgatttgtttatgagtttttagatgtgcattatacctttcccgattccctctcgtagcgatttggatggccacagtgcctctgcctgcgcgttctcctccggcggtagtttccctgttcgaacatgtccgatgccgatgagtccagcatccagtagcttcccttcccagcactgtcgttatcctcgattgtgttcttgtcccgcggaatcttcacgaagcagtcgttgagggacagattgtggcgaatggagttctgccagccctgcttgttctccctgtaatatgggaatctaaaaaataattggatattatccaattaattaattaattaggagctatatttccttgacatttttatcaaattttgaaagggtaaacatatatactttattttcaataaattaacaatggaaaagatattttataaatataaatcgaatgcgtgtttatcaaaactatttacttcagaatttcacagctttgaatatctgaatttgtatatataaaaatcattttacaatctgaaaaacttgctgttgatacacatcttattagcccatatctatatcctccgctggtttgtttaaatcaagcgatttgaaaaagcaataaaaataatatttgtttatgttgataaagaaatcggaaatatttagtttacaaacacattgttcattttcctgtttttcaaattacttgcgatctattttatatatctggccgccattttttatgcactctgttcattcaggaaaggaaatatatacatatatattttaatatttgttaaagatatgactaataaatttaagccaataaatgaaaccatttcatatggataattaccaagtaatctgcgtgatatttatatattttcacattaagaaattggattaatgctccatatttcaccgacttaatcccagttgtggcaaaagtttcgtgataaaaacttcttctcgggataaaaacttctttggtttgtacagatacttggaatgtggcggttgtttattttggcatttgatttagccaagaatgtcatctaaattttcctcgatttaagacaaggcggaacatttatttttgtaggattgtaaaaacaagagctttagtagaatatatgtacagaaattggaaattttatttgctgatttacaaactaaattcacttattgatctatcaaagatctcgtatttttgtattgttcaattaacttacttatccatgataaacttgtagattccactgagggtcagtcgctggttgggtgcactgctgatggccatggcgatgagggcaatgtaggagaaaggaggcttttccggtcgatgggagttgtgcagaaaggatataggcaatccccagatgttgttgtgcagggccagaaagctatcgatgccctggtagtagaaggccggtgaaaacgatccgcacatcagaccctccatgcccgcacctccgacggcacttggagccagcggattgggtgacacctgggtcctgagataatccggattcgctagcatggagttgaccagctcctcattatccggcagcatcgatccattggcatagcaagagggtaacatttttcaaaacgaaatcccagtaacttgattcaaagttcttttatactctttatgtatctttcgggaactttgtttcgaatatcacttcacattaacttgttagatatttaggatttttgtcctgttttccggttagctgttacttccgattttgtgggcgattcgagcgcgactgtggaccatgtgttgcgtcagccaagaagtccgatcgactaatgaatgaactcggatacgcagatcacttgtaatgcctcatcccaatcttatgggtgtgtgtttttgggggagagcagcgcattggtctataaatatagggatatgcaaacaccctcaccaaaagatccacacatgcgtaagttctcagagaggggaaaacaattttccttgaaaaatttaaattttattaaggaagaaattgaataaattgaaatatgaaataagtataatatatttgagattattatgttataatataataagatgatgttgttaatatttaagtgtattcagttattaactttgtagtactagatttagattgattatatcattactaattaatatccttgcttatactatatctttttcgcatatacccgttatatggcagatctctcttttgagggggcgttcctacaaatatgttctctactctttccatgtttatttatgtccattctcatttgcctgtattttcctcgatgggcggagtcaagaccttttccccatgtgtgagtgagtgtgggagagtcccagtgtgttttgaataatatgtagattttgatttttcaacaaatgaaaatcgagcaaagtttacacttgaattacgggcacttgaaagggaatttttaaatctttggaaataatgtaaagcttctaggatctcatgcgtacatcgttagtcccagttattaaaaaagattatactgcagtattatgataggttacatatgtatgtatgtaatcattgcgtgagttagtcactaatttagcctttttc

SEQ ID NO: 407 - DNA, 1098 bp, DROSOPHILA
atgttaccctcttgctatgccaatggatcgatgctgccggataatgaggagctggtcaactccatgctagcgaatccggattatctcaggacccaggtgtcacccaatccgctggctccaagtgccgtcggaggtgcgggcatggagggtctgatgtgcggatcgttttcaccggccttctactaccagggcatcgatagctttctggccctgcacaacaacatctggggattgcctatatcctttctgcacaactcccatcgaccggaaaagcctcctttctcctacattgccctcatcgccatggccatcagcagtgcacccaaccagcgactgaccctcagtggaatctacaagtttatcatggataaattcccatattacagggagaacaagcagggctggcagaactccattcgccacaatctgtccctcaacgactgcttcgtgaagattccgcgggacaagaacacaatcgaggataacgacagtgctgggaagggaagctactggatgctggactcatcggcatcggacatgttcgaacagggaaactaccgccggaggagaacgcgcaggcagaggcactgtggccatccaaatcgctacgagagggaatcgggaaaggattcaaatgatggcaacagtagtgcagcagagattcgctcgcccagcgaaccgctgagtgacttcgatatcttctgcaacgagcggcccaattactccgacaggattacggatctgcacaggcagtacttgtccgtatccctgggcttcaacagtctgttcaacaacgaggcccgcggactccgaccactgcccgagatcagggaatgcccagacgatgtggacgcctcgtccagttccagcaaagcaatgcaaagttccatggaactgcacgaggagctacattcgccgagcgcctttactcctcctctcaatcgacgggaaacctcgtcatcgggtgcacctgtccttgccgaagcttttaatggcatcaaggatgtggtggatgcacctgggagcagtccagtggccagcagcaaccgatcaaagaccacgctgtttaccatcgacaatatcattggcaagccataa

SEQ ID NO: 408 - protein, 365 aa, DROSOPHILA
MLPSCYANGSMLPDNEELVNSMLANPDYLRTQVSPNPLAPSAVGGAGMEGLMCGSFSPAFYYQGIDSFLALHNNIWGLPISFLHNSHRPEKPPFSYIALIAMAISSAPNQRLTLSGIYKFIMDKFPYYRENKQGWQNSIRHNLSLNDCFVKIPRDKNTIEDNDSAGKGSYWMLDSSASDMFEQGNYRRRRTRRQRHCGHPNRYERESGKDSNDGNSSAAEIRSPSEPLSDFDIFCNERPNYSDRITDLHRQYLSVSLGFNSLFNNEARGLRPLPEIRECPDDVDASSSSSKAMQSSMELHEELHSPSAFTPPLNRRETSSSGAPVLAEAFNGIKDVVDAPGSSPVASSNRSKTTLFTIDNIIGKP

SEQ ID NO: 409 - DNA, 3475 bp, DROSOPHILA
taaacgagggtggtcagagcatcgcaggacatctcctagatcacgtcctcaagtcgcatgaatcctacgccgaactgaaatcccaattgggagaggataagtttatctaccagcatcttaataagttgctgccggaactggcagcagctcgaggattaagccaggtgggctgtctcacccaggatgtccatgtctggccggacttgcatggcaatcggtcgcccatcgcagatcccacgctgcgaggagtggtaagtactacatctaaatagatcttctttttattattgaaatgggaaatgattgctttcagattactggactggacatgacgcgaggaactgaatctctggccatcaaatacttggcgttcgtccaagctctggctgtaagtggtatccttataatttaattgtaaacttgatatttattcgttattacttcagtacggcacacgtcacattattgaaaacctttaccagtacggtagagctccctttcaaacgctacttttctgcgggggattggccaagaatcctctgtacgtacaatgtcatgcggacatttgcaatctgcccgcactgattccggatgaacaggaaatggttctggtgggcgctgctgccttgggagccgctgcctccggccacttcgacagcttggaggtgagcttaagaatatctaaatatctaactggtttataaactactcgttgtgctcttagagcgcctcgaaatccatgggtggcactggccagctggtgaagccgaacgcggaaacgcttgagttccacaatcgcaagtacaaggtgttcctgcagctgctggagaaccaacgacagtacaggcgcattatgcaggcagacacaaagtgattttttttcattccgatgtcaagactttcaataattttaaataaatgccgtacatgagcattgtaacaaataaaaagtttggcgcacacaggtacaaggtgatcttgttggcatcttcgttggttcctaggcgatgaaggcggctgccttggagacgatgctaccacgacacacggggcaggtgacggagattttctgggcacagtcctcgcagagacacacatgaccacatggcagtaggataatctagaagaaaaaaagggacgtgtttaataatggcagtaatcatataaacattacatcacttatatttagggtttatggtcatggtattgtaaaaactttactgcaatgggtcttattatctaagcattaaaaattatatttcccttatcttaattttggtaaactcattaaatatcaatacaagtagaataattaaatttcaagatacggattctcagaggatagaattatgtaaattcgcaataggaatgcaagggttatattcacctccttgggattggtggagcacaccacgcagagttgatcctgggacagagtgtgaggacgactcctcgccctccgctcccgacgctccgtatccaggcgttcgcgaattttggcctcctcccgctcctgctttcgttttcggtagagtttcttggcaatgaaggcaaccaggatggcagagatggtgctgcacacaaccagcttgagtctagaagggattaagtagaaagtattaagagtatacacccagagtaagcaccacccacatcgtcgttgtcttggcatcttcgaaccgcttaataagcgtggacttggtggcagtggtcaggaagagcggtccctcattggagggctgcatgcgcagagtatcgccatccaactccagttcaccaatagcggtcaggaagctgccttctctgagcacctcctccgtcgtttgcaatcccctctgacggacgccagagaagaaaccaaacacatggtcgaagagggacagattggagggctcgtagttgtcgtagaccacgtccacgtccaagacggcggcactcaaggcgtccacaatctccacaccatggctctggttacgcaactcgaagggcatctcgttggcggattcgtgcagcaacttgtgttgttccgtccagaagccggcgaatccgcgcgttaccctgtgctcatgcagcttcacaatctgcagcactccactcacactgggcaccagggagctcctcagtggcaccccgatgggcgtcactgtgccccggattaccgcatatggtatcttcttgtcgcgctgccgctccaccaccgattttaggtctccatcgatgttgtattgtggtgccgcctgaaaagcagcagttcactcaataaacgccacttattacgtgcattagtatttctatacgcaccttcagcaccttggcagttcgcttgtagtgcacgtactcgcgcgcacacaggccaagtattagcagatccacgcccagtgcaacggattcgtgtaaaaattccattttgtgttatgctattttatttatattacgctacaaaaacatatgtttactcagtgttgctgtgtttcccgctgctcgtaacggctacaaatactaaatattcaccctgttgaatggaactagttcaacgtattagtatatgccatagagtgcagggtcactctaaaatactactttcatatttgaaatttaccgccaaaaagaagttagcttaattcaattcaattctcaatttgcaattagaaaacggccaatgcaaaccaatctatattttaaaactccatcacttttatgtattttatgcaagaatatttatcactaaattaagataattaagccaaaagaggtgcattgcttatggcttgccaatgatattgtcgatggtaaacagcgtggtctttgatcggttgctgctggccactggactgctcccaggtgcatccaccacatccttgatgccattaaaagcttcggcaaggacaggtgcacccgatgacgaggtttcccgtcgattgagaggaggagtaaaggcgctcggcgaatgtagctcctcgtgcagttccatggaactttgcattgctttgctggaactggacgaggcgtccacatcgtctgggcattccctgatctcgggcagtggtcggagtccgcgggcctcgttgttgaacagactgttgaagcccagggatacggacaagtactgcctgtgcagatccgtaatcctgtcggagtaattgggccgctcgttgcagaagatatcgaagtcactcagcggttcgctgggcgagcgaatctctgctgcactactgttgccatcatttgaatcctgcagataaattcatttattcgatttgtttatgagtttttagatgtgcattatacctttcccgattccctctcgtagcgatttggatggccacagtgcctctgcctgcgcgttctcctccggcggtagtttccctgttcgaacatgtccgatgccgatgagtccagcatccagtagcttcccttcccagcactgtcgttatcctcgattgtgttcttgtcccgcggaatcttcacgaagcag

SEQ ID NO: 410 - DNA, 1086 bp, DROSOPHILA
ggaaacacagcaacactgagtaaacatatgtttttgtagcgtaatataaataaaatagcataacacaaaatggaatttttacacgaatccgttgcactgggcgtggatctgctaatacttggcctgtgtgcgcgcgagtacgtgcactacaagcgaactgccaaggtgctgaaggcggcaccacaatacaacatcgatggagacctaaaatcggtggtggagcggcagcgcgacaagaagataccatatgcggtaatccggggcacagtgacgcccatcggggtgccactgaggagctccctggtgcccagtgtgagtggagtgctgcagattgtgaagctgcatgagcacagggtaacgcgcggattcgccggcttctggacggaacaacacaagttgctgcacgaatccgccaacgagatgcccttcgagttgcgtaaccagagccatggtgtggagattgtggacgccttgagtgccgccgtcttggacgtggacgtggtctacgacaactacgagccctccaatctgtccctcttcgaccatgtgtttggtttcttctctggcgtccgtcagaggggattgcaaacgacggaggaggtgctcagagaaggcagcttcctgaccgctattggtgaactggagttggatggcgatactctgcgcatgcagccctccaatgagggaccgctcttcctgaccactgccaccaagtccacgcttattaagcggttcgaagatgccaagacaacgacgatactcaagctggttgtgtgcagcaccatctctgccatcctggttgccttcattgccaagaaactctaccgaaaacgaaagcaggagcgggaggaggccaaaattcgcgaacgcctggatacggagcgtcgggagcggagggcgaggagtcgtcctcacactctgtcccaggatcaactctgcgtggtgtgctccaccaatcccaaggagattatcctactgccatgtggtcatgtgtgtctctgcgaggactgtgcccagaaaatctccgtcacctgccccgtgtgtcgtggtagcatcgtctccaaggcagccgccttcatcgcctag

SEQ ID NO: 411 - protein, 338 aa, DROSOPHILA
MEFLHESVALGVDLLILGLCAREYVHYKRTAKVLKAAPQYNIDGDLKSVVERQRDKKIPYAVIRGTVTPIGVPLRSSLVPSVSGVLQIVKLHEHRVTRGFAGFWTEQHKLLHESANEMPFELRNQSHGVEIVDALSAAVLDVDVVYDNYEPSNLSLFDHVFGFFSGVRQRGLQTTEEVLREGSFLTAIGELELDGDTLRMQPSNEGPLFLTTATKSTLIKRFEDAKTTTILKLVVCSTISAILVAFIAKKLYRKRKQEREEAKIRERLDTERRERRARSRPHTLSQDQLCVVCSTNPKEIILLPCGHVCLCEDCAQKISVTCPVCRGSIVSKAAAFIA

SEQ ID NO: 412 - DNA, 4027 bp, DROSOPHILA
attaaagagctccgccatctccatcttcattcgccatcccaacccatcgaacccaagctcgacctcgaagaaaggccgccacagaaagtcatcgaactttctccgtgttctttcgccgactaatttctatattaggtgtcatggtctcggctgtcggtggttctattaattaccccaacagctgcgatcatttataacttagtcggggtagtcaatcttgcgatctgttacaatttgtaagtggaaaacccgtggagtcagtggagctcccaaggtgcgcaaggtcgaacaaatttgcctaaacacaatcgcaaagattagcagccaaattgccgtgtcaagtgaacctctcgaagttgggaacccagtggctcctccagaagaaagaaaagatccgacccgacccggctattatacaatcgcgtgactcttctcagagctgctgcgaatatttgttgcccaattcacctttgtaaacggtgacatgcgaacagaatggttatggatagaatggttagatggatggagctgcggatggtgccaatggtggccccaagcagcgtctgagctgtaattaatagcagcttacgggttagtcgcaaattagccacatgacacagcgccagcgaaggcgtaggagtctggagacataaccgagacggttcctcgtgggcggaactgaccccatccgggagaactcctaagctctttagcacttcccttcgtttttaccagcgacggttgaaaaagtcgctaacagcatccgttcgattggaggcgttgcgtttgacgagttttacagcgtgggtgtgtgtgcttaccactctaatttactcgaaatacattaagtttgatttaagtcgtaaatatgctaataaaaagcatttaactcggattaaaactcattatttatactgcaaaactttacactgtctattagtcaacttctataaacgaagtgtggataaaatattaaaacaaaaatatttatgatttatacatatgtccatatgctttttatttcagaagtttgtttttttggggtttactaagtactagaatatattaaacactcgcagccagcctgctctgatcgcaactagttgaggggattcgatgtcttggcgctctcctggcggatggcgttgatcagctcgtagttgaccaggaaggtgaagcgcagaccggatatttccactgtgcagttgtgaccgagtcgagctttgttggcggatagcaaaggagtgccgtcgataaagatggccctctttccctcgttagcgatgaagaaatccccattgctgcgcagcttaatggttccttggcggcgagagatcttcgcagccggtccctcgagccccagatccacgtccaccacacagtccttggcatcgcgaccaaatgttatttccttggaacgcattaggtaccgcacatggcggccacacaagcaggccagtgtctggttgtcgaactcggaggcagcggtcggactaagcacggaatccaccaggacggcccagcgcgagagctcgttctccagcaggcgaatattacgtttgttgcgacgatctgccagagctcgctccatctcgagagcttcgtcacgtggctcgttcaggtcgtgctcgaagatttgatcttctgcatccgagaagctgagtggctgctgatccgtgccatatataggcttcactgactgatccggcaacagggtgtactgcttgagaagaagccaatggttttgcaaggatttggcagtgcgggcgcagtagaaaacggaggcattcttatccagtagctcctggaactgctcaagttttggttgttccgactgtgaattgaattactgattagaaaaagcttaaatcatgatgaaaatagtgtacttacgctcttaatggtgccaagcagatcctcctcctgcacgctgtacaaagctttgcgctgaacggactccacgagttcggggtgcaggttccttatggcggacactgcaatcctggacaccgcaggctcatacagcagagcataccagcgctgctgtagttcctgcagagtaaacttgcaggaaaacttaacgccgcgatggattatccgcagatcgttggtctgctggatgccaattatgagggccaagtcgtcaatgggcttccagcggcccaaatccttggtggccatctgacccatgggacgaccatttctacgctgcgcctttttgctggcaggacgcactgggcgcgaacggcgctcgctggtcgtggagcgctccatggccggtggtttgggatgcgcgacggcagtcacaattggggcaactggaaggggagtggccaagggagctggcgttgtgggcgtggccagtgacagcgatgcaacagtgctaggtgtccccggcagcagggaatcaactgaaagcggcgtctgtggcgtggaagtgggtatgttaagaggcgctaacgtggtgtgcggcacgcccaccaaagctggataattctgggaggtggtgcgaggcctgctgctgcgattggcgtctgttccgctgcgatttgtgggcaccgcaatgttgtactcaactatttcgtcatcaaaacgcttccttttaatcgtccgcgatgaactgtttcgatgcaaaaggagctgccacttaatctgtcaattttgacatatgtcatcgtctcaccttcttcgcttttgatcgttttgctgttctatctgcagatttgaaatgggatttcgtatcggcgttgaaattccaacggcactgctagctgtacttcctattgtggttgttgttgttgtggctgctggtgttggcatggttgttgttgctggcgacacgcctacctggattagtgtgctcgcagctgctgtgggaatggtggacactgtggggggattgggagcggtaacggacactgcactgctggcgatcgcggttattcttgatgcctccatcgctctagcgggctgtttatgggctaaaatgtatttattttcgcgacgcacagctcagcagtgtgaccgcaccagcaggaaaaagtatatcacttgcagagttgccacgtcttcgaaataaagtgtcactgcaagaaaaacatttgttaatagcttatataaatatatataaaattaattttctttcttaacagttcacttgcttaatatataattagcgaaagtgagaacattaagcttgactttaccattttaaaagttaccatcatagtgtcactggcctgccagatctccatgggaaacacatgtttcgcaacactgctacccacacaaacgcattcgcgaatatctggtaacctcgccactggagccctctcgaaattttgtttactggcatttaaaatcagcgaattcgggctaaaaagtcttacttatgcacccagcaccgatgcccggagcgactagatgagtgtctggatgagcgggccccgaaatttcgcactagccacacaaattatacgggaaactatgaggtaaatggttctttgcacgaaaacaaaaaggcgactgactaagatatgactaatcgatttgcagtttgcactacgcggaatcggaatcttcgccgtcagagagcaaaatggacatctcggagacgccgacggactcaacgggcgtctcgccgctggcggatgatgttttgcccaccgcgccggagaagaatatcctgaaattggagcaggccaagcaggatcacgataaggaggaactggagttcaagacgacctccgcgctggacaacagaatactgcgtccagagctgctgcccatggaggcgatgccacaacgacacaacatcatcgagcgcaccctggccaacagccatccgctgatgtcgccaaccaacacggactcagactcggaaccctttcagctgaagaagcaggagaaacagctgccgaggagcaactttccggacgttgtgcccaccacggagacggtgcaggtgaagaacaacctgaaccaatgccggaacaagccgcaggacgccaaggtcagcctgctaagg

SEQ ID NO: 413 - DNA, 1905 bp, DROSOPHILA
cggtcacactgctgagctgtgcgtcgcgaaaataaatacattttagcccataaacagcccgctagagcgatggaggcatcaagaataaccgcgatcgccagcagtgcagtgtccgttaccgctcccaatccccccacagtgtccaccattcccacagcagctgcgagcacactaatccaggtaggcgtgtcgccagcaacaacaaccatgccaacaccagcagccacaacaacaacaaccacaataggaagtacagctagcagtgccgttggaatttcaacgccgatacgaaatcccatttcaaatctgcagatagaacagcaaaacgatcaaaagcgaagaagttcatcgcggacgattaaaaggaagcgttttgatgacgaaatagttgagtacaacattgcggtgcccacaaatcgcagcggaacagacgccaatcgcagcagcaggcctcgcaccacctcccagaattatccagctttggtgggcgtgccgcacaccacgttagcgcctcttaacatacccacttccacgccacagacgccgctttcagttgattccctgctgccggggacacctagcactgttgcatcgctgtcactggccacgcccacaacgccagctcccttggccactccccttccagttgccccaattgtgactgccgtcgcgcatcccaaaccaccggccatggagcgctccacgaccagcgagcgccgttcgcgcccagtgcgtcctgccagcaaaaaggcgcagcgtagaaatggtcgtcccatgggtcagatggccaccaaggatttgggccgctggaagcccattgacgacttggccctcataattggcatccagcagaccaacgatctgcggataatccatcgcggcgttaagttttcctgcaagtttactctgcaggaactacagcagcgctggtatgctctgctgtatgagcctgcggtgtccaggattgcagtgtccgccataaggaacctgcaccccgaactcgtggagtccgttcagcgcaaagctttgtacagcgtgcaggaggaggatctgcttggcaccattaagagctcggaacaaccaaaacttgagcagttccaggagctactggataagaatgcctccgttttctactgcgcccgcactgccaaatccttgcaaaaccattggcttcttctcaagcagtacaccctgttgccggatcagtcagtgaagcctatatatggcacggatcagcagccactcagcttctcggatgcagaagatcaaatcttcgagcacgacctgaacgagccacgtgacgaagctctcgagatggagcgagctctggcagatcgtcgcaacaaacgtaatattcgcctgctggagaacgagctctcgcgctgggccgtcctggtggattccgtgcttagtccgaccgctgcctccgagttcgacaaccagacactggcctgcttgtgtggccgccatgtgcggtacctaatgcgttccaaggaaataacatttggtcgcgatgccaaggactgtgtggtggacgtggatctggggctcgagggaccggctgcgaagatctctcgccgccaaggaaccattaagctgcgcagcaatggggatttcttcatcgctaacgagggaaagagggccatctttatcgacggcactcctttgctatccgccaacaaagctcgactcggtcacaactgcacagtggaaatatccggtctgcgcttcaccttcctggtcaactacgagctgatcaacgccatccgccaggagagcgccaagacatcgaatcccctcaactagttgcgatcagagcaggctggctgcgagtgtttaatatattctagtacttagtaaaccccaaaaaaacaaacttctgaaataaaaagcatatggacatat

SEQ ID NO: 414 - protein, 578 aa, DROSOPHILA
MEASRITAIASSAVSVTAPNPPTVSTIPTAAASTLIQVGVSPATTTMPTPAATTTTTTIGSTASSAVGISTPIRNPISNLQIEQQNDQKRRSSSRTIKRKRFDDEIVEYNIAVPTNRSGTDANRSSRPRTTSQNYPALVGVPHTTLAPLNIPTSTPQTPLSVDSLLPGTPSTVASLSLATPTTPAPLATPLPVAPIVTAVAHPKPPAMERSTTSERRSRPVRPASKKAQRRNGRPMGQMATKDLGRWKPIDDLALIIGIQQTNDLRIIHRGVKFSCKFTLQELQQRWYALLYEPAVSRIAVSAIRNLHPELVESVQRKALYSVQEEDLLGTIKSSEQPKLEQFQELLDKNASVFYCARTAKSLQNHWLLLKQYTLLPDQSVKPIYGTDQQPLSFSDAEDQIFEHDLNEPRDEALEMERALADRRNKRNIRLLENELSRWAVLVDSVLSPTAASEFDNQTLACLCGRHVRYLMRSKEITFGRDAKDCVVDVDLGLEGPAAKISRRQGTIKLRSNGDFFIANEGKRAIFIDGTPLLSANKARLGHNCTVEISGLRFTFLVNYELINAIRQESAKTSNPLN

SEQ ID NO: 415 - DNA, 14119 bp, DROSOPHILA
agacttactcatgtgagaaattgtttttttttttttatcgcagccataaataaaatacaataactatttataatttaaatacatacgtttttattatcttcaaactgcttaacaataacatttttcgcaatacatggctaaggtttttaggcaacgggtattcattcctcggaaatgaacagctattggccaaaaaaccggctatagttatttttattgatataaattacgctaaggggcagaatggggagttccaagtgatgaacagagtgttttattaatttactttttgttaatatggcaagattaatacgtgaatcgatttctccccaatcacttacacaatctacatttcgtgtgcgacagtgagtacccctaatgaacttattctaagcgctaattgcacagtgtttcgaattataaattatgttacatttggatgtgattaagcattaaattaattaacacagatgtcgttttctttgtgtgtgtgtgtgcgtgcagtaaagaaaaaacaaaaaaacagtgggaccttgagaaaggaaagctttgagcgtggttatatgtacaggttaatcgtaagtcgggggattccccttggttgaggttctacggttagttttggtgcctcgttgagtgagtcgggattcgggatacgtgcagcaccttcattagagtgggtcgatttacccggttggttgggtggactaacttggacaaatctttagaaacttttcctacaaaacctatgggtttagcttcgaaatatcaatttgattaaatactgaatatccatttaaaatttatcacatgacataaatattatattaatttcactatgtagatttcatttctagctttataggaaaatcttttggaagaatacaaattacccagaactattagattcctaaccccttaactctttgaagaacccaaaatcgccgaataaataaatcgacccacactaatctccatgaatgatactattctctactatctattcgttgaccagctccgccggacccggtgaatcgtatggcgctccattggcgcccacaaactgattgttattccgatggacgaatcccctgccgggagctgcgttatagtaaaccacccgacggattccgaagggatccacgtagccaaagctgcccgctcgctttccgtccgatggattcgtttcctcctcatggtactgcttgggcagcacataacggaatccattgcgggtaactccaacgccatcgtattcggaggcggccaacccatcgaggtgattaccctggactggccttggacgcaggcgtcttcggtatgagctggatggcaggggcggaagaagtgccgcctccagggagtttacatccactggcgactgcggaggcggatagtagccatatcccgtggtggaggacgtggctggcggtgcgaattgataggcaggagcagcgaatggctgtggcgtggagtagccatacaaatccgcgccagaaatgggtgctggtgtgctggaaacaatggctacgggagctggagtcggacgcggacgcagacgacgtctgtgggcactcagtggaggtagcatatccagcgatggaggtctggccgtagtggaacttatgaccgaaccaaactgcccgtgtccgaaggctcgatccgcttcagcgtcgtacacattgatggcattcagttccaagtcctgaacagggtcaccattcgaatggatgtcaaccagtggactcagcggcgtggctggaagaggcgacaatagctgatccctcgcccgtggcaactcatccggataatgatcgaatccgagctgtgattgtggctcaatcttggccgcttgttcggggggcaagtaattgagcttgcctgcacctgagtcctcgacgtccagtagagctggaggcggatatggagccggtgtggtggtggacgtggtgctcgaaatgtagccatagctgggacgatgatagctgcccagactgttggccgaagatcccgaggagccgccatgcactaggacacccgattgagctggcgctgccttggtggatttaatggcgtcctaggaaagaacatttattaaagtaattcttttatttgagagtcgaatagtcctacctcaacggcccttcctaggcccacgtagatggtcttggacttcagtatcctgtatccctgcttatcggcaatgtagtccttctgtcgtagatagcccgccgcatcgatccaggcctcagttcctgtcagtaatcaattagttcaatgtactttcccactatagacatcgttgatcactcaccgatgactgtgccatcctgcagccgtttctccttgcggaactgtccgctgtccgtttggaagcggaagtatcgctccggtccctcgtccgtctggatatggtattgattcgcactgggagtctggctgccagtaacaactgctgccagggccaccagagccagctgaaaggaaagtttcgatgagttgcgatcatagtttttattggggggtaatgtatcgaggattggtcactaatcacatccgccggcagctgccccaaaccaaagcaggcagtcatctatccattggcggctttccggtggggcaactcatgtccagtgtggaaaataatatttggtttatgtgtaccaacaagtatttagtatcattgtgatttcccgccattaattttgagtaaaatgcaaaaagaaaataagtaccgcacataagcaccgcaaaagattcattaaaacatatttctctcagtgtgtggcaagtttcagagtcaaggtgacactggtcagaaagtaatcaatggcacgagatgcggttgtgcaacattttagcaaccgcgtgcggaaatgcagtatgtgaaagtgttttccatggcatcaacaccgccaccagtagcaactgaatagataacgacatcagcatctgcgaatcgaaccggttcacgtggcgtatgtgtaatgcagatgactcgatttggttttacttgggattggcattatagccgacttgcccgcgctcatggttaaggttggagctcgaataataatacttctggcaattattctaatgtatgagccacccgcacgtttaatcatttacgcttcaattactttagcattccgtcataaatttccatgggctaaagacaaaatggcgggggtttcggtgtgggtggaacggctatgagccaagtttactggctaatttcggcagccgctgacatttttattataatttcgtgctcgtttggggcgatactatatgtatgtacgtcttggctcgacgcaatttatggcgctttaattaattgttgttgggacacttttcagaataatcaaaataattgaaccgcgaagaatgaactttccttaaaggggggaactttattcgccccacctttgtaagatatgtgcatattatatcattgatttatgactctgtcatttgactaaacttgaccattaatcataaattaaggagacaagcattacgtcagcacatatgtgtaagtcctcacaaacactttcctgtgtactcccacaataaattttttaaataatattcagattgcaaacaaaacataatttattctatccttgttttaaatgtagcatttaaatttaagttattcttgctagtagtcgtaattttgttttcatgacagctaattgaatttccccctaaaaccaatgacataatataccaacaaaactctctcagtttcccaaccacacccccgaaaaaaaactatagcaaattggcgtctatttgtgagaaattcgcgtgtctgaatcgcagtgcccataactaaaagtatctacaagctccgtgcgggcagatggagatttatttgatcgaccaacgcaacgaattaaattgcgagcaaattattgcgactgtttccgctgtgtttggccaaaacgagagtaaaagtggccaccagcggggcttcatctctctgaatgaaatttgctggcccgatttgggagcctgggctgccagttttgaagacaaccggttggtagctcggctggcgggactctccactctgcaacatatgttgcacatttggagttgttgccgcagaggctttggttacgtgagaatcgcccgagatgcggcgaactccttttgggcgcgatcaaaagtggaaaatcacgttttccttggcgcgcaattttgtttactttattgtcagacgtttgttgttgttgctgctgcctgtcgaaacggtaacaaaacataaaaacaggggaaaaaaaatccaaaagagtttctttccgttgcgcaaccatctcgcccccgcagcctcttcacccactttgctcccccccttttgtaacttacgcaacattaaattgctcagttgaccccaaaaacccgagttgaacaaagaattctgcaaaatgctagaaacaaagcaatcataattccccattgttgatgaccttcgcctgatcacagttcactttttaattaaaacccactccaattacgatcacagttcgctccaaatccaccggagatgataaatgaagcaaagaaaattccaatttttatgttaatgctttatttttgcctgcattctgggcacgaacaaagagctaatgaagcccatagactttcaaatcgatccccatagccgactcacatggatagtatttggtttggctcagttgggttggttccgatttggtggttttaattttattttttttcggggagtgtttttgcatactcgctggggagtgtgtgtgcatgtggtgatggatttctactcgactatttccccgttttcaatttgattatgcggctgatggctgcttccgcctgggggatggatgccgtgaatcatgtggcatgaaaacccacagaaatcgattgtggaaaatttagttcatgatgaagttgagcgatatgaatgtccagcatggccaagttatggcaaaatccgctttcaataaattattttccagcataaatcagatggccagaaaacacacaaaacatatttgcttacatgttatgaggaaaaacaatgctgattcatatttagcgtcgtttttgaattctaagtaaaatcttgacaaatattatttttcgtaataatcaatgaaatcgaaaacaaatttccaaaaatggaaaaaccagttccagctaatatcaaaagactcaagacacgaacttacagagtttaagaacaacaacgatgaatcatttaaactgtgtcccccgcactagtatgcttatgatatttgaagaataatattttatacagcaaatttattcttaatcaactctgataaaaaatataatatatactagtgaaaacttaaacgaaagacttaggacacaaacttggaagacttaaaaagtatatgactctgtgtcaattaattttgtgattaagctattaaagtaagatataaaaactgaaattacttcacgctgggcgggaacttttatagtattgtcaaaattttatgaaataataacaagtcacaaacatcgtgtcaataagctgtgtcaataatcttgtttagccccgtcagatgctaaccgaagcaagtaataatttctaattgctcaaattccacaaaaacactgcagccgcgcaaaacatgaaaccctatattccgctaatgaaacatttcattaggcacaatcaattccaagaatgcgacccgccaacagcaaacggcgactattgaattacactaagagcaaccgaaagatatttgagtgcctcacgaatagaaaacacccactcggatatttcgcaaggggcaaatcggaggggaattggaattctgactgacagctcgctgtcagatttcgagcaaagtccgcagatttttggcggtgggaagcagctgacaaacaacaacaatctgccgtacaaaattgtattaaatttcgttagttgtttgacttttcgtaacttgcaaaaaatcaaaagaaaaaaaaactaaacaacaaaaaactaaaagagtaaaagccaacaaaaaaagtgcttgcctttttcggtcaacgattttttggctgcggcatttcctgtttgtcttggagaccccaccaaaaaaaacagtacataaaatatataggaacattgtaagcagttatacaatccacttaatggtgtctacgatcagcagccatgcctttgggccaggctccaactatggccaagtcaagagtgtgggctcccagaacccgaccctgaattgaataaccaacgaaggcgaccacgcagcaagctgcctgtcttgtttgtcccattcagaggcacttcatccgatccggctgggttccaaaccactaccgatagttgatttacagcccctaagtaacccagttctctaccagacagctgcctcatgttgctaatctctatttatagaatttatcagtcaactgcacgcaaagaatgtgcaacttgaatcggatctcacttttactgaatctcattagtagatcgatttgaaagaatcattatatactgcgttttgatggaactagtaatatttaaagataaaatcctacaatttctacattcaagctattcacataacttaaacgtttgtatactgaagatcttgtaagcggtattaataatgagagaaatatcatataactatttctttaggaattacgaagtattcctaattcgattcgcttacattcttggccttacccgcactcatctaagcccgctctaaccacattttgcactgcaatttattgcatcattttaaagctgctgctctccatatttgtggcactcgtggtgtgataactcgattattcgagtgagtgttgcgtggatgggtgttgtaatttgaaaagtggatgcgacgtgtgaaatccccaatagtcacgcatagaacgaagcgaaacgaaacagaacggaacacaaaacgcacagcaccagaattgaattaataattaagcgataatcatgcaattgacatgcatcgggcgactgtcacaacaaatgttcatcatcgagagccataaacaattattgaagcacaaatggtcatatgcatatggtttatgtgtgccgccccaaagcggcaaggtcatccagaagcgacaaaacgtgggcggacaactcaggggcagagctatgaactcaacagctggcaaccgaagcggcgccaaaaaattttccaccaggcgacacttccgacacatttcacttttgttcagttgacacaattattaaaattgcataatgagttacacggttgcataacgagaataaaaagcgcactaaacaagttgtctttactttagtttaatgttttttcagctttacatagcacccacaattgattgtagagctgactataattggaaatcgtaactagtcgtataaaatgaaatttatgtttcgtagtttatgcattttttttaatagattttgggcggagtgcagataatctagttttatgagtaattacgcaatgagctcattgttagggacaataatatatttaaccattcggttgtttcatacattaaaatattagctgagaagaatctacgatagattagttgcccaataaatcagttgcataacaagaacctgagccagacagcgtctgttctgggcgtcttccgatcttccaactcggctgcgcccaatttgccgaggcgtgaaagagtggaactaactaagcggagtggagtttctttgagttgatcggcgttgggtaatgccccatgatgaaggtcgacatctggtggcggggagttgatggagaggaaaagtatggcccgctaaccaagtggaaaatccacctgatgtggcaccaaacggcgccgccagctgttgattcagccagccatctcggccagttcgtgtcttaagtcttttgttttgcgcgtcgcttcgcgcttcgtcgccaaaaatgtttccgcaatttggcactgcacttggcacttggcagttggcggttggcagctgtgggagctgtgctgctcctcgtctgctccaattgggcggcaatgggcgacctaatctcagccccagaaacagtggccaaaaaaagcgaagcaaatcgaatcgaaataccccagccggctgacattcggccccaaaagagagtgaaagctgcacgagcacattgctatcgcattaattttcagctcagctgcgacttcgatccgacttcttcgacttacttcgacatgggccaatgcaggcagttgttcattgctcgctcgtgttttaatttcgtgttgtataaactgctgtttctccccaccacagccccttctttcgccccattttcattgtcagcgtgcgggcatgcaaccaactaccacctagcctggcttctttctcaaaagcccccaccaaatgctaaggcgtatttcataattgcgcctgagctgggcctccgaaaagccaagagtccagagcccgatgcacacacatatcaagcgaaattaatcatagtaattgccggcgctgaattcgactctgttttgcgcgctgcgtgtaaatgaactccggcggaaagcgtttagctgtgtgggaaaagccgcattttttggcagccacctgtccctgttcgggcgccatctgtgtcagcggtatatgcaaaaatgccagctatgtgtgataattgttttgtgttttactttcgaaccgatgcacttgaaagaaatataaacctttgtccagttgttatttttaatttttttctatttttatccaataatctgctgatcatttcttgccgtgtgaaatttccattgccactgggttgggaaaatgtgaaaaagggccaggccaggccaggcaagccgactgactttggcatactttcgatgccaagcggattgattagcatctatggcccctctgcagctccctcatctggcattcaactggtgtaccatgcgtgggactcactcatattatacgttgggtatctgtgcatatatttcttattctccccgatcaactggcgacattgttcctcgctagctgtcagttcttgtgtgggcaaaagtgcctctgattgtcgctgcttgcgagcgtggttgcctcgtttgcactctaacaactgcgaactgtcagatagccagatagctttatgcgcagtcaaaaattcggggcgttgcagacagaagtgtgacaaggaaatggaattgtgaaccgaaggatttcaggccaacaccctatggaaatttaaataattatatttgtcacatgctgtcacattgacaaatgcagcttataagatagttatagttcaaaataagatactttcgacttgaactaaccaactagcatagtcatttttcaagtagtgtaatttgtacactgtttagtagttgcaactaggaaatctattgactacgaaacgaaatatgccctataattatatgtagtatacccagaaagtggccagtaaaactgaaacatttattacccattactctcatgggtgacctaatggattaattgccgctgagtctcacccagaacatcttcccacatcactcacttctcactgctgaggtgacccgccacttatggctgtgaccgcatttggatccgcttcccattcgactgcaaaacagcagctgttgctaatttgttaagaagaccattaaaaaaaacagtgcaaaattctacggcgtgtgaaccatcatagaattcagtcgagtggccaagtaaattagccacctcctcttgacgcagaaaaggaattgggtcagcgtctggaattaaaagatatctccatgtgccggcggaatgtggccgaaaaaaaaaaaagttgcagcatcatcgatcgactgtggccaaaacagtttatggccaaataatttatgcgtgaaatgcagaaaaacaaaacgcgaatttgccgccggcaggggcggttccatttgaaatgatatttaataatgggtaattgtgaaatgaaaaacatgagaaacacaaatcggacgcccatatatcaatccatctaggagagtcttgcataattatcatagggcacctaatctgttttatgttttgagtttacctttaaggtatccaaagcgaagaaaagtgcgagacaaaatggcaaagacaatttgaatttatttttgtcactccgccatctccctcgtttttttttttttttgggccaggctatctccctcaaggtcgcataaataataaaagtaaaatgtggcaagtgattccactgcgctaattaattcagttgctctaattcagccgtgctctgtttttggtttctttgagtgccctagaatggggtgtgatatattcatgagccgatttgtaacaaaagggatagagcaaatcagacccataaacagcggatttttattatttaattatacatttatacattgttattatttttgaatgttgtatttctttcattactatgttaaggcattttaattttggtgcttgttgaattgtagtagtgtaggcagcattaatttaaaatttatattaataatatcaatgatttaagtttaacttagggtattcataggttcgatttcagattatttttaaaaatactctgtttttgtatctttctgttttgtctgttttggtttttgatgccgctcaaactgatttgcatatactaagctcggtctcttttcttttcatatcgctatctttttctctttccttcgagatttgcgcaattgtggactgcagttggggtttttttttttaacctctgctgttttgttttgattggttgtccctttgcgcggttcccttcacaactaaccaaatgttaggcccacgtgctgctgcccacttcaaaaaaaaaaaaaaaaagatacaaagatacaagatacactgtctgagttggagtgcggtgtatctgaatagcacataatcgtctgcgtcatcatcatcattatgatcatcataagatgccagtgacctttggcggcgggctcttcatttctctagcttctcttcgccgatcgatatctggggaagcctccatcatccgtgtaatgcacgatttttgtcgaaaccgaatgattgaggcctttgaaaacagttaaggaacatataagcaacatagttacccccactgtatttgttttctgacccggcttctattcgtattcaaatttctggcgaaaattatctgaaatatgggtcaaaaactacaggtttctggtttctcgcagcgaaatatgtgttaatcacttcccatgaattattcaataaatttcgcataaaaaagcagcgacaaatctatagaggaaggtgcgagtgagatggcgtgcagatttatgtgatttacaggtggcaattaagtgtaaaagtgttgccaaacataagcaaacaatttagcaggcgattctacaccgattttacgacgctcagaacacgtttacatcgcccggcgactgacgactggattatggcaccccaccgatcaagggttgccccacagccgcagctggcgcattttgaaatcaagtttgcagattggaggggggacgtaaatttatgggcattgcacttggtcccctttagcttaattagtgggggctacttggtagccacttaggagataattgctgcggctaattccctgactttgtctttggccaaaccagcaaaacaaaccgaacacactgctcctaaatcttaagcgcttcacataaattttgggtcgaggtcaggcggttatctatgggaagtatggactgatttacgacccgactaagggtgattgaatttcaagccaaagccggtgacaaagtgttgggaaaactctgggtgacatcatcgaaggcagtcaatagaaaatgatgtggtgaccacaagaccaaactgcattctctgaatatgcgaacacgacctatttcatacacacagcacataaaatatcctcaatattttgtaataatatcgatagtaaggtttttgaaattttattttttagctgcagcttagcatgccaagacttttgcttcggtagcttgtgtaagtaaatcctataggcacatcattttaaagacaacattcaaagcagttagaactctgttcgaataaaaaaacaaaaaaaaatttatatattttttaaataaaggtgagaaaagtacagcacaacgatttggctaaactttcaaaacaatactagaacctaaaaccctatgtataaaatacttatacactacaaaagtgaattgtcgaataagaaggattcgttttgatttacccctcagcccaacaatgccggtttcccctggagagggggaagtcaatggcggcggagatgtggccaagaacgactccaactcgcagcaatcggtggatggaatcgatgcgttcgccgcctgccagaagccgcgtccggacaccagttccatgccggttcgccagtacctcgaccagacggtggcccccattttgctgcacggactgcaggctttggcccgggatcgccccagtgatccgatcagctacctggccacctatctgctgaagaacaagaaccgctgcgatgaggtcaagacagaagaaaactagttacccttggcttgtgctcccttgttttagtttttatttttttttttgtcccttatcacgacgaactgttgccgattttaggtttcgcacaccaaaaattactcttgtacacaacttatcgctgattacaactgaaggccacttaccagccacgatttcatggtgatccttcgttgctttcgtcttgttattaattttcccgatttaatttgcaatttatttgccgttggcttttcacggctccgtacacacgcacaagattttccgaattatctattatctcagcggctgccaattttggcaatcctcattattggccaattagccgggggagactttcaattagttccagctccggctgctgcgctttttgtttatttttcaaatatttatctttgcttaacacttccgattgcagcccacgctcgttgcaatctgcgatcgctgctgtttggtttcgacggttttgaatttcagtttgggccaggtttttttttgtttagatttcaaactcgcgctcgtgtgtctggtcgactggctggctcgtttgccactaaattcgcagcgagcttagttgacggtttaaaaacttcaaattcgaaaccgcttcggttcaaaagcgagcgccaaagcttcggctctgggttcgtcgtattttcgattcagtcagttctgcttgggccaatttaatctactttgggggctggctctccagctctcgagtaagccgatttctcggttttgaggcccacccgcaattgtcacgcgccaaaatcgaaatgaaaaaaactacatatgtacatatgcggcacatattgcatagaataattacatctaattgccagcgagagctgggtctaaagatcacaccacatcgctggttcagtgcatctccgagccaaatgagtgataaatacttcactcattttcgaaagggtttgcgaacggccttggcatgttggatcttgaagtgcgaagcaggttcaagccgatgtgaagttagataacttggcgtctctacagtttccgatcagttttaaaatgattaaaataccccgagccatattcgagccattttcatcgagacaaataaacacgtctaaaagtaataacgaattctccgggcaattcgccatttgagtcagcgaatttagctggcaacgcaaatatttgatagccaagggagaaaggccaagtgcatagcttttgatacccttcgctccgagggataggcattatccaattaaaggcggaagagaaggggacctagattacgttcccaatgcacgggtgattcacttcggggctacccagctaattaacacgccttagatcacctacttagtggcagttactttgagactcaagtgtgaaatcattaccttctagataaaaaataaataaacaaagaatccttttagaatgatttcaagtatcttagcctatcaataatctttgatttgacactcagattgttttcgattacctgtagtaccataccctgccctaaaatattatacaaattgctagaatagggtatac

SEQ ID NO: 416 - DNA, 1758 bp, DROSOPHILA
ccagccagtcgaccagacacacgagcgcgagtttgaaatctaaacaaaaaaaaacctggcccaaactgaaattcaaaaccgtcgaaaccaaacagcagcgatcgcagattgcaacgagcgtgggctgcaatcggaagtgttaagcaaagataaatatttgaaaaataaacaaaaagcgcagcagccggagctggaactaattgaaagtctcccccggctaattggccaataatgaggattgccaaaattggcagccgctgagataatagataattcggaaaatcttgtgcgtgtgtacggagccgtgaaaagccaacggcaaataaattgcaaattaaatcgggaaaattaataacaagacgaaagcaacgaaggatcaccatgaaatcgtggctgctggctctggtggccctggcagcagttgttactggcagccagactcccagtgcgaatcaataccatatccagacggacgagggaccggagcgatacttccgcttccaaacggacagcggacagttccgcaaggagaaacggctgcaggatggcacagtcatcggaactgaggcctggatcgatgcggcgggctatctacgacagaaggactacattgccgataagcagggatacaggatactgaagtccaagaccatctacgtgggcctaggaagggccgttgaggacgccattaaatccaccaaggcagcgccagctcaatcgggtgtcctagtgcatggcggctcctcgggatcttcggccaacagtctgggcagctatcatcgtcccagctatggctacatttcgagcaccacgtccaccaccacaccggctccatatccgcctccagctctactggacgtcgaggactcaggtgcaggcaagctcaattacttgccccccgaacaagcggccaagattgagccacaatcacagctcggattcgatcattatccggatgagttgccacgggcgagggatcagctattgtcgcctcttccagccacgccgctgagtccactggttgacatccattcgaatggtgaccctgttcaggacttggaactgaatgccatcaatgtgtacgacgctgaagcggatcgagccttcggacacgggcagtttggttcggtcataagttccactacggccagacctccatcgctggatatgctacctccactgagtgcccacagacgtcgtctgcgtccgcgtccgactccagctcccgtagccattgtttccagcacaccagcacccatttctggcgcggatttgtatggctactccacgccacagccattcgctgctcctgcctatcaattcgcaccgccagccacgtcctccaccacgggatatggctactatccgcctccgcagtcgccagtggatgtaaactccctggaggcggcacttcttccgcccctgccatccagctcataccgaagacgcctgcgtccaaggccagtccagggtaatcacctcgatgggttggccgcctccgaatacgatggcgttggagttacccgcaatggattccgttatgtgctgcccaagcagtaccatgaggaggaaacgaatccatcggacggaaagcgagcgggcagctttggctacgtggatcccttcggaatccgtcgggtggtttactataacgcagctcccggcaggggattcgtccatcggaataacaatcagtttgtgggcgccaatggagcgccatacgattcaccgggtccggcggagctggtcaacgaatag

SEQ ID NO: 417 - protein, 458 aa, DROSOPHILA
MKSWLLALVALAAVVTGSQTPSANQYHIQTDEGPERYFRFQTDSGQFRKEKRLQDGTVIGTEAWIDAAGYLRQKDYIADKQGYRILKSKTIYVGLGRAVEDAIKSTKAAPAQSGVLVHGGSSGSSANSLGSYHRPSYGYISSTTSTTTPAPYPPPALLDVEDSGAGKLNYLPPEQAAKIEPQSQLGFDHYPDELPRARDQLLSPLPATPLSPLVDIHSNGDPVQDLELNAINVYDAEADRAFGHGQFGSVISSTTARPPSLDMLPPLSAHRRRLRPRPTPAPVAIVSSTPAPISGADLYGYSTPQPFAAPAYQFAPPATSSTTGYGYYPPPQSPVDVNSLEAALLPPLPSSSYRRRLRPRPVQGNHLDGLAASEYDGVGVTRNGFRYVLPKQYHEEETNPSDGKRAGSFGYVDPFGIRRVVYYNAAPGRGFVHRNNNQFVGANGAPYDSPGPAELVNE

SEQ ID NO: 418 - DNA, 26678 bp, DROSOPHILA
agatagaagttttcttagattcacgtttcttcacacttattatttggtttatttttttaattttatttattttttttggtttttctttcttgtgtttaagttcttagttggtaatcaaaacactaaatacatttagcttatatccagttacttaaaatagttttgggttttctgctttgctctcgtctatttcattatttcgcttgtttcaagtgttttaaattttcttgcccccttatttccttggcgcttttccgggcatctgcttcccagctccttgggattttccccgattttcctgctgtttgctttcacttcacttatctgctgattgtccactaaaactatgcttgctccttatgctcggcgttctatttttccagctctttcttttttcggggctttctgtatgaaaacttcaccccttttttacacaataaatttgcattcggtttttgcttactttaacttcttttttatatgaattattaaacacattaataaacagctttttttgttcgtttttttttttcgtttttttggtaaatcatagttttgtgcataattaaatacgtaataaattgccaaataaagtgtaatgtgcatccatactaatttgaatgcacgaatcgcgtcggctcttttggttttctaaaaatgacattaccctttcccccagcttgcatttattacaatacaattaaacatacagtattttccatataaatattttgtatatattagcataatttacctttatatattcagtcttaagctacaaaaatcgttatgcatatttctgttttgtttttattattatatctctttatggctttgttttctttaatttgaatctattcaaataagttatataaattcgcaatgtattcatttttatttcttgtttatgttttcgtttttatttttggtgcggcgaaagtaggacaaaagcagaaaagtgtttgctgtgtaattttcccggaacaaggtttttttttcaggcgagaattttagggtagcaaacagtcttacaactaaaaagcagacttaaactctaagggagaactgcgggtggccgggaattttacgtttacctattacatttattaattattatttatattctatctgctatcatctattgcctatcgactaacggctatcgttgcaactttcagcgattgtgttatgttctgcatttgcgtttatcttacaggcatgcctcatttagtggttttggccagctctgtctctcattctaagacgtttagcgctttccaagttttactgtagtatgtaccttgctcaagtaaaccaaaagtgtcactatggctaaccgtttaaactaattctatgtagtagagtgtagtggtagtcatcatcctgcgataagttgagtatctttctttttaaatgaaacgccagtttgctcggaggttctcttttgggttcgttttgggcttatagtttcggtaatggttttggtatcggtttctatatctcaatctgaatctgctgctgaagttgttgaaaagtcgagtctatcattacagctatcagctaggtttatagtattaaatttatcgaattttgttacccctttttacatatttacaggactgtagctggtatctttcgtaattaacgtgttgaagctcgtttcccaagggcaccacatctccaagacagtatgtacaatgtagaaccaaacgtcggggtcaccattcagcaaccattctcggagttgagtcttcaaccccggctgatcatcatcagtgcgactagactcactatgatcgtcatgccctgggccaaagaatttgcccctgccgtcgacatgtcctggcccacattgctgcgcacatccatcagatcgcgggagaggggcagctcggtgggatcgctgagttcatcgtggcagggcagcatttctggcttcagcaggaacaacttgatgtagattgcgttcttggtggtcagtatgtcgagggcgtctcccgacgcggagtgcgatgtcatcaggacatccacatcgttgtgacccactacgggagaaccggcaccatagaatccctgcttgtgcaagctaagattgtcatccaggtctaggccatgacccaaggacatgcctccgttgttgtcatcgtagtagtcatatcgcttgtgagccggagccactgccgccaggtccttctccttgacctcctcctgtcgcttcctcctcctgcgcatcttggactccaccacgttctccgcactcgaggcgaactgccgctgtccccgcagtgcctgtcgggatctgctgcccaaatgcttcctgctgtcgtccatagtcaggccgctgtagctgctgcccaccacgctgttgcccacaccgcccatgctggcgctattgctgccaatcgccgtgaatcccccgatattgagcacgtccaggatggtcggcggcaccgggtccacaaagtgcgacagtttcggctcctgcagcgtgcagtgcaggtcctccagcgagtcacgcagctgcaggtgacgtgtgcgatttttcaattcgaagatccactgcagacgacagtcgcaaatgaatttgttgtctgcggaagacaggtgaaaaagaaagaggagattttggggttaaatataacttgcaggcggctggcgggttatccctgaaattgcttttgtcaaatcgtcgccccaaaccgattgtccacgtttgaatgccccgccgtctggatgtttgaatgcctgaacgtctgcccacgtaagcgaatgattttcccctcagctgctaagtggccgactgcaacaattggctgtcatttgatggccgattgccactctagctacgggcacacagcaaaaaatatcacataccacataaattaaaaaaaagctccggaatacatcttaacgctcgattaatgcatgtaataaagcttagatatctgcagttctcgcagtgcacggcttgaagcttcagcttcggcttgtatgaatccagccagccattttaaatgattttgcccacgttcgagagtagggagtcaaagttgcagacggagttggttggagaaagaacaggaacagaagctggagaaggagtcggagtcggagtcggagtcggatgtcgatgtcgttgtcattggggctgctcctcacgttaaacgcctcaatgacatttccaatttagacagcagcctcctctcattggggagcgattgcagcaggggttttgaccattcccgtctgtgggccagcgtctgtcagtcagttggacagccagctccggttctgtgattctacggttccccagtttcccagttcctctccatctcaaactgttgtcaattattttgtagtacgcctggccatgcgtggacccaatctgcccctgcttctaatcctgctcaaaaccccttttcaatttgctatttgcttagaggacatgggctgactgcgttccaaattgagcggataaacaagtgccagagtggatctaatcgccgacaatggtctaatgaataaatcaaattgcgtttcaatgggtttcccgaaggaaactttgccctgaaaaggggctaaatgagctaccctcgtgggtataattaggcccaaacacattgtgacacagtttgtcctgtcaacatgtcgcataattagcataagcgttacgaaaagtattgactaactggcaaatacacacatgaacacactggctattgtcatcattatcactggcaaggcacacaaagtctgtagtcagccaattgagttggcaaacgggtgtccttttccttccccgaatgacaataataatccgaggcatatttctgtagtccgggcaaaaagaaaacttgccccgaaatgacaaaaggaaactttgctttgcaaaatagtcggcaaattagtgcaggacggagggcaaaagccaagaggagccagtcaaaaattctaattttccatatgaaagcatgcaaaaaccataaataaagttaaatatgcacagccggaggagcagactatgtatacttggaagccggtccggaaaaatgttggaaaaatggccaacgacttggcaacatttagcaagcaaattacaacaaaattaacatgataatgaagtgacccagctgggtggtgtggaaaaagctggaaggtggatgaggatgagaatgtggccatgggtgggtggacgttgcagttggcagctgttcgcagctgaccaaatgacaatgacttgcccccagacaacgttccataaaagtgcttaaaaaaataaaaattacaaaaaatatgtgtatagaaaatgagcggggtggagaaaatggatccgaggacactagactgtggcactttgtgtggcataaaatacttttatatttttaatgatacttggccaaagcggtaggaagtgttttggtctgctgcacacactccggtacacacacacacacacgcgccccgctcaccactctgttggcatgcaatgaactccctcaacccatgacaaccacgcccccttattgccatatatgtacatgtgtatgtgtggctagagaactgcggctgttagtcaactagatgactttcaactttaacagctcctgctcctcttactcaacccctctgcttaacactgtcaaaaaatattaacaccccctaataaataagagtttgatgaatatatttctttgaatatccttttctatatccattttatctcagaagaaatcttgatatgtaaccactgttcaatgaaatatgtattagagctctcaagcctccaaagtatgatcctatctagcaatttcaagtcgaccaaagttcgtctcagtgtatgatgacgcagtagcttttctttcattttgggttaaaatttggcgaggggacagagaactgtcggaaacgtttttacggttagcaaaggacatttacatacacactgacacagtgggaggacctgctccacatgcatgcatgcgtctgtgtgtacattaaattttattattgtcattttcatggcgttgtcggacggattcggaccccttttccccttcccctttcctattcccttacccttttcccatttcccttttcccgcccataacttttcggtcagctctatttgcataagttcagttttgtgtgcgcgtgtgagtgcggtgcagccaaattagactcaactggaactttgtttggtcagttttaatgccgatgtgtctgtgaggcatttcatgtgttgaaacatattcataattagttgtcagtgcgggaaggaacggggacattgagggccggaatgtggactcctttgattggctttgtttgcacaagatgtttgccctttatcgagggtatatgtataagttttccctggtattattttacagtggctgaaatggcagcaatccttcatcatgagtcctggcagcggcctctgcggccttttttcttctgcacaccctctaaatggcgtttcattaacatttattttaaatttattatactaaaactgtagcttgccgaccaaagcaggaaaaagtttcaaaaggaaaaggcaaaaattcgctttaattggctggttttaggtgctgcctgccacattaacccatgctggcccctctcggcacctacttccgtacatatattgaaaagcgcaaagaaatcgctgggtttttcgcctttttgcgttatttttttttttttttggttggttgaggggtggaaatatcaacacaaacggccaaagtttctgcacgcccccaaatcagcacagctgctggcctagttttaaggcctttgtttcaccctggactacggttttttttttttttgtactccggactcttttcaatcccgaccgcgtcggggtcaccaggaatccatgaatggcgcgcagctttgtttgaaatcagctcatttttggcgggctcgccaactggccaacgccgggcttcaggcttttggccaactgggaaaactgctagctggtagctggtaactggtaactggtagtaactgggaactgggttcgtttgcggtggtccgcctttggccgccactaggggacagcacgcacagttgccagttaccctgctggggggtgaactggggtcaaagggggcgtggcagcgttgtccttcgcctttctccacgcgtgtatgtgtctatgtggtggactctgctctccggaggattttatcattttttattacatatctcgagagcgctatgtatgcaaatgaagtcgaaagtttcgctttgtgtagttgctagttggttttgttgccggtttgagtagtcgggagctggtgataaaggcaagcttgtttgggaaggcgtgaacgggatcttctccacccattgactttggatactctttttattcagatgatgcacacagcatgcgataagaaagtgatagatgcgagccaaaaggattggcattcaattttaaaggacaatataggtactatcttgaaaagcgatagaacaaaaaagtcaaaagtttaaacacttttaaggtaaaaaaaaaacatatattgcgatgtaaatttaaagctttgttaataataagaattttaatgaagtagaaatccatatccatttacgaagtcaaagttagtcgatgtgatactttctatctttccccgaattccctctcacttttcggcaagttcttttatttgtccaacggaggggaagccctcaaatttgtggaccttcttcgtgccgcctttttttttaatgagcttcattttcaaagtttttctttggctcgttttatatttttttctgttggcttgttttctggcttgttacggttgtgtgtgattttgccggctcattcgcattgcgtgtatttaattttgttcgtcccttttggaatggcaggggttggagattcctcggcaattttcaccaagttcattcaaaatcaaatggggttccactaagttggggccaaaaaaggcggaaggaaagaagcagccattgaaagccatttgaatggccgtcccttttctcgccaattttctttatttcgccaagtgaatgcttcgctcattgaatgttttttattaggccaaatgaatgcgagccggtacaggaagtggactaaactggaagtcctctttattttgtttcccttttttattttcgctgtgtgaatggccgtacgaaatttgtaatggttgtgttgatttttgcgcagtgttttgtagtttgtaattttaataacattcagtgaaagcgcaggattttccaatcagccgcgccaagcggaatcacgaaaaaattacactttatttctttcatatcaaattattttcggcaatcgagcgtgaagtcaaataaacagtcggcaagatcaaacagccggctgccaaaagggaaagtcattgcaagcgatttaacaactatgcccggggataaatattttatgaaatcgcataaacaaatcaaagacgaatcacagacggagaaaaaaaaaaggaaaatcactttcgcaaaaccaaaaaaggaaaaacgagagactgagggaggcttagggcagaaatcaagggcggcgatcaaatatgaccactcaaccgcgccaggacttgcacattagccctcgagcatctttgccaaaatatttgcacagctgaggggatgtggaatgtggggtggatttcaattgcgaagtggagcagggggttgtctataccggaagagggttcgcgggcaatgtgtttgttatatggtaaatcgcataaaaaatacagacagctatagagggtagatatatggtcataacaataacaacttgttacccctgatcaacgtgcgattgccggcctaatgtttgccaaaatagcccaagcatcatcgacgaagatttccggcccactcccgaaattgaattgtatttaataaaatatacgcgagggtggcccaaaagggaaaaaaccccgtggtacgaattgtataaataagtaatgaatcttttgttatttctctgtgatttgccaagtcaagtggatattgctcatccctggccttattctttttatccacggagtgggtggtgttcagtctattatcggcggagatatgcattatacgcgtatggagacactggccatatatcaagcatcaaactgacataaattgtccgcttgatcggatggattggggcatatatacgtactgaaggattggggaattgaaggactggaggactataaccacatgccgagatgcaccgtgcagttggccattcatcaatgccaacactcgcatgtccgcatcgcctgtcatccccgatatatcgttcactggacactctcgacgatgcgatacgaaatacggatatattgcaaattgaaattattacatagtgtaaactctggcaaggaactgcctccatctgtttatttatggcccggctgcactgctaatgctcgatggccgggcccagagttatgcgacactcaatgtattttatcgaatgcggcataagttggccaaaatattcaattaaatgctagtcgtacacaatttatgtttgcccggtgccgttctaatgagttttggcccagttaatatcgatgcgaactatggaaataaataaacctgaagctatgtgtgccagcagcagacagtttctagtttgcaggtacacggcaaataaaaagcctatcactgatttatgggctattaattagtttcaagtcgaaaatatatatttgaatgtttcatttaatgggaattagtttgaaacatatatcttcattgatttatacctgctataatccgaagcattcgcatatatatcagactttgattgcgtaccaataattaaaacataaatcgcctaattatatccaaaatatattctacattctgtacagcttgtttgtaccatgccatcttccttggcaaatactctcagttcaatttaaatgttttcccttgtgtagttcatttttaatgatgccattcgaaggccttgctgtttactgtcaatgccgaacgagtattgatgaaggtgtttgctcagcgcacacatcctgcgaactgaaggacatgccatgctccagcgatccatctaaagtaggtaggactaaccaaaaacgtacagccatatacgcaaactggcaaattaggcaaagcaagcgtggcgggaagaacaacattccagtacatcaactactgacgaaaaaccgcaggcaaaacattaccccagtgcgtggttcggaaaattctgggtggagggaggcaggtcggaaaacttcggggggagctgggtggtgggttgggaggtagggcgtgcatatattaagatagattacttcactcacacacatttcggcgcataagtgctccaatgacagccccgaattcgcattaaaagcagagccaaagccgggatcccacggaatccaagcgggcttatgcgggaaattaacacgcctaatgcccgggcaccttgaagtgcgcataaattataaacaagcttcattatcccaccgccgaaatgtcgtcgtcaaactttaagtccccggctcgcaaactatgcgacattggcgctggcaattataataaattcagttaataaagcgcgttaatgatcagccatcagcagtagcagagccgcggcactaatctgtatctgtatctatctatctgtgtatctctgtaacttgatatctctatcctggcatatgcaaggaatttaatggccgaattgggccaaatggcacggacagaggctaagagtttccggctctattgtcaactgagccagagattggattaagttttgggtggcatgctagctaactaaaactaagtggcagtcaacgaaagacttttccacttaatttcgagccaagcgattttccttcgctcttcgtttaaagtttgtcctcaaaaaaaaaacactatacaatatgcagctgaaatggagtgtggaagggtggttgggagtaaagagcacatatgggtgcccctcaaggcgcacaaagttgtccaacattatacaataaaaactcattaataatacgcatttaagttataattgaactacttaatgtggccgctggccctggaagtgtggaagtgtgtggggaaattgtatgaatatgtccattagctttcaggcgccgcctttcataccaccggaatttccagccatttcccctggcattcattgtttgtttaaaaaagtatgccaggcgagtgcgcatagtttcagttttcattcaatcgaatttttgcctgcggctatagaaaaaaaaaaggtgcgtaattaaaacggtgcccggtgaaaggcgaaagacaattaaatgcatgccgctcactgtcgaaacaaaagatgagcgatgagtttgcgtttaattacgtggacaggcggcggagattttaatttatgatgcgtgaatttgagctcaaaagcatgcccacatcccatgtccacatccttgccatctttgccattcgccgccacatcctcgtcgccaaggaagtgcggaaattgaattctaaaatatttatagctcccctttttggaatactttcgggggccgaggagtgatttatgcagtgctcagcagcaaattgcaaatgaaacgcaatgaaacgaatcgaaacggaatgaattactacttatgcatgcatgttcgccacataaacacacacatctatatatccgccaaataaatatgtatgtatgttccacatgggataggttaggaggcaggcatgtggaatccgagcccgagctggtctagtcccatcaaatcggagtcccacttattagtctggctggacacatgctacacaatgctgagccatagatttatggctggcaatcatcgggatttgcagcaggacacgcagcacatgcaggacacggcggacatggcggacatggtggacatggagcaactgctgccctgacattgactattgaaagtcaatttcgggtgcgtgccacacgctcatttgtccagtttatggccaacatcatttgttttggcatttttgccaatgaggcgcaaacgccttttatgcgtcccaataaattctcgcttccggcatctaaattcgcccccactatatcctgccccaccccaacatgtccctaatacctgtttattgttgcagctttgtgcgcgcagtgtttacaaggatgctgatgctgcattgcaaatgagtttcggtcgtcgcaaagttgaaagtttaatttgctgcccaactgggcaatttaactgccaggggtcaaggccctatttcatgggaaattctaataaagtgctttaaggtggcgtgtactcatgtattaatcaccttcagtaagtgcttgcaaattaatcggttgactaattattgaaatttataaggacgtaaacaggtttagcacaccctagggagccgaaatcatttaataactgagaaacttaatactccgggctattggagctagttttatggcgacttattatggcgagcataaactattgtgtgaaaatttgaggctgccacaaattcgacctacgagtataagatttgcccagaggtatgcattagattcatattgttacgttcttttagacacgtttatatgtggttttaatgggtattctctttagcttaaattaaaacgcaatccatttccaattctgtttttcatgtgtagcgatagtggaaaatcaatacgttacttgaaccattttaacctcggtgaaaccaaatattatttcatgtgctctctgcaggctctcactttccgtttggcctcatgaaaatttatgaactctggcattttacaatactctattaagtgctgccaagccaacagaaacagaaagccgaaaagggtggaccgaataatcaaattgcagtttccagctgtcatgcccacagacgcacagtttttacattgtttttggctatttggcagaccggcaaaaacagagctacgaaaaaaatctgttagaaatcctatttatatttcgaaacaataaccattcaattccatctaacgactagggcgctggccaccggcgagcataacgaaccaattgagctggccacgacccttgggtttggcgaggggattcagtcgttggtagcgctatgggcgtggcatttattagcaattgctatggcggcgccttctgtgaaaaattcgaactgcctttaaagcggaagcattggcaatgcctggcagaacatggctagtagacgagaccaacaggacaccacaggcgcgacgacacaaacagaacgtgattcgcatacaaataaacaaggctacagagcgcactgtagaggaatccacctgctccgctccgatccaaccaacccactcgaacacaagcacacatgaccctttggggcatcggaattgaaacaaatgccacaatgcagggcgtgcctataaatttttcaccaaatacattggccataggtgcaactgcaactgcaactggaatgtttgggtggtgcagtgggcggtgctgccaaaccagcatgagtgggtgtggtccgtggctcaaaaggtccgtgaaatggccaactggggcattgtttaggggccagtgttcaactgcccgcacacggacaacagttgaatgcagaagcaggctttgccagcggtcgatgtcactccgcaacaggacactcgaaaaaaggtttatcacttctagaaaattgcttttgtttgaatgctttaaatgaatgcaagataggcaacgatatctttgaatattttcttaagcacaaactttttaaatacactccccatgtacgtttttaaaccatttctagtatcgttcaatatgaattaagttacttcttctaaatgaaaagactgcatttctttgcctgcaccttggctaccagcgatgtgtttccagaatctcggcaaagctgcttagctgccgcctgtcaatggcaattacgtcctggggcagagttcaagtggctgcacaaatcacggcgtgaaatgaagagtcaaccatcgacccctggctgccacactggatgctccaccttcacgtcgagttagagcttgatgcatgggctgcaatttcgatgcgagtacatgctgatcatttgtcctggggacccggagccggtgcaaaagaagagctccggtaaatccccgaagcccaaagcgtgtgacgagcattttggcaaatagttttgcccactgctcaccttgatggcaaatccttggttacgagctgcctaggaattccatcagctgatcgattagtcgttgccgccgaagcaaatacttttgcctggggaatgccgcttgtcagtggaatgtggatgtggccagtgtgggagatgagtgtagatggaggcggaggatggacgaaggtgccatccccatgtcacgttttatggctgccagtgcgggtttatctttggccgacagcgccgacgtctgttgcgagtcaacggtggatcctggctcccatgtccttggccattttgttgcaatttttatatgcttttatgcacttgagttggcacatcctcctccatccgacagcctccatcgggcccaccttcgacacttggccatctttctgccaacgtgtcatcttgccacttggaagcattttctcgttcgctaaattgagcagcatttttccctaagacggattcccacttcaatgctcaatctttgaaaaaaataattcacattcacatttatgtgagatttcgtttgaagtgtgactgtcacagagcatttagcctcattaggggcaataacttgtaggcaaaaagcaaaaagttgtgtaaatttaatcaggaaatcgtatgtaaatgtttgaactttaggctttagctttgggtctaatgaagcattcagtaagtgccacacattcaaaggacggaaaatgtgccagagtgcggggataatcactgcatatgaattaaaaagtttttggggggggcgaatgcgaaaatattttgtagtttaaagcaatttgaagtcatttgtagccaatttgtgaaatgtctgtgtatgtgtgcgagtgtgtgtgccaatgcaattacagttgctcactcaaacacacacatttgtttggcaatgcactcagccattccgacgtttcatcgtcactcgtccttttttccagcttttttcgtacttttttttcgcactgcaaatgagtcatgctaatggcaaaccattagcaaaaatgccactgtatgggtgagggtgataattaagttgtgtgcatgtgtgtgtgtgagtgagtgctggtatttcacagagaaatgtgattttgaaggctgttgttaaatatttaaatgtattccatgagcaaaagccattctcattgttgcccgtagctttacgtagtttacgccaaagtctaattgcaacctaagccgaaaataaaattacttaaattgcacacagaaaggtgattctttcaaggcggcaaacaagtgggctaaacgttttgctgaggccttgaatacaagttattaccattcgaagaagcaaacgaaattatttgcattggaatgagaaatgaatgagaaagtatttcgcttttgaaattgcccaagagtaggcaatcatctattgtggcatactttttgacactggagtggctataatttactctgatatttgtggaggaaataaataaactcactcatggaaataaagttcctcgacaaattcccaaactgtccattacttagtgaaattagttttcggcacttcccagctgcacaagtggccaaaaaaaaaaggccacagtgacaggccaacaaaacgcggacttcctatttcattttcatttacctttaattgagctaatcaacacgctaattgcattcgctattagccgccgaggcaaactgaaccgaactaaagtggttgcgacaggcagatattttattgttatgcgttcgcgccgcaaagcacttcaaaattgcactttaatgactaatttagacacatacatgcgaggacatacgaggccataaaaggacgttttgctgtggcggcagtgggacgtgagtgccgccggaagtggaagtgcacacttgagcaatggcgatacgacatttccttaatgaaggcgaggggcataaaagttgatggccctccggctcatttggccagaagcagcagcatgcagcacatagcgcatatgcactaaacggagcaaacggggccaacggggcgtatgtgtaattataacaagttcggacttctgacagttctccattttgtgcacttgtcagctttttgtcacgtcacccctgccgctcgatggcctgtcaaagttggtatgcttttgcgagtagagggctccatggctaagtttggaactagtagacactcacctgacacgagcagctcgctggtgctgttgaccaaattgtccataattggctggaatgtgtagaacgtcagcgtttccaatttgtttgcctgcacgttgatggacagcagggcgggggttccccgcagcaggccattgtcgatcttcttcagcagattgtttcgcagattcagtgttttcagtgtattcaggccatccagagcgcgctcggaaatgcgctgaaaatgaaaatgggttaagaagattagtttttagcttgtgcttaaatttgattaaacgcaatttttttttttgtttttatgagggtgcaaaatgttattttcacagcggcgaccacatggcatatactatatacaatatttggcatacaaaaaccgaaaaatattttcgtcctgccatttttccgcgtttccgcgtattattttcattgtttttcacagagtttcgcttttcgtatgccattgttgttgtcattgtcttcattgtttgtttgcgaatttatttatgtgtatgtatatgccatttatacatgtacaatcacacccacactcgcacataaactcctgtttttttttttgtttttttaacttgtacgtcccaattcgtttgtcttgaattttattatacggaaaaagtgttttcttttatttcatttctggtttgccgttttgtttggctgaacaacgaaagtgaaggcggcgtattccgccattatttaatattcaatatgctttgtctggggaaatggaaaaattatgcatattaaatgacgagtccaaggcggaggaagcttgtgctaaagttccctgctcccgtgatgtggcattgaaaaataacctcaactcatgttgccctcaaatcttttcatgtttgtttatttgcccagatgattgacatataaaaaaaaaagtatgattttactgcgatattttgttagtttgatgggcgatgcttcgatgcctacgcgtccaatttattagcttgacaacggcgaaaaaatattatttacgagcgatttatgtgcggattgagtaaacaaagttatgacaacgggattaatgggtgggcgggtattcgctgaaaggatcccaaactcatgaatttctatttaaattgacaaaatgttaaaatttttctaatactactctttacctaagacttaagtcccaacatcttaaatgcacttgtactgcacttattaagtattacataaaagtaaatctcctgcaaatgactatgcgatacattctaaacactttttggtgactatcctacattcttgtcattagatttcttacatgtgtaatggctctgttaactattttaatcgtcaaagcagagtgaaagctgcttaaagctgttaatttctcctacactttcacctaaatgcactcggctagccccttagccccttaacccgattatctgttcatcatcatccctcgaatacccacacatccgcacacaccagcacacacatgcagcgttttatgttgtgtcagagctaaacctttcaacggcaaatgatttatgaagtgagcaaagggaaaaaaaaagaaaagtatatataaaaaaaaaagggaaagctgacggggaagcccaagccaaacatgcaacacaatttgcttttattgaaggcgacaatggcacgaacacctaactaagaaagggaaattttttcgggtccaggcaaatcccggaatctggagtccccgggccacgaaacaaagcgcaacgtgggcgataacaagcccaatcattatggctatgacaatgcggcaaaggatcccagctgaacaggaccccacttgagcggctgctctcgagtgtcctagtgtcctgtcctagtggcctgacacatatgcggagtcgtctgagtgtgacatgatatgcgagcactttgtaaaatgggaaaaatgaaggagcagccaagcagccagcagccaagcagccgtccagccaaggaaggaaggaacaatgttgggccaggatatggatattcaggatttacgctcatacggctgccttacataactttggttgagctgcgagtgttaagcgacatttttctatttacccacacacgctggccatttttatggccgccaggatacgcaggatacagaagggtctccgttcgccattcctgcccggccagctaccatcattcgccggatatcagatggcagaaagggagcgccataaatccattattcccatgatttgttattcaatattttgtaagtagattaacttgcggcgcacatttgtttgccaccgagcgccgaaaggcgactgtcagcgtgcggtccgttgcagagggtaaatgtgcgaattaagccaggaccttgtccacaccaaaaacgtagaagacataatttaccaatctatttatcatattttcgctccccgaacagaaaacggccaacggaccaccgatgctgagtgaccacttaaatcaccacaagaatagacattcgaattgaatttatgacaccagcaaaaaagttgcctgtgtgttttggcccccaggatatggcatttatggtgtcctgccctcgtcccttctgtttcttatggccactcggcaatttatgggcccttaagtcagctgctctaagttgaccaagtggcccaggcagacaaatctttttaatccacttgcattagagttgattgagaagtttcctactcctagattgcattgccccatacatatagaggtggctataaataaaagcagtgaaacaactatttcgagtactataaaagcgcacttgtaaaactcaatcaatctgggaaataatgttcaagcttaaattggtttttgctgcggaaattacagaatgaaattacgaatagaaaatttattagtccacctatgatggacttttccccatcatctccacccgttatcaaggtatacacacactcacctcaatgcgattatcgtctagttccagctcactcaggctccacaattccgcaaagacagtatcgccgataaagttcaaattattccgggtcagcttcagcacatttagattgcccagtcctcggaaaatctcgctggtcagcacattgatctggttgtgggccagattcaggaaggttagcctggccatatcagcgaatagaccctcgtgcagagtgctgatattgttgttattcaggaagagccgttcgcaaagtggcaaattacggaatgcatagcgatccatctcgaagatctggttgtgctccaggttcaactccctcagcctaatgtgattggcgaaggcatcctggtcgagggccattatgtgattgttgttcaagataatcctttccaaaaagggcagatttgcgaacgcatagctcttgacaatctccacctgcgagtattcaatcacaatgctgctcaggttcttcagcggttcaattatcatggtgggtatatagtccaatcgggcattgttttggatcacaaacttcagttcccgcaaacgcttctgctgatagaatcgcgtccaggtggtgtcattctgatgcaatccctcggagaacacccagcactcggccttctgcactggcacgtggttctcatccggggtacagtagcacattagcttcatgtcacgccgccgggtgcaaaatccagtgctgtccatcggtccgctatagccagtgcttcccgagttcaccgcactactgctggtgaacacatagccggaggaggagcccgctgtcgacgaggagccactatagtagccattgttcatgttgttgctgctgctggaggaggacgagaggacgccactgctgctgccacgccccctggtgcgccggtcatctttggcgcgtccttcggtgggcgtgaccaggcaggcgccaattagcaggagcgaaaggagcaggaaacaaatggcgctgtccgccaaagtcgccattttatggcgctgatgatgcggcaacatggcgagcttattcctatcgctcggcggaagagcggattctgcaaattcagggaacaaaacagaatgacgtggtcaataaagttggtttatcttacagtgtcttttgtaacccaaacacttcaagaaataggaaattgttcatttacttggaggactttagataaatgctatatattactatattccattcccgactaaaatatcccaatacattatagttaatatataattaataatagatccctttttatcataactctttctctgagtgtatcagtcaaggtggaaatgattcgaaggaaaaattcggttttcatgacctggttttgtgtttgaaaatatctcgaaataaactcgagcctaacaaatggattttattttatatttatgacaactgcaccttgtttgaggtggcgaaaaattgaaactggaatcaaagttggcaggcattcagtcgatttcagttcagtttatttgcccacttgatggcttcattgttctcggcaccgctgaaagtgcttcataaaaatgctaattaatgttgttaactttctcacttttgctcatatttcatttggcccaattcgcgggatgccgcggtggactcatccgcatcccagccccgtaacttatttcccctttatttgcgcccccatgaaaagttgaattggcccattgcgaagcctcctgctgacttcatttgacgctcggttgctttgtcacttggccctttccgaatccattcgggtatttccactttacccccataaacaaatttatcgagctcataaataactgcaacactgtcgctgattgttcgcttaacggcagaagtggagatgtcctatgtttttgctggcatcccctttcattttgcatttcaagtgccatcgggcaaagtgctctctaattatgctcgtattttttaataaattaataagtcacactgacaccgggcatatttcggattctcgttgctgggctttttggtctttttggtccacttggctcttgactgccggattggatggcataatgaagtgtaaataagttattgtcagttgtcaagtgagttatcgtcgttatcgacagtcagcccagtgatttgcataaaatattgtcgcaatttcagggaggggaaatgagacgggattagacggatggaaagccgaaagtcacttgagttattgactcgggcatgcttcattacattgatttcgattataaattttaaataaaacgatgataagtgctgcgtagcatgatgcgatgcttattccggcttagcttccagcttcccctatctgccccatctgctgttcatctgctcgttttgggcaaagttcagggctcaaggagcattagaagtggctcacaccgcaggattaagtactcaaaatatacatgaaaactttgcgcagccagacgaaggcagctgaagatgacttgatggcttcaatttaaatatcaaagcaaagtcgaaactaaaatgtcctcgaacacacacacacatatatatatctctttctatatatacacttgtggagagtgaaccacatcatacacagctgcatatatatgtggcaatgaatcggggggggatgtttcacatattctgggaatttttaagtgtttcgtgaagcagcaaatcaaaaaatacactggatggtcgtgtaattagatttccgcacaaaaagagaagaagggagttgaaaattcacccacacacttggattttttttgcacagaagcaacagtagttactggtaaaatgcgtgttaaatcgataaaaactttttatcgtagttctttaaatttgtcatacattcttgtctatttttcagtcatggatatagcttcacctacttttttgctgtgcacacatggagcaacgcgtcgctgacagccaattactcaaaggcccgaatggaatggccagaagggaagggggtatgggaaaatggatgagagagagcgttacaagcaaatgaaaaatcaatttgttgattatgcataaatcataagatttatgcgactcctcactcagcattcatgagtcatttatcaaacgagcaaacttttctctactgccttcatgtcagtatcacaaaaacagaaagcgacgaagcgaatcacaaatcgaagtggcattggggggcaaaaaacatgaagagtgcaaaaacggtcgagatgtttcattcatcttgagttgatctaaataatatataaacaggcgataacaatgtctagaccgagagaagatttcaaatccatgtatacataacgatggcatctttgcatgggattaaatgcacgctgcgcacaaattgatctgcctggcttaagttctttatctcagagagtaagcaaacaccagcagcagcaaaccttgacgacaaacaattaccaagaaaattattcccccagggaaaatgggagtaacagcagccagactacacaggcaaaacaggagcaactataatattgttggcaacagaaacagcagggataatggagctacggcaggctcatcgccaaattaaaggcagaaactttaacggggataatctcgacagcagcaacatcaaacagcaacatgggcagctgcagcaataacacagcagggcaatgttgccgttgcaagagcaacatcagctaaattgagaacggcaacatgatcaaaatgtggggcagcagcaatatttggtcatatggtaacaagctgtggccaggactaccataagaacaccaaaaatttttagaatatgtgccgtaaaagtaaaatcaaaatgtcacattaaagatagaaaggctattgaggcaacctgcaacactggcaatatatgcagctgcaacatctgcgagtgaaacaacagttacaacactaattgctcaggtaaaagtgttaagcactaggccaacttaaccatccttagttgctcagatggtaatagcaacatggactgtatgtatatacaccacgggccacaacattaaaactttcagcaaagcatttaacatgggcagcagcaatagttgcaacatcaacgaaagtaagagcaagagcggcggcagcttaaaggaaagtcagtgcagcaactgcaataataacatgaccagcaacattcaggacaacagcaacaggagcagcaactatggacagccaggatacgggttgccttaatgtttcgcccatcgcgctgagttgttgttgcaggaaaattgcaacaagaagcaatttgtcttgttgtttataatttcgattaaactttcgaagcgagtaacgcatatgtttgtgtgtgcaagtgtttgggagtcctcggctgtgctcggctgtgctggtgtgcgtgcaaacaatgggccgtgcaaaggcggcgagtccttttgccggggggaaaaggcgtgtgaaagtgtgacagaagtgtcgacaaggagcgaggcagcaacagcagaagcagaaacagcaccagcagcagcggcagcaacatcaaccgcagcaacaacaatgatgacggcgacccagtgggaaattggagcaaagccgcagctaagctgacagccacgcaagcaatttcccagagaaaccgggcaaacacaacaaccggggccagataatattttccagcaatggaaattccttagctttaaaaaggcggctctaccaagaaactcgactcgttatggccttgtttgtcgtatcggcaaacttaagacaaacacacacacacactcgcacatacacagagagagagagagagagagagagagagagagccagcaagtctgaggttgatcaagacaaaagctcagagtcgctatactgctgtgtggaaattgttttcaattttcgttatttgacaaatggtgacacttccgctgtggcagccaggacaccagcatcatcaccaggcaggctgggccaggactttaacaatatgtgcacaccgacccacgtctgtgtgtcatgaggttttgtcaacaataagtttttatgccggaagactcgtagttgtttatggcagtcccccatcagatgcagcatcctcgggctcagccgcatcatcatcatcatcagaatcatcgtcagaatcagcatttctcgcagcgggtttgtgtgcacggcggaaaaaaggtaatgcatatgtatgcggttcatatagacatatcaatttggtaacttcccacttttgaagatttaatcgtgataggtctatgaactgttggttagagattaaaaccggattgttacgattctcttaagaaaattcttgcatttttaatctctcagctaattggattttataccataattttcaacttgtggtttcaactgggtactgacttaaatcgaattattccattgaataaatcaactttatttattcctcgcatttattttgcgtccgtgtaagattttccttaaattacgtgtcctgttcctctatcatgtgaatataactttaagctgtgacatgaacgcagctcggacgtgcctgactttgagtgactgcctctgactgactgactggcgaggtgggattggtaggattgttgggaatagagagggagggaaatggagccactaagggttagtcgctttccatttagctgagctgcaaataaaaggacagctacaaaaacttggtcagttggacaaactgcagttcctgtcttcgttgggatgtcttctgtgcccctcatccaaggttttctgacccgtgaaccccgggactctcgtctcatctgacaaatgacgcagtggcaaaacggcagacgaaacatagccatcaatcagtgggccaagttatgacgtccgcacgttttattcgcatttttattaaggctcacaaaaatatccggatttgtccttggcttgcgtcacttgtcagcgccagttggagtctgtttcgatcaaatctggagaacttgtgagtggggtgggcgcgtagggatctttgcccatatatatatatatttattgtcagccatgtcacacttcataaatatttcataaattgcttcgcatttattttgacagtagcgccaaagttttggctgccatttgttaaccctttcacttgccgctgttgctgcacatttttttttgtttcttggcccgcttattgttatttctgttatcatgcgaggcaatcatcgccagctgtcacacatattgtccttgggggaggcacctaaccgcccattggccatagcccaccgcccatcaattcaatgttccctattccatattgccataagcaaaatctgcagacagtactcattctcgcacttttgactacttttaacttgggttccatttcccagaaactgctcttcgacttggtcttgtacgttttttagcttttagcatacctgtcagcagaataaaatggaaactagttgccagtgcaaactttcgtcttcgcctttttgttgacacatatttctgggcaaaaagctggctatacgagtatgcatatgcctgccacgccccctgcggcattcagacagacaacgccccactgcacttgagctggctggcacattactttggccgtcactccccgattttttagtcctgattcttggtggcctcctttttggctgtactttaagtttccctcatctctcgcaggactttcgagagtcctggcaactgcttaacgcccaaattggcagcacctggccaaaagtgttggctgactgtcctggcagataagtagtcgtccgaggcttttcccttcgcttttctttttttcttttctttacaggattttatttttttttcgagctgtgtgttttgactttcaacgaggagcgaaattattttcgctgttgcaagtttgttgcaacttttccctgacgcaaagtgaaaatttgtcatgctcgttgagcttctcgagttcccctccttcgtgattatataataaattccttcagctaggcaaaaatgctccgcaaagacaaacacaaacaaacataaatacggactgagcagacagactcgtctgagagaacttttaactcacttgccaaatattttagcaatttttgaataaaacattttcaagattccgggcatctccagccagttgacaaccctcatttatcgccctgtcatgtaccctttttatccacctgtctcagcgctttaaaagtgagttccataggggcctttagttaattagttggcattgccgacgctggagaattcctattcactcacatatgcactgtatagtttttacagcccctcaggacatgttcttacctttcgattgagtcctggaaaaggccaagtcacgtacaccagaagttctcgatctgctgactaatgcaatgtatctgcaaatatatggagggggaaaacaaattagtttgatattacttattataatgtcatgtttcggtctcgttacagacatgtttttcagccacaaaattatagcgttgctggaattggtatatactttattcataagcccatgggaaggcctcaaatgctaatggaaattgcgtattaaataaataacaggtagaatattatatgaatcgaaaaaataaactacattatctaatctgaattgagctaagcattctatggaattctgtgtggaaatacattagatcgcaataataaaactaattatggtgaatatatcaaaatcataatattgcatgtcaaagttttctatttgatttcagtttagaaaatattattttgattttcaattttcattaaattagttatattagaatgggtccggacccggactccaccttttcaacgttttccattgtgttctttacgacccttgcttgggcttatgcaactttataggcttcaaagatcaaaggcttggcccagccaaatctaattgcgttaattttccagtaattgtggtctggactaagttcacttccagccaggacatgcgataaggtaaacagcagaaaacggccggcaacaaagggaaaaactattaacacgaagggggacactatgggcggggtcctggccacaggacgaagtggaggcggtggtgcacatgtgtgaggagaatgcgtggattgttcaggggtcaggggtcatgggtaaggggttcacaggtcgtgggcgtggacggcgcgttattcaaatagtttcggtcgccaggcgctattaagaggataacgacgatgacgacagcccgtggcaattccccatcgggggcggcaccacgcccacatgtgtgtgtgtatgaaaatgaaaatgaaataattgcattggctacgcctaaagaagaggcacaaaaaccgcgttggaacttgcccccagaagttttccgcttttccaccagtggttgtt

SEQ ID NO: 419 - DNA, 2943 bp, DROSOPHILA
cagatacattgcattagtcagcagatcgagaacttctggtgtacgtgacttggccttttccaggactcaatcgaaagaatccgctcttccgccgagcgataggaataagctcgccatgttgccgcatcatcagcgccataaaatggcgactttggcggacagcgccatttgtttcctgctcctttcgctcctgctaattggcgcctgcctggtcacgcccaccgaaggacgcgccaaagatgaccggcgcaccagggggcgtggcagcagcagtggcgtcctctcgtcctcctccagcagcagcaacaacatgaacaatggctactatagtggctcctcgtcgacagcgggctcctcctccggctatgtgttcaccagcagtagtgcggtgaactcgggaagcactggctatagcggaccgatggacagcactggattttgcacccggcggcgtgacatgaagctaatgtgctactgtaccccggatgagaaccacgtgccagtgcagaaggccgagtgctgggtgttctccgagggattgcatcagaatgacaccacctggacgcgattctatcagcagaagcgtttgcgggaactgaagtttgtgatccaaaacaatgcccgattggactatatacccaccatgataattgaaccgctgaagaacctgagcagcattgtgattgaatactcgcaggtggagattgtcaagagctatgcgttcgcaaatctgccctttttggaaaggattatcttgaacaacaatcacataatggccctcgaccaggatgccttcgccaatcacattaggctgagggagttgaacctggagcacaaccagatcttcgagatggatcgctatgcattccgtaatttgccactttgcgaacggctcttcctgaataacaacaatatcagcactctgcacgagggtctattcgctgatatggccaggctaaccttcctgaatctggcccacaaccagatcaatgtgctgaccagcgagattttccgaggactgggcaatctaaatgtgctgaagctgacccggaataatttgaactttatcggcgatactgtctttgcggaattgtggagcctgagtgagctggaactagacgataatcgcattgagcgcatttccgagcgcgctctggatggcctgaatacactgaaaacactgaatctgcgaaacaatctgctgaagaagatcgacaatggcctgctgcggggaacccccgccctgctgtccatcaacgtgcaggcaaacaaattggaaacgctgacgttctacacattccagccaattatggacaatttggtcaacagcaccagcgagctgctcgtgtcagacaacaaattcatttgcgactgtcgtctgcagtggatcttcgaattgaaaaatcgcacacgtcacctgcagctgcgtgactcgctggaggacctgcactgcacgctgcaggagccgaaactgtcgcactttgtggacccggtgccgccgaccatcctggacgtgctcaatatcgggggattcacggcgattggcagcaatagcgccagcatgggcggtgtgggcaacagcgtggtgggcagcagctacagcggcctgactatggacgacagcaggaagcatttgggcagcagatcccgacaggcactgcggggacagcggcagttcgcctcgagtgcggagaacgtggtggagtccaagatgcgcaggaggaggaagcgacaggaggaggtcaaggagaaggacctggcggcagtggctccggctcacaagcgatatgactactacgatgacaacaacggaggcatgtccttgggtcatggcctagacctggatgacaatcttagcttgcacaagcagggattctatggtgccggttctcccgtagtgggtcacaacgatgtggatgtcctgatgacatcgcactccgcgtcgggagacgccctcgacatactgaccaccaagaacgcaatctacatcaagttgttcctgctgaagccagaaatgctgccctgccacgatgaactcagcgatcccaccgagctgcccctctcccgcgatctgatggatgtgcgcagcaatgtgggccaggacatgtcgacggcaggggcaaattctttggcccagggcatgacgatcatagtgagtctagtcgcactgatgatgatcagccggggttgaagactcaactccgagaatggttgctgaatggtgaccccgacgtttggttctacattgtacatactgtcttggagatgtggtgcccttgggaaacgagcttcaacacgttaattacgaaagataccagctacagtcctgtaaatatgtaaaaaggggtaacaaaattcgataaatttaatactataaacctagctgatagctgtaatgatagactcgacttttcaacaacttcagcagcagattcagattgagatatagaaaccgataccaaaaccattaccgaaactataagcccaaaacgaacccaaaagagaacctccgagcaaactggcgtttcatttaaaaagaaagatactcaacttatcgcaggatgatgactaccactacactctactacatagaattagtttaaacggttagccatagtgacacttttggtttacttgagcaaggtacatactacagtaaaacttggaaagcgctaaacgtcttagaatgagagacagagctggccaaaaccactaaatgaggcatgcctgtaagataaacgcaaatgcagaacataacacaatcgctgaaagttgcaacgatagccgttagtcgataggcaatagatgatagcagatagaatataaataataattaataaatgtaataggtaaacgtaaaattcccggccacccgcagttctcccttagagtttaagtctgctttttagttgtaagactgtttgctaccctaaaattctcgcc

SEQ ID NO: 420 - protein, 691 aa, DROSOPHILA
MLPHHQRHKMATLADSAICFLLLSLLLIGACLVTPTEGRAKDDRRTRGRGSSSGVLSSSSSSSNNMNNGYYSGSSSTAGSSSGYVFTSSSAVNSGSTGYSGPMDSTGFCTRRRDMKLMCYCTPDENHVPVQKAECWVFSEGLHQNDTTWTRFYQQKRLRELKFVIQNNARLDYIPTMIIEPLKNLSSIVIEYSQVEIVKSYAFANLPFLERIILNNNHIMALDQDAFANHIRLRELNLEHNQIFEMDRYAFRNLPLCERLFLNNNNISTLHEGLFADMARLTFLNLAHNQINVLTSEIFRGLGNLNVLKLTRNNLNFIGDTVFAELWSLSELELDDNRIERISERALDGLNTLKTLNLRNNLLKKIDNGLLRGTPALLSINVQANKLETLTFYTFQPIMDNLVNSTSELLVSDNKFICDCRLQWIFELKNRTRHLQLRDSLEDLHCTLQEPKLSHFVDPVPPTILDVLNIGGFTAIGSNSASMGGVGNSVVGSSYSGLTMDDSRKHLGSRSRQALRGQRQFASSAENVVESKMRRRRKRQEEVKEKDLAAVAPAHKRYDYYDDNNGGMSLGHGLDLDDNLSLHKQGFYGAGSPVVGHNDVDVLMTSHSASGDALDILTTKNAIYIKLFLLKPEMLPCHDELSDPTELPLSRDLMDVRSNVGQDMSTAGANSLAQGMTIIVSLVALMMISRG

SEQ ID NO: 421 - DNA, 4860 bp, DROSOPHILA
gcagttggtatttactaacatgaattattgctatccttctgattttacgattaattctgaatgcactttttagcaatatcgtaatataaaaaataatcctatttttgtaattgaatttaaattttaaaaactgtatgaatttgtgatgcttgaaaatttttcatacaagttgctagtgacatggtaaggtattccagcttcgacttccaagccaaaaaatatttcttattggaattcaaacatctgccaaattgatttttaaaaaactggttgcgtattcagctagcaaacccataaatgactcaatgtaaccatatggaactaatattttgaacttataacaaaaagattgcctgaaaagcttgccaactttcttatcttcgccaaaaagacgccattttgtgcaggtaccattttttcaccctagatttgccaacgggacaggaattcttattttacctttaatgcaattgcgttggacgtaaagcgcctgcacctggggatccgagaggaacttccggatggtgtcctggttgacgggatcgtccagagcatcgttcagcgatgcgggaaccacatcgtcctccggcagcaaaatggtcaccgccttccgaagataattggcaaatgcatcatagttcgcaatggacaggttcacgattggatccaccgatgtatcggggttctccaaggagtcacccatgtcccacaaaggttttcggtattaaatactcctcaaaaggtgtacaatttaatttttcacaatgcctcgccctgtgaaaaattacgtgagttttttttttcgcaaaatgtaaacggccctgccactcagttgaaaatcgaaagcaaaaaagccagtgctaccatagttgcggcagatatcagaatacagaactgggcgaaatgttaccagtcagtcaggaatgcttcccgccaaaatttcttagagcaattcccatccacgtgagcgatgtggcaactcgatgcagagaaacagctgttcgattgtagagtgcagtgggttcttcctattttgttattcaataattgtgaaatgtgcaattcaatcaattaaaccggtataatgcaagcactgagaagaacacgaccttggggagctgtctactggaatagctggcggcgcctgctaacccaaagctgcacccggaatgatgtgggtgcataatatatccgagaaacgcaataagacctttgttaaattccagaatccagagctaaccagtgatgtcaagcaccggattgaggctcattggcgggagcagctcagtggaggacagttcaatcccaaggactcgcaggacaagtactacgtgctctccatgttcccgtatccctccggcaatcttcacatgggccatgtgcgcgtctataccatagccgattcggtggctcgtttccagcgaatgtgcggcaagaatgtgtttcagccaatgggttgggattcctttgggctgcccgccgagaacgccgccaatcagcgtggggtggagcccgcgtcctggacggagcagaacattgcccagatgaaggaacaactcaagcgacttggttgctcctttgactggaaccatgaattgtccacctgcagtccaaaatactacaagtggacgcagcatctgttcctaatgctccatcgccatggattggcctaccagaacgaggctcttgttaactgggatcccgttgataagaccgtgctcgcagatgagcaggtggacgccaacggctgttcctggcggtcgggcgccaaggtggaaaagaagcttttgaggcagtggtttatccgaacgagtgcttatgccaaacaattgctagacggtttggaggatcccacgcttcgcgactggagggatattattaacctgcagcgacactggattggagagtgtgatggatacgctttcaacctgctcacctccgcctccggacttttacgagtgtggactacccatccggagcatttaaaagatccccatgcctttctcgtgctccgcagcaatcatcacttgtcaaagctaaagggtgcggacagcctaagcgcagcgaacccgtttgcgggcaccacaatgcctgtggtctttagcgacgaagtgacatttccgccaaagagcgatgtttacctggcagcccccagcttccgtggcgaagacaaggatttgtgggattcatatggactggcttttacttcaaatggcaaggatgaggaatccctaagtccagccaactgggaaatgttaaggaaagaggtgctccaggcagccacacgccttaatgttggcggctatcgtgtatcctcaaagctgaaggattggttgatatcacgacagcgctattggggcactcccattcctattgtacactgtcaaaagtgcggagcagtgccagtgccggaggagcagctgccagtgtctctgcctccgaaggattccccgaaggaagcgtttctctgtgattgcccaaaatgcggtgagaaggatgcacgaagggagacggatacaatggatacatttgtggacagctcttggtactacttgcgttacttggacgcccaaaattccgaacgcattttcgatacagcgctgaccaagaagtttatgcctgtggatctgtacataggaggcaaggaacatgccgtgctccatctttactacgcccgctttataaaccacttcctgcacagttgcgggctttcgcccactagcgaacccttttcccggctgctagtccagggcatggtgatgggtcgctccttccgggtgaagggcagtggacgttatgtgcccgaaacagaagtggagattgtgaacgccaaaaagaaccaggcggtgctaaaggaaaccaaagagcccgtggtcatgacctgggaaaagatgtctaagtcaaagctgaatggggtggagcctagcgacatgtttaatgagtatggaacggatacaacgagactgatcatattggccgatgtggcgcccacatcccaccgcaactggtccagtgcaagtgagtattaagttgtatatgatatgatagccatttgatatatctgtgtatacgacagcttttcctggcatccttaattggcaaaagcggctttggctgaccctgcaggacttccaacaggctcgcgaagatcaaactgcttcggatgttgtacccaccagtgaagagttcctggctgaggatgccaagctgttcgatgcgcgaaacttttatgtgaaaggagccacctttaactaccgccatgcacagcaactcagtgtggcaatttccaaaatgcaggggctaacgaattctctcagggtaaggcttaaaactaaatccgttttctaatctcagcttatgcaaaaatattttagcgcacacctaagcatgtcctgcgacatggaaaacagtttgaacgtgcgctggctgcccagatcatcatgctcgcgccaatggctccgcactttgcctccgaactgtggtcaaagtttgtggcgataccaggcaggctaaatcccgccagtcaggagttacagtggagcgaagatgtgcttgctcagcgctggccagacatcgaccccgcctacaatctggaccttagcattaaagtcaatggatttgagaactgtgtaatcaaagtgcagagaacgcatctggataaggtaacgcacagtgatgctctcgacattgccttcaacaccgaatcggtgacatcgtacctaattgacaagaaaattcgcaccaccaattttgtgctttacccgggaatcgaggctattctgaatatctatgtggataaggcgaaaatgaagcaaaagccgccgaccaccgatgatgcagaagctcagcctcaggcgtaggataaggaaaaagtatcgtgaaagtggatagataaagttgagtagtaaaagtttggttgctactttttaggatattcttgcgatcatagttcttaagccgaacggattacggaggagagtgggttcaacctgcccaaatgcatttccggtgttggccagaaaggcgccatcctagattggtactttttaatcatgtttaatgttaaatatttataaaaattggactagttgtaagcagctgctttacaggattggtaaatgcctagaatcataggaatataatggttgctctacctgtgcgcctctatctaaaagccagatcgactaataatttcataaattttcatttgttggaacggcctctcacttcaacagctcgcacatgagattccgcaggtagacatctagctgggcgtaatccagcagcgtatttcggacgatatcaagaagcatacttggccaaagagtttccagtttatgcagcttctccacggcgttgcaagtgttctccagcagaagggcaaagtgctggcgacctcgatctcggacactgggcgccatggcagtgcttcccgcttccgtcccttgatttatattcattgaggtggaagttcctgctccaccaccagcgttcttcttccactggagtgcctcttttcccaccacgagtcgcagggacttgttgtccggccgtaggagccactctttaggagacagtttgctggccgtgcaggtttcatccagacgcagtctcgccaaaagcggttgcagcattacctcgggcatggaccacagaaccaggtcagagagtccaacgtacatggcattcgcagcctccacttccgcttcggttacctcctgaccatttagctgcttcagtccccagtgtgatagcctgtagatggcgtatgctcgccaggtttccttgagcgtaatgccattaccctcggcatcgatcatcaagctgctgagcccctggagctccgccaatccattaagc

SEQ ID NO: 422 - DNA, 2694 bp, DROSOPHILA
ttcgattgtagagtgcagtgggttcttcctattttgttattcaataattgtgaaatgtgcaattcaatcaattaaaccggtataatgcaagcactgagaagaacacgaccttggggagctgtctactggaatagctggcggcgcctgctaacccaaagctgcacccggaatgataatccagagctaaccagtgatgtcaagcaccggattgaggctcattggcgggagcagctcagtggaggacagttcaatcccaaggactcgcaggacaagtactacgtgctctccatgttcccgtatccctccggcaatcttcacatgggccatgtgcgcgtctataccatagccgattcggtggctcgtttccagcgaatgtgcggcaagaatgtgtttcagccaatgggttgggattcctttgggctgcccgccgagaacgccgccaatcagcgtggggtggagcccgcgtcctggacggagcagaacattgcccagatgaaggaacaactcaagcgacttggttgctcctttgactggaaccatgaattgtccacctgcagtccaaaatactacaagtggacgcagcatctgttcctaatgctccatcgccatggattggcctaccagaacgaggctcttgttaactgggatcccgttgataagaccgtgctcgcagatgagcaggtggacgccaacggctgttcctggcggtcgggcgccaaggtggaaaagaagcttttgaggcagtggtttatccgaacgagtgcttatgccaaacaattgctagacggtttggaggatcccacgcttcgcgactggagggatattattaacctgcagcgacactggattggagagtgtgatggatacgctttcaacctgctcacctccgcctccggacttttacgagtgtggactacccatccggagcatttaaaagatccccatgcctttctcgtgctccgcagcaatcatcacttgtcaaagctaaagggtgcggacagcctaagcgcagcgaacccgtttgcgggcaccacaatgcctgtggtctttagcgacgaagtgacatttccgccaaagagcgatgtttacctggcagcccccagcttccgtggcgaagacaaggatttgtgggattcatatggactggcttttacttcaaatggcaaggatgaggaatccctaagtccagccaactgggaaatgttaaggaaagaggtgctccaggcagccacacgccttaatgttggcggctatcgtgtatcctcaaagctgaaggattggttgatatcacgacagcgctattggggcactcccattcctattgtacactgtcaaaagtgcggagcagtgccagtgccggaggagcagctgccagtgtctctgcctccgaaggattccccgaaggaagcgtttctctgtgattgcccaaaatgcggtgagaaggatgcacgaagggagacggatacaatggatacatttgtggacagctcttggtactacttgcgttacttggacgcccaaaattccgaacgcattttcgatacagcgctgaccaagaagtttatgcctgtggatctgtacataggaggcaaggaacatgccgtgctccatctttactacgcccgctttataaaccacttcctgcacagttgcgggctttcgcccactagcgaacccttttcccggctgctagtccagggcatggtgatgggtcgctccttccgggtgaagggcagtggacgttatgtgcccgaaacagaagtggagattgtgaacgccaaaaagaaccaggcggtgctaaaggaaaccaaagagcccgtggtcatgacctgggaaaagatgtctaagtcaaagctgaatggggtggagcctagcgacatgtttaatgagtatggaacggatacaacgagactgatcatattggccgatgtggcgcccacatcccaccgcaactggtccagtgcaacttttcctggcatccttaattggcaaaagcggctttggctgaccctgcaggacttccaacaggctcgcgaagatcaaactgcttcggatgttgtacccaccagtgaagagttcctggctgaggatgccaagctgttcgatgcgcgaaacttttatgtgaaaggagccacctttaactaccgccatgcacagcaactcagtgtggcaatttccaaaatgcaggggctaacgaattctctcaggcgcacacctaagcatgtcctgcgacatggaaaacagtttgaacgtgcgctggctgcccagatcatcatgctcgcgccaatggctccgcactttgcctccgaactgtggtcaaagtttgtggcgataccaggcaggctaaatcccgccagtcaggagttacagtggagcgaagatgtgcttgctcagcgctggccagacatcgaccccgcctacaatctggaccttagcattaaagtcaatggatttgagaactgtgtaatcaaagtgcagagaacgcatctggataaggtaacgcacagtgatgctctcgacattgccttcaacaccgaatcggtgacatcgtacctaattgacaagaaaattcgcaccaccaattttgtgctttacccgggaatcgaggctattctgaatatctatgtggataaggcgaaaatgaagcaaaagccgccgaccaccgatgatgcagaagctcagcctcaggcgtag

SEQ ID NO: 423 - protein, 869 aa, DROSOPHILA
MQALRRTRPWGAVYWNSWRRLLTQSCTRNDNPELTSDVKHRIEAHWREQLSGGQFNPKDSQDKYYVLSMFPYPSGNLHMGHVRVYTIADSVARFQRMCGKNVFQPMGWDSFGLPAENAANQRGVEPASWTEQNIAQMKEQLKRLGCSFDWNHELSTCSPKYYKWTQHLFLMLHRHGLAYQNEALVNWDPVDKTVLADEQVDANGCSWRSGAKVEKKLLRQWFIRTSAYAKQLLDGLEDPTLRDWRDIINLQRHWIGECDGYAFNLLTSASGLLRVWTTHPEHLKDPHAFLVLRSNHHLSKLKGADSLSAANPFAGTTMPVVFSDEVTFPPKSDVYLAAPSFRGEDKDLWDSYGLAFTSNGKDEESLSPANWEMLRKEVLQAATRLNVGGYRVSSKLKDWLISRQRYWGTPIPIVHCQKCGAVPVPEEQLPVSLPPKDSPKEAFLCDCPKCGEKDARRETDTMDTFVDSSWYYLRYLDAQNSERIFDTALTKKFMPVDLYIGGKEHAVLHLYYARFINHFLHSCGLSPTSEPFSRLLVQGMVMGRSFRVKGSGRYVPETEVEIVNAKKNQAVLKETKEPVVMTWEKMSKSKLNGVEPSDMFNEYGTDTTRLIILADVAPTSHRNWSSATFPGILNWQKRLWLTLQDFQQAREDQTASDVVPTSEEFLAEDAKLFDARNFYVKGATFNYRHAQQLSVAISKMQGLTNSLRRTPKHVLRHGKQFERALAAQIIMLAPMAPHFASELWSKFVAIPGRLNPASQELQWSEDVLAQRWPDIDPAYNLDLSIKVNGFENCVIKVQRTHLDKVTHSDALDIAFNTESVTSYLIDKKIRTTNFVLYPGIEAILNIYVDKAKMKQKPPTTDDAEAQPQA

SEQ ID NO: 424 - DNA, 2500 bp, DROSOPHILA
aaccttgtgcaagacgttgctctcgttgtaccgagccaacaaacaagcgaaatattatttacgagctgtcaaatcccagttaacatgccttacacaaggaccaaggacgtcttcggtgtgttggtgtagttgtttgctcgatgcgggcgcatagttcgctaagagacagctgaagatgcgctgccacagttacaggacacagagctacagatacagattaacagcaacggtaccagagatatagacacagatacaacgggtatagatacaaccgcactgccagacactcgtatggcattcagaaagtgtgccaggacgtctggaccgtagtcaaatgccggatccttggatctttggatccttgaggccgactgtagcggagcggcataataaaataaaaaagcataaatgaaagcgaggccaggccacgaaaataatttaaatttatgtacttgtgcgtatttatttgtgcgtttggcttgtatttccttcgcgacgtctcttgatttgtttttctcgctcccacgctcgtcctttacacgctgcctcctctcgcttgccatcgttttatcaagagcaacagcagaaagcattaaattcaatttgcttgtgtgagtatctgtgtgtctgccactcagcgtcagttacacggaaaaaatggaagtgggtgggatggggcgtgcgggagcgccaaaggacgaaggaccaaggggagggacaaggccatgcgaatggcggcgacctgttgtgttgtttaaggaattacttaacatggtaaaagcatggtgtgtgtgagtgctgcttatgcatgtatgtgcttaataaaaatttcggtgcgttcttttttcggctctatcctggaacagctacaaacgggtagctcgaatctgcaggcatttaaattcattttcttttaacataaacattttataatttttaaagtattaagaattgtgcgaaaattttaacaacatttaaaacgattatttttagtgatgatctactttatcttgtccttttcatccttgccctttggttcgtcagctttcttgccatctttggctttcacttctttttccccacccttttctttggcctttacttctttatctctattctttttctcaggctttggttggttctctggtctaagtaaatatttatatttttataaaaactttttccaatttaactgtaacttacagatcatcaaccgaaatgggatcaatatcaatatcgggcaacttgaatttcggaaactcgagcatatccacgccctcgccgccgccgtattgcagagccaggcgctcagtgacttccttcagctccgcctcgaattccggaccaggatctacgggctttcccttgggactcttcagccgatactcgcgcaccttgtccaggaaaatctgataaatgggatccttgtagcgaagggatgcggtattgctcacactcctacataaaactaggcttggttttaggaaacggctaaacatttttttgttagttttgttctctgctgacacgatactgtttctatgcgataaaatatgattctgagatatcttactcaagggtaatttgatttcaaaattaaaataaaatcattgtcttcagaacaggtaagccatctttttttaagatttgaatttatatttttaaacgttttatatcttttattttgagtattttttgcgtttatcaaaccccgcattttgggctaacgcatctgaagtgcttccctgctccaggacgaatttttacgcaccgttgctgcccgttctcctttattcccgagcgtgtaagattttctctctgtctgactcgtcgtatctgcgaatgtctgtgtgtgagtgggcttgacaatgcgagtgccatctcgacaagtttttctcaaaaagtgagacaagtggaaatccgttaaagaaatacgtgaaacacataaaggcgatgatgttgctgccgtcaacttgctgttgctgttgcttatgtgcacgcagcaagatacataaatatatgcgcgtgtgtggacaaagaaatgtcggcggcagcaaataaaaattaattgaaaaatgtttatcaaggactttgcaggggaaaaatttaaatgcacagagcagaaaagagctgaaaagagaactgagccgtcggacaaactctgataattgatgggaagacatggctgtgaaaattataattaatataaatttccattcaccttttttcccctcccgcaccatcgctgacagtgcaaataaatggatcattgtcgagtgcgaaatgaggaatgtgtagcttctaaaccgggcttaatcggccatcgccacatgcggctcatttcaaatgcagccagcactcatgctgcgtttcgcatccgccactcgaattaaaatatacgaacatatagtacgtacatattgtgtgcaaaatatccacaccgaactaaaaattatgcaacgcattaaaaatttaacaagcgcttatccgcttagtgcaa

SEQ ID NO: 425 - DNA, 445 bp, DROSOPHILA
aatgtttagccgtttcctaaaaccaagcctagttttatgtaggagtgtgagcaataccgcatcccttcgctacaaggatcccatttatcagattttcctggacaaggtgcgcgagtatcggctgaagagtcccaagggaaagcccgtagatcctggtccggaattcgaggcggagctgaaggaagtcactgagcgcctggctctgcaatacggcggcggcgagggcgtggatatgctcgagtttccgaaattcaagttgcccgatattgatattgatcccatttcggttgatgatctaccagagaaccaaccaaagcctgagaaaaagaatagagataaagaagtaaaggccaaagaaaagggtggggaaaaagaagtgaaagccaaagatggcaagaaagctgacgaaccaaagggcaaggatgaaaaggacaagataaagtag

SEQ ID NO: 426 - protein, 147 aa, DROSOPHILA
MFSRFLKPSLVLCRSVSNTASLRYKDPIYQIFLDKVREYRLKSPKGKPVDPGPEFEAELKEVTERLALQYGGGEGVDMLEFPKFKLPDIDIDPISVDDLPENQPKPEKKNRDKEVKAKEKGGEKEVKAKDGKKADEPKGKDEKDKIK

SEQ ID NO: 427 - DNA, 3637 bp, DROSOPHILA
tgtttttgtgcgagccaaacgaatcgagacaaatgcaataagcgcagagcaacaacagcagctatggaaaatgcgatagaaaaaatgataactgccaagatttttcaatcaacgaagagattatacactttcttgctcaaatgtaactgctatttgtgaccaaaaattacagacaaaatccagaaattttatgattattcgaacgttgaagattttagttgtgggaatttcgacactgtgggcacttcatgatgcactatttcccctaaaagggtattcaaagcacaaacaactcaggatgaaaccgaattcactggcgcatactgtccgattcggtttcggattcatattcagaggcggagatgcaggatggtcgagtagtgcatacaaattacgccccgaaacagtgccacgcccctaaaaactccctcaataactccgcctagaacacgtccccggaaaacagccagcccctcccccacgaatcggtttatttaggtgcctcgcctgtgactcgcagcaagttgtttgccatgtgctgtgagctgaatgcgtctttaccagccaaaaatattgttagccataaatttttggcaacacagcggaacagaggagcgcacaaagagctgcaaaaaatgtgcatccaacatcgagcaggaagcgctgcatttgtagtcacaaattccggggcatttgtttagaaactttgtccgcagtccgcgactgaaacacgccatgtaatgtcaacttgattcgggtccaaacaagagcttccacttgaggaagtttgcagctcagcggagcgaacccagtggcagatagatgtgtcgaggatccgcttttgtaaatatacgaatttgtgtacataaattgggcacatcgttcaggggatcaaggcaacagggctaacttccatcacagtgcagttcgagtttcagctcagagcaggaacaaatttacaccgacacacaaaaccactgctgtcaaaaaaaaaaataataaaataaagcgagaaacaaataaaaacaagctctttacagtaaaggctgctttcgcagcaccttaatcagaaaaaaaaataaatgaattattcacaaaagactatttaaaaaccacgaacagcaagatgagtttgacggagatgatgcggggcaaatcgatgccagcggaaaagaagaatgacatcaaactggcccagcatggtgaggtgtttagaaatcttaagcagacttaactaaatctattgttctaaattaaaatagcaaaatagctattcttctgtgtttattacaaccatttaaaaagtctgcttaattacaatataaaagaagtgcgttcagacaaataccttttatgtgcgtttataagaaaacattgtatctttaaatttgggacacaaaacacttgtgtcaatgtttaatcacataattacaccttctgcgcctagaatttgcaaccgtgagaatagtgcaaatcggatgtgttttaaatgtcctggccgaggccatcgaacgggttaagatctcgctaatcatgccgaaactgctggaacaccccgcgcacatggctaagattcttaatggaaccaagtacgaaaaggcagttcacctggtggaatcgtttgttcgtcgaagggagttcattctgcgggagaaacgtccgcccctgatggatcacggcattatccagatcatcgatttcttccagcggaacagcaggatctaccttctgtttcccagctactacaaccacatgagcgacaacgagaagaagctgctgaacgccttcgagatgctctatgatctggccaaggaccgcttgtacaggacgtccaccgacgccatcgcccaggagcgccagctgcatgccatgtacaagcagaacgaggtggtcaaggagcaggtggaagagctgcgcaagaagatcctggatcagaaggcggccatcaggaagagcttggctgataaggaggcctacctgcaaaactacgaggacctcctcatgaagaagaagagggagaagaacgagcgaatccaaaaggaaatgtgagtgatgctcgtagaaaaaataaatgttcctttaacttatcagtttgtactctcagcgatcggtgcactcgtctggtaaaggccaataaaaaattaagtttagagcgacaagctgatttggaagaacagctgcaaaaaacgcgaaacaactataacttaaccacaaaaaactatttaaaacaggaaaaggtgtttcgagaggaaaagtaagtgaaactggatttttagaccgacaatatttagataacatcaacaattggccaaaatccttagaaacaagctgattttacaactacaagccattatcaagaaatacgatcacagcattggcgaaaagatgatcgagaacatggagctcgccgaagaacacaaaaaggctaagaaggccctcgacgaatacatgattgggttcctgaaggttgagcgggtctacaagcagatcgtcgtaaagcgagaggaagaggaggccaggcaccgccagcatcgtgtcctgttattcgccatgaaccgcgcagccatcaagatccagaaatactggagaaagtggaagaaacacatgcgcaagaagaacaggcgaaataagaactgaaaccattttgaatagccaaaattttaagtggatactaatttttggtactaattgtagaaaataaaattttagaattattttttttggactctacatgaaagtatgtacatttaccatgtgtcgacaactgaaatagctgctaaaattctgttaatatgaaatattcatcctgtcactaactgctttcgaccaagctgcattagcctattagaggaaaactaatttcgcttttaatctgccggctggcaagccacaaagacacctcgaacttgccccatctcttccactatctgcccgccatggtgtgtcatttgcatttaaaatgtgtgagagaggtttctattttagctgccctatattccaccttttttcggtgtggaaaatgcattgaagggggatttttatcacaatgtgcagccggaatgaggggacattgtgtaatgcgatggggctaagtgcagccaagtcaatgccaaaactgccgggccaatacggcagggaattttgtggctcatggtgaaagggggaaaaaaagagcgggacagctggacaacccaaacgcctggttagtttcgaccatcgaaacgaatgaacgaacaccaccgtatatgcaaattacgcgcactgctcatgccctgtcatgaattgtcacccattttccaactgagatgcttcgacacgcgcagggtgggtggtgaaacccctagcggtaacgggaagggttgggtaaatggggaatgggtgtgggaaatgttcctaaccaagaggtagatagaccgcaaaacagccaaaggcccgaccgggtacagtggcaagagcactcattcgccccgttggcagcaacactcatccgccccgttggctgctccatgactttacgcccgagagcagccgacatgaatatatctgctgctaatatcaggtttccttccgcccccgaaaaccacaccatcccacaaatggtttcgaattgctaattttatcagcacgtgcacacatg

SEQ ID NO: 428 - DNA, 1266 bp, DROSOPHILA
aaaataaagcgagaaacaaataaaaacaagctctttacagtaaaggctgctttcgcagcaccttaatcagaaaaaaaaataaatgaattattcacaaaagactatttaaaaaccacgaacagcaagatgagtttgacggagatgatgcggggcaaatcgatgccagcggaaaagaagaatgacatcaaactggcccagcatgaatttgcaaccgtgagaatagtgcaaatcggatgtgttttaaatgtcctggccgaggccatcgaacgggttaagatctcgctaatcatgccgaaactgctggaacaccccgcgcacatggctaagattcttaatggaaccaagtacgaaaaggcagttcacctggtggaatcgtttgttcgtcgaagggagttcattctgcgggagaaacgtccgcccctgatggatcacggcattatccagatcatcgatttcttccagcggaacagcaggatctaccttctgtttcccagctactacaaccacatgagcgacaacgagaagaagctgctgaacgccttcgagatgctctatgatctggccaaggaccgcttgtacaggacgtccaccgacgccatcgcccaggagcgccagctgcatgccatgtacaagcagaacgaggtggtcaaggagcaggtggaagagctgcgcaagaagatcctggatcagaaggcggccatcaggaagagcttggctgataaggaggcctacctgcaaaactacgaggacctcctcatgaagaagaagagggagaagaacgagcgaatccaaaaggaaatcgatcggtgcactcgtctggtaaaggccaataaaaaattaagtttagagcgacaagctgatttggaagaacagctgcaaaaaacgcgaaacaactataacttaaccacaaaaaactatttaaaacaggaaaaggtgtttcgagaggaaaaaaacaagctgattttacaactacaagccattatcaagaaatacgatcacagcattggcgaaaagatgatcgagaacatggagctcgccgaagaacacaaaaaggctaagaaggccctcgacgaatacatgattgggttcctgaaggttgagcgggtctacaagcagatcgtcgtaaagcgagaggaagaggaggccaggcaccgccagcatcgtgtcctgttattcgccatgaaccgcgcagccatcaagatccagaaatactggagaaagtggaagaaacacatgcgcaagaagaacaggcgaaataagaactga

SEQ ID NO: 429 - protein, 379 aa, DROSOPHILA
MSLTEMMRGKSMPAEKKNDIKLAQHEFATVRIVQIGCVLNVLAEAIERVKISLIMPKLLEHPAHMAKILNGTKYEKAVHLVESFVRRREFILREKRPPLMDHGIIQIIDFFQRNSRIYLLFPSYYNHMSDNEKKLLNAFEMLYDLAKDRLYRTSTDAIAQERQLHAMYKQNEVVKEQVEELRKKILDQKAAIRKSLADKEAYLQNYEDLLMKKKREKNERIQKEIDRCTRLVKANKKLSLERQADLEEQLQKTRNNYNLTTKNYLKQEKVFREEKNKLILQLQAIIKKYDHSIGEKMIENMELAEEHKKAKKALDEYMIGFLKVERVYKQIVVKREEEEARHRQHRVLLFAMNRAAIKIQKYWRKWKKHMRKKNRRNKN

SEQ ID NO: 430 - DNA, 5898 bp, DROSOPHILA
tttcatgtttatcaccatctaggttatggctgtggccaagaacaggcaaaaggcctgctgcgaactggtctcccgactcatccgggaaatccacttggcatccgcttaagtagcgaagcgaagaagtagcgttggattctaaatttaaaaatagttaattctctgagctcgcatctaagactcacatgacacggattgtccaaaatcttacagtataggcctagggaatagtttaactaaattatgtaaaataaactagctatatcacaatttcagcacattttgtttgttgttgggtaaacttttaaaaaagtctacgatttgattgcatacttttgcgcggcgaacagaaattccagaacagttcaaggtgatcattcccctggtcacccaaataaaaaaaaacccaacggaaagttaaaatataatgaaatgttatttaataaaaattaaatatgcgcaataatttttaacatattataaacacaaatacatagttataaaattagggaaataaagctaacattaaaatgatttcgaattgaaaacaatgacataacgagagagctcgttggctttttggtgtttgcagagattgaacaaatgcaatttcgttaaatcgataaaatattaaataaaataatggtaaaacaactcaacttaatattatgtacaggtatacgatataatagaagaactccaaactccgcacagctaccgaatgaagcgagttgaaatttattgcctggcatcgtgcacttgcatagtagtcgttacatatataaaggctatgtaatatgtgtaaaatagagagtacatagggatatgcgcacgtgtgtatatgatatactaaataggcctatagaatacgatagttcagatctgtgtctgtgtccgttgcaaaagcatcgccgcctacaaaaagtgcttataaaagtgcttggtttgtgttttgtgattgtgttcaagtctataaagttgcattgtgcctgcctctctcctaaaacagccctcgctccttcttcagcttggtctgtttccagatgggcagctgctcgaattccgcccggctgcatcccagtgccgcctggaagtcctccgcattaaggtagacctccaggcgggtgggctccacaccttcgggcagcggtcgggctttcaggacttccaggggatactcggtctgcgtcatttgtgccagcattgtggcgatcgatatggaagcatcagttcgcccatcctgcagggggaacaaaaacaataaatattctgcatatcatttgctacttcccaacttacttcttcgttgatttctcttacatccggacgttctgtccagtcgggaaacagcgccttaaaggccagtggctccaggcctgcccacacaacctggcctttgatgccatggaagggttcattctcgttctcgccgtgcttggcacgccaatagtcaacggctgtctcgagggcagcacgtctctctgagatccagcgatttactccagcgcgattttcgttggtgggactgcttcgctcatcggtgtttactatgagaaaagtaaaaaggttaattactatccaaacgcatcgttgactatacagtacgtactcttcacatcttccagaggccaccatcccatccagagccacaactcatcgccgtcgtccagcaaaaagatagtcggctgccttgcattgtacagctgcgactggctgaagggatacggactatgcagatcctggcagcgcagcggatcgctcagttcgagggctttgaaaacaccctgagtgctggagaagttgaagatccttatttggtaatcgaacgacttggtggacttaagcaggctgccatattcatttctttcatccttcaatcccagggccttcttgcactgatcgtcgtcggaaccctcctccacctcagttaggttggcagtttcggcgctgaagagatctttaggcaccgtcttgatcagatcctgagcaactcctacagccacattacgcgtatgaggagcactcttcgatccatgccagacaatcacatttccctgactgccgtgaattaacagcatggagctgcgggatcgcaaatggctggactggcagacgacttccttgatgatggtctcctcgctgacgttgccctgcagttggtagagcctccactcgctgtgcctctccagacattgctccttgcgtccacgatgttgccacatttgccggaacaggcggacgaaggctgtgcactcatctccttgcgacacccgcatctgtgcgcctttctccttgtccaactctacggtcagcaaagcagctgcacccttctcgttggcacttgagtcctgtccttgccaggtgaaatagacacacctgtctcgacccactgtgcttctgttcgacaccttgccactgagttcgcgaactgtgaccgaaatctggtagatccagcgcactatatagctctccgccgagtagaagtgaccgtagtcatcgcgattattcgccgcatcaaagttgaactcgtggatctgccatttgtccgttgacttggtaatcacatcgaagtgccgcatggtgtccgtgtcgtagtagaaattgccacgccccaagttggcctgctcgagcaccagatttggttcctggtagggttctcccttatgcaaagcggtgccgtttaaagcacgcaccatatgcactccgtttgataggtaatccttctccagatcctcgcgttctatctctggccaatcactgaacttctccttgaacagcaccgtctccatgttctgggtgatcttgccgagaacacaccattctggacgctgtgcgcacctcttggcatacttggtgttctcacgacgacccactatggcgacatagttcaggggattcaagtaacagtcggcatagtccgccgaattctcagcaccaaagtgttcctgggccaatctcatggcagctcgcttggcatcggaaggggcattcttgccattccacacatacagctcgctgccaaagtcaaagaccaaaactttacgcgtgtccaacatgtccaccttggggatgcagccccagaatttctccaacggaatgagcgcctcatcctggtactcgtagatcttgttagtctcgatcaggctgctctcgaacacgtcgtcttcatcggcatgaccgcattcagctatatccgattgatcatcctcttttttgcccaaaagctgccagaactgacgccactggcgctccttcaaatacttgccatccgtgaggatcacctcctgggtggcggtgcaaccgagatccttgttttccactatggcagcgcagatcttcttgctccgggagatctcgattacgtttgcaaaggatccaacgtagcggaaaagctgcgatccggccaccaggatgaagcaatcaccacggttcagggaggtatgcacgggttccaccagtcgggtttggacatgtgtgcgccccttaacatggagtaacatcactggcttgtggggtagccacatttgctgcagtggaatcgacgaggagcgcagtgccaccgacttgaagtcctcgacggaggctaatccggctatggcctctgcagccaagttggcattatgaccatctgtggaatcaataacattagttgggcttttattttgacacgatgttggcttcacttacatgactccaactttaggcgccgtaattctcgctcggctatgcccgacctcatttcggtgtactcggagctaatgtcctcacgagcagctaaactcttgagaggattgcgtgcagcccgtcgacctttgggaccctgtacgtgtcgcttgcttaccaagctgtgttaaaaagaaaatttgtattttgaatttggaattcactctctctctgaatggcatttgatacttaccgctcagtgggcttgatgtcatcgaaagcgctgatctccagctgaacgttctcctccttcttcggcttggaggagaagaagttctcgaaagtttccttgtcgtccagccggggcacctgaatcctggctcccacattggtgggtgctgcagcactcttgttgttggccagctccttgttctgcttggcattctggggggatttgcgctctccatcggactccgaactgctgctgttggagcgactcaggctggtgggtccctcctcctcgggattgacgctcaggctgcggagtgcggacttgctggtgctattggtgctggtgctagaggtgaccatcatggaggggctcttggccagcccaagctgcggctgattggcgctgcgcacctccagcatgggacactttttggccgcatcattggcagaacgctcgaattgaagctccacgggggattgggccttcttttgcagtcgaccggcgactgtgaatttcttggcatcggtttgctctgcacggtgtgcatttcattaatattgctctctttcctctctttccctaggctataagcacttacctatgcgctgcttccagttctccgagttgcacttgagtttgctcaaacgatcggagaccttgccgccctccaagctggtgggtatcaaaggtgatgggggcagtggtttgtccgacagcgagtgggccaaagatagcgattcctgaaaaacaagagttagacgagatcgtgattacattcactttccaaaaatttgggaccacccacgctctaaggcccaaatatgaacgcgtttataaagaaattaaccaagttttaatagcctccaaaatatatggtcaacagtctcgcggccttatcggctgggttgttcccaattcgaatgactcacgggccaaaacgcttctgtttgccaaaggtttttgtattgaaggaaaaagcttttaccagttttactttttccatgcctgcgatttaatagcttgtttgtttattattagcgattggcgattttccagctgctgcgtcgcatttccctggcacacctcgaaatctgaaggcctttacagccaagtacgctccattagtgacccgcaatggatgcgcctaagtatcgggaactcgactcgagtgccgtttgatttgctgccagccagcacaatgccaatctggcgactgccaatcgacgcttggctaattgcgcaccttcgctgaagctccagtgctctagacccgcgctactggagagctccggcgggagacagtgcgcgtcattcgattagataaggctgcactgcgaaatatcgggcagtagaaataaatccttggtatatggtagaaagagtacaattacattttattacatttttacaagttgctgcggaatttgcattgcttcctgtgtttatctcaagataaatatttacgagtccataagtcaatgtttgcagttatttctcctggtgttctgtactctcaattcagtggaaagataagaaacgaatagctgccgatatggagcgtggtgtccactcgactttcctgcactattgatttgtttacattctgaaactgtcaactgaaagtgccaagcgaaaagttaattcatgtgtttacacgggcatcagcataagttatagcatgactgaaatatcgataaagatacatgcgtatcttatctgaccaaaactatgtctttgggtgaagttcataatcgcattatcttatttaatgttgtcaaatctgtgtttaatttgcttatgcaatgtttaggaatgtttgtgtatgtttgctcgacttcagccttatttgttatttgtctatctgaactcagtaattgtgttctacaataaattatgataatttaaagcctgaatatcaaacgctgcaatcgaagagacaaaaatagtagccagcgttgaggaccctcttaactctttcgccacaacgacgtatttctcttgaa

SEQ ID NO: 431 - DNA, 3336 bp, DROSOPHILA
atggaaaaagtaaaactggaatcgctatctttggcccactcgctgtcggacaaaccactgcccccatcacctttgatacccaccagcttggagggcggcaaggtctccgatcgtttgagcaaactcaagtgcaactcggagaactggaagcagcgcatagagcaaaccgatgccaagaaattcacagtcgccggtcgactgcaaaagaaggcccaatcccccgtggagcttcaattcgagcgttctgccaatgatgcggccaaaaagtgtcccatgctggaggtgcgcagcgccaatcagccgcagcttgggctggccaagagcccctccatgatggtcacctctagcaccagcaccaatagcaccagcaagtccgcactccgcagcctgagcgtcaatcccgaggaggagggacccaccagcctgagtcgctccaacagcagcagttcggagtccgatggagagcgcaaatccccccagaatgccaagcagaacaaggagctggccaacaacaagagtgctgcagcacccaccaatgtgggagccaggattcaggtgccccggctggacgacaaggaaactttcgagaacttcttctcctccaagccgaagaaggaggagaacgttcagctggagatcagcgctttcgatgacatcaagcccactgagcgcttggtaagcaagcgacacgtacagggtcccaaaggtcgacgggctgcacgcaatcctctcaagagtttagctgctcgtgaggacattagctccgagtacaccgaaatgaggtcgggcatagccgagcgagaattacggcgcctaaagttggagtcatatggtcataatgccaacttggctgcagaggccatagccggattagcctccgtcgaggacttcaagtcggtggcactgcgctcctcgtcgattccactgcagcaaatgtggctaccccacaagccagtgatgttactccatgttaaggggcgcacacatgtccaaacccgactggtggaacccgtgcatacctccctgaaccgtggtgattgcttcatcctggtggccggatcgcagcttttccgctacgttggatcctttgcaaacgtaatcgagatctcccggagcaagaagatctgcgctgccatagtggaaaacaaggatctcggttgcaccgccacccaggaggtgatcctcacggatggcaagtatttgaaggagcgccagtggcgtcagttctggcagcttttgggcaaaaaagaggatgatcaatcggatatagctgaatgcggtcatgccgatgaagacgacgtgttcgagagcagcctgatcgagactaacaagatctacgagtaccaggatgaggcgctcattccgttggagaaattctggggctgcatccccaaggtggacatgttggacacgcgtaaagttttggtctttgactttggcagcgagctgtatgtgtggaatggcaagaatgccccttccgatgccaagcgagctgccatgagattggcccaggaacactttggtgctgagaattcggcggactatgccgactgttacttgaatcccctgaactatgtcgccatagtgggtcgtcgtgagaacaccaagtatgccaagaggtgcgcacagcgtccagaatggtgtgttctcggcaagatcacccagaacatggagacggtgctgttcaaggagaagttcagtgattggccagagatagaacgcgaggatctggagaaggattacctatcaaacggagtgcatatggtgcgtgctttaaacggcaccgctttgcataagggagaaccctaccaggaaccaaatctggtgctcgagcaggccaacttggggcgtggcaatttctactacgacacggacaccatgcggcacttcgatgtgattaccaagtcaacggacaaatggcagatccacgagttcaactttgatgcggcgaataatcgcgatgactacggtcacttctactcggcggagagctatatagtgcgctggatctaccagatttcggtcacagttcgcgaactcagtggcaaggtgtcgaacagaagcacagtgggtcgagacaggtgtgtctatttcacctggcaaggacaggactcaagtgccaacgagaagggtgcagctgctttgctgaccgtagagttggacaaggagaaaggcgcacagatgcgggtgtcgcaaggagatgagtgcacagccttcgtccgcctgttccggcaaatgtggcaacatcgtggacgcaaggagcaatgtctggagaggcacagcgagtggaggctctaccaactgcagggcaacgtcagcgaggagaccatcatcaaggaagtcgtctgccagtccagccatttgcgatcccgcagctccatgctgttaattcacggcagtcagggaaatgtgattgtctggcatggatcgaagagtgctcctcatacgcgtaatgtggctgtaggagttgctcaggatctgatcaagacggtgcctaaagatctcttcagcgccgaaactgccaacctaactgaggtggaggagggttccgacgacgatcagtgcaagaaggccctgggattgaaggatgaaagaaatgaatatggcagcctgcttaagtccaccaagtcgttcgattaccaaataaggatcttcaacttctccagcactcagggtgttttcaaagccctcgaactgagcgatccgctgcgctgccaggatctgcatagtccgtatcccttcagccagtcgcagctgtacaatgcaaggcagccgactatctttttgctggacgacggcgatgagttgtggctctggatgggatggtggcctctggaagatgtgaagataaacaccgatgagcgaagcagtcccaccaacgaaaatcgcgctggagtaaatcgctggatctcagagagacgtgctgccctcgagacagccgttgactattggcgtgccaagcacggcgagaacgagaatgaacccttccatggcatcaaaggccaggttgtgtgggcaggcctggagccactggcctttaaggcgctgtttcccgactggacagaacgtccggatgtaagagaaatcaacgaagaagatgggcgaactgatgcttccatatcgatcgccacaatgctggcacaaatgacgcagaccgagtatcccctggaagtcctgaaagcccgaccgctgcccgaaggtgtggagcccacccgcctggaggtctaccttaatgcggaggacttccaggcggcactgggatgcagccgggcggaattcgagcagctgcccatctggaaacagaccaagctgaagaaggagcgagggctgttttag

SEQ ID NO: 432 - protein, 1111 aa, DROSOPHILA
MEKVKLESLSLAHSLSDKPLPPSPLIPTSLEGGKVSDRLSKLKCNSENWKQRIEQTDAKKFTVAGRLQKKAQSPVELQFERSANDAAKKCPMLEVRSANQPQLGLAKSPSMMVTSSTSTNSTSKSALRSLSVNPEEEGPTSLSRSNSSSSESDGERKSPQNAKQNKELANNKSAAAPTNVGARIQVPRLDDKETFENFFSSKPKKEENVQLEISAFDDIKPTERLVSKRHVQGPKGRRAARNPLKSLAAREDISSEYTEMRSGIAERELRRLKLESYGHNANLAAEAIAGLASVEDFKSVALRSSSIPLQQMWLPHKPVMLLHVKGRTHVQTRLVEPVHTSLNRGDCFILVAGSQLFRYVGSFANVIEISRSKKICAAIVENKDLGCTATQEVILTDGKYLKERQWRQFWQLLGKKEDDQSDIAECGHADEDDVFESSLIETNKIYEYQDEALIPLEKFWGCIPKVDMLDTRKVLVFDFGSELYVWNGKNAPSDAKRAAMRLAQEHFGAENSADYADCYLNPLNYVAIVGRRENTKYAKRCAQRPEWCVLGKITQNMETVLFKEKFSDWPEIEREDLEKDYLSNGVHMVRALNGTALHKGEPYQEPNLVLEQANLGRGNFYYDTDTMRHFDVITKSTDKWQIHEFNFDAANNRDDYGHFYSAESYIVRWIYQISVTVRELSGKVSNRSTVGRDRCVYFTWQGQDSSANEKGAAALLTVELDKEKGAQMRVSQGDECTAFVRLFRQMWQHRGRKEQCLERHSEWRLYQLQGNVSEETIIKEVVCQSSHLRSRSSMLLIHGSQGNVIVWHGSKSAPHTRNVAVGVAQDLIKTVPKDLFSAETANLTEVEEGSDDDQCKKALGLKDERNEYGSLLKSTKSFDYQIRIFNFSSTQGVFKALELSDPLRCQDLHSPYPFSQSQLYNARQPTIFLLDDGDELWLWMGWWPLEDVKINTDERSSPTNENRAGVNRWISERRAALETAVDYWRAKHGENENEPFHGIKGQVVWAGLEPLAFKALFPDWTERPDVREINEEDGRTDASISIATMLAQMTQTEYPLEVLKARPLPEGVEPTRLEVYLNAEDFQAALGCSRAEFEQLPIWKQTKLKKERGLF

SEQ ID NO: 433 - DNA, 2960 bp, DROSOPHILA
ttcatgggtgatgtagacatccaaaacatgtaacataaattggatttgtcctgtctttcctgtatatttattggtattattcaagtttggttttcctagtaataatcttacaaacacaggttctctttggcatcactaagtggtggtggcttccaaagccgagtacagttcgcctttcttttatttctggtcaaaacttttgcactgttttcaccagattccgcattcgggtagttggacagctgacgtctgtttttcacctgccaggaccgccccactcgggctcagaatcggatcctctatttgtttgcgtatgggaatcgccggtgtctgtccatctgtctgtgtcagtgtttgtgtgctcgtgagttttgcgagcaggtgtgcgtgagctttcgctgacaattgtgattttagcaaagggttttaattagatttcacttcattttccgctgtcattcagtgaaaaggaaagcttctgccttccgcaaaatctattcaataatgtgagcttacccattgagtgcacactgcatccaaactcttcttacatttttggagttcagagtgtctagaacctggcttaaataacaacataagtatgtattttccttataattgtatttatatataaataagtttatgtttttgctattttatttgggacagtatagtatcccaactttttccgtcttcattttggtattttaaattcacattaagcaggctttttgttaggatttgaaattccgtgaatgggagttgagcaaatttttcagtggattttcttgccgataacatttttatatattgcgtatatatctgcgttgaagactgcattagttgtagttaaaactacaaattaagggacgctttgaaaaaggatataataattgcacgtacccaactaaaagatcgaacaaacccatagatagatcgatatatacgatattttatctaagccttcattgagatttgtgttagatgatttgaaaacactggaagtgctcgttgtgtaccgagttagtttccgttttgaagttcacagttaattggatattggttaatttggaggaatgaattcaagatgaattcattaccaatactgcaatcagtggaccaaaatttatcgtgcaaggcagcaggaataagtaaaatggaaaacactaaaccaaatgataagaaactggcacaatcaaagttcgcattcaaacataacgggccaaaaaaagtgtttcactgcacgatgcagagtgttttgcaatccgaagattgctggatcgctgaggaagttctagaagaatcaaacgagaaaagcaatctggaactcgaagatatttacgatgaggtgtttcgcttaaagcggcgcgtaaatcgactcaattaccaactaggtaccaatataccggaatgcccaaaaatagatccctgcctggatgatcatatatttttgacaaatgtaaaggaagttcatcccgaaattcttcagctgaagtttgcaagccataaactacagcaccaactgactcagatgcaatccgtccgaagatcatccaatctggccaaaaaactggtacgggatgaatactgcagaagcaagaaattaggggatcagttgcagattgaaattcaaaaactagactcctttaagctcaaattcgaaaaacatcaaggactatgtcttcaacggtttaggttcttggaccaagataagtatactggcagggagttctatgaatttatagaaaaaagtaatgagatgataacaactcaacttaaaaagcagatgttaaagagtgaatacaaaccttttcggaaggaagccgctagggtgacaatctctttaaaaacagccgcggaaaatttgcaagattatctttcaagcgtgataaataacaaaaaatgtgaaatcttccagaacgtgaaaaattcctgtgtatccattcgttcagacctttaatacttttatattttttcgaactccgattcggcttacttcaaggcggcaccacgagccgcccaagctcttgtatcaccggcacacagacctacttagctcgtccacaataaacccacaaagccctctttaaattgttcaatttgtcaggatccacgggccggccctccatatgcgaattccttgattatgttggtcatcggaggagtcgcatccacgggacggcatctgccacaaatggtggtaccctaatgtacatttgactaggaagagcatgtattttcttacatgcgatgtgtttcggcatcctgtaggccaaaaaagaaaaataatataaaaatgttataatttctatatgtatatacatatatgtatatatattttgtacgcaactgatatatgtaagaaattgtatctattacgttttaaatatatttacattaaatatcatttctttcaatactttttttgcattcttactacttattaagggtgaactgtcctctttaatttgggtccatttttaaaagagcatcccaattctgacgcccagggtcaggattttcttttgtcgctttcggttttggtgtttgtatctttgggtccaacaacgaaatgtatttagcataaaaatttacgataatgaggaccagaacagcagagacacagcgagcgagcatcgccaccatgagaaaaaaagcacaagcagacagcgcatcaaatttcgcataggcaaatagacaaataactgtggtttacctcccctgggagggggggggggttggttgtttaggtgctacggggggcggtttgggtttagtgttccaccaacatttgtggccagtttccaacgagatgtggtgccacaggttctccgcagtcaagtgtcattgctccgctaatgtgcaaagttaaattaatatttaccacgaggctgttgttgcgccttgatttcttcggtggcatttcgaaaattgacgaatttcagtgcggtctaaccagc

SEQ ID NO: 434 - DNA, 960 bp, DROSOPHILA
ggaagtgctcgttgtgtaccgagttagtttccgttttgaagttcacagttaattggatattggttaatttggaggaatgaattcaagatgaattcattaccaatactgcaatcagtggaccaaaatttatcgtgcaaggcagcaggaataagtaaaatggaaaacactaaaccaaatgataagaaactggcacaatcaaagttcgcattcaaacataacgggccaaaaaaagtgtttcactgcacgatgcagagtgttttgcaatccgaagattgctggatcgctgaggaagttctagaagaatcaaacgagaaaagcaatctggaactcgaagatatttacgatgaggtgtttcgcttaaagcggcgcgtaaatcgactcaattaccaactaggtaccaatataccggaatgcccaaaaatagatccctgcctggatgatcatatatttttgacaaatgtaaaggaagttcatcccgaaattcttcagctgaagtttgcaagccataaactacagcaccaactgactcagatgcaatccgtccgaagatcatccaatctggccaaaaaactggtacgggatgaatactgcagaagcaagaaattaggggatcagttgcagattgaaattcaaaaactagactcctttaagctcaaattcgaaaaacatcaaggactatgtcttcaacggtttaggttcttggaccaagataagtatactggcagggagttctatgaatttatagaaaaaagtaatgagatgataacaactcaacttaaaaagcagatgttaaagagtgaatacaaaccttttcggaaggaagccgctagggtgacaatctctttaaaaacagccgcggaaaatttgcaagattatctttcaagcgtgataaataacaaaaaatgtgaaatcttccagaacgtgaaaaattcctgtgtatccattcgttcagacctttaa

SEQ ID NO: 435 - protein, 290 aa, DROSOPHILA
MNSLPILQSVDQNLSCKAAGISKMENTKPNDKKLAQSKFAFKHNGPKKVFHCTMQSVLQSEDCWIAEEVLEESNEKSNLELEDIYDEVFRLKRRVNRLNYQLGTNIPECPKIDPCLDDHIFLTNVKEVHPEILQLKFASHKLQHQLTQMQSVRRSSNLAKKLVRDEYCRSKKLGDQLQIEIQKLDSFKLKFEKHQGLCLQRFRFLDQDKYTGREFYEFIEKSNEMITTQLKKQMLKSEYKPFRKEAARVTISLKTAAENLQDYLSSVINNKKCEIFQNVKNSCVSIRSDL

SEQ ID NO: 436 - DNA, 15822 bp, DROSOPHILA
atggtttttactcgcatatcgttgcaattcgctagattttccgctaccggcgttcatcccggctggccaacttgctgaccataaaacatagcgatgcacttggctaatttgcacattaaatttttatttttatatttatttctttattttatgtttgttgttatgtttattgtatgtttgtgttccggtccggtagtgaaatattacctagcaccgcagtcttgtcatttcatctggcgattgtttagcctgcatcttgtatagtccacttgctcttggaatatttgtcgagtgcataaaaacattgacattgaaaataatcaggtttgccttttaagttcgcatttcagtttaatattcgaaaaacacgccgtataagttataattatgcattcctacgcctcttattcttgtccgatgaaaactcttcggccaaaacaattccggtttttaatttagtcatctgtcttcaacaacttttaaatttgtaaagtacccgcaggggatttacataaaaatatggttcgacaaatatacgaataatcattaattcaatgattgtggaaaaacgactattaaaactttaaataagtttcagattaagactttatttcataatgcaaataatatctccaaaacttaatttggttcaaatatcttccaatagatctatatatattttttaatacattataaaattatcaaaatattgataaaaaccaaattaagtgcttgtactgttttaatatatatatttttcttttgaattgcgcgctcagttattttgaaccagttttttggaactagtaaagagaagccagacctaacgaaaaagctgaaagcttaaataaaagttaacatgataacagacaggcattaacagaaatgcttaccgtctgttttcaccatgttagcttaacataatacatcataatcagtattgccactacaataaatttccatttaaatttatataaaataaaaaaagcattcaaatggtgtaatattcataattatatttcgtctttaattaatttatttgtacaattctatagctagatttcaatacaattacatagatcctatgcgctgcacgcctaaatcaacgatttattttcttattactgacgacggggtttcaaagtttccttttgtgcagtcaaatcttggctacatccaggggaaatagctcaactcgaagatgggattttagatacagactagaagaactaagtgacgaactttaaactaagcataggtagcgccattcattaatcgtaaggcctagaacgtattttgttgtctcaacaaataaatatttacaatgaaagaaacttccggggcattcgaaatggaaaattaacaataaaatacaaataatactgctcgacaaggacgtcgcaaggaaggagaatttcgaaagatctacaagtgggcaaatagagatgtgtgggcggtggatgagttgtggatggattggttgagatgcacagttagttggtggctcctcgaccgggtaggggttggctcagtcagcgtcatatttcgcactcgaactccgagatccggtgattgaagtacaccactccgtgctcgagatcctcgctaaacccgctcacgtccatgtaatccgaggccgctgagtcgtcgtccacccacttgtgcagtgaccttgtgatctctagtctggactgggcgaacgagggtcgcatgtgcggctccttgtgccagcagcgggacatcaggttgtagaactcgtgccggctctccttgggcagatcgggcctcagaccctgcggcacccggcggataacctcgcgtcccgttaactgcgagtacggtgttgatcctgaaatgagacatacaaaaaggtaatataatgctttaataatctgaaaacagtttcgtaacgatattcacattaaagttatttttaaatgtgttaatttagcctcaaagcaactgataattcccagtcagtaagtttattgatacgtgcctgagcttaagtctcttttttaattgcacgcataaaacaaagcacaattaaaattatcattgtgtaataatcattaaaatataaatgtgcttttaaaatagttaggaacaacttctaatagaatatgctcattaatatatcgtaaatcgatatacttcatagacaaaatctggttcttttaaagaataatgctatcataatatacttttgccatttcaatttgaattgatggctgattaaatgtcaggttgatcaagcggatgttttttattgctctaaatttgaatagatcaatgtaaacgttatttctgtctaaataaaaccatttagatcgagataaaacatcttcaaaggggaagattttttgctgcagaattaatgaaacactcaactctcatatcttgggttataaaaacccggcggaaatagagtagtggtcatttttctttttctcatttcattcacgggctgaaaaacctacccagagtggcgatctcccagaggacgatgccaaaggcccagatgtccgtttcggtggtgaacatgtggtactgcaggctctccggcgccatccatctgatgggcagggcgtgtcgcttgccaatggtgtcgtgaccatgatgcgactttttctccccgtgcggctgatccttggagcagtgaccttggccctgaccctgaccaaaagtgtgctgccagtgctgcaggatgtatctactgccgaagtcgaacttaaacttgtgcgcattgtggcgcatcagatcattcgccgcattcttctcctgctccttgcgcattcgctcggcgtccagatcgatggacatgccaaagtcacagatcttgcacatgccgttgtgatcgaggagcacattgcgagcggccagatctcgatgaacaatctattttggttaaatgttaataaatatgggtttaatagattatatcaagattttttgcttaccctcctccctgctatgtactccattccacaggctatgtccagtgcaaatcctgccaaggttcgtggcgataagggcgccagactgcgaccacctggaacggaggctggcaatatgtttgtggcacttctagctgctctcagaagggacagaagacgacccctcatggcgtactccataataagcatgtggggttctagaggaatttttaaaaatgtattatgaataatccccaacaagaaatttccattagtgctcaccactttccacacaggcacccagtagggtaaccacattctgatgggatcccagcttgcgcatgatattcgcctcgtccttgaggctcacctgtgcactgcaggctctgatagtcttaacggccacgattctagtggctccgaaatgaccactcaaatcgtcggcctctgccttccacacctgaccaaagtttccctcgcccaggaggctctttagcctgatattgctgcgctcgaaatcgtgaaattcgctggccagagatgtcttatcatcgttgttgccgtacctattgtggttcgcatcccgctgagatgcctgtgacatgggcatggcctggtggtgctgatggttctgatggttctgatggttctgatggtgctgcatgtgctggtggtgctggtgatccacctcatcttcatcatcatcgacctgatacttggaatccaccttcttcaccggacttatgggctgctgatctgtgatgcacacatcgaatacctcactctgcttcgcccttcgtcgaatcacaaaatttcgcactagatagagaatgatggcagctagtggaatcaccccaaccgctaccagcactaatgtgaccagattcattcgtctcatctccatattcagatctctttcatttgcaatcaccgttgaactaatgtccgccggagatgctgatgaagatgactccacaatgccgatgtagacctcattggaaggtgcagtcaccgctggcggtgcagtggttgtggtactcgtagtagtactggtactagtgggtcgcgggtgtacagtggatcttatggaggtcaagacagttgtgcgaaggatctttggactggaatcggtggtgtgagatggttgagtctgggttcgtggtgtgaccccacaatcggaagtgttattgcagaatacaatcaagttattcgcatcatcgatgtttatctctcgggttaaagctggtcccaaggctctgatgagttccttgtccttttcaattatggaattcgctttcgttgtggtgggaatgacagtggtcgaagtactgctcgttgtcgtcgtgctgggggtggtgctactcgttgtggtggttggtgtatttgttgttgatagtggtgcatttgtggttgttctttttgaagtgcttggtactggtgttgttgtggttgtgcttgtacttgttgtagtactaggtttttctgttgttgtggtggtgcttgttgttgtggttgattcatctgttggaagagcttccgtctggcccactgtggtttcctcctcggcacttagtacggtgatgatcagtggtgttgaggatgacggcgatactttttgcaccacccgacgcaccacgggtttggcaacttccgattcggtttgcttgagatcctgaatggaatctgatagtccagccgtgggtcttccggaacccacatacctggttcgactcaccggtggcgcaggtggtgctgctgggggtggtgcagctgtcggcaccagtcccctttccctcatatggtacttgtatttactgcgacttcgctccacaggcgtcaatggccttcgagtcgaggcagtgggtctggtggagctgactggcgcaggagtggtgctagttgtagttatagtgggggtggtgctctgagcgactgaaacctcaagcacgcgaggatggtcgtcgtcgccctccgccgctttaattgttaaaccgcccggtcgtatgggtggcagcttggctccaaagtagacatatggcttcagctcatcttcctcctcttcaacatcatcctccattgagttggttttgctgggtattcccttgcccatcactgctggcttagtgccatctgcaatatggtttagggttccattttgctctttggccaccacaaagagtccgtgtgaggactcgtcgctaaagaggatctcgtttgtatcccgatctcctgcaggagcagcggcctttaaagaggccgaaccttttagcaccaccgaactattgccattcgagggcatggccatgcgggtgaagttggcacattgccgcatgcaactggcggtggtacggcgggtaaagttcttggtacaattccggatgcacaccgatctgggatcactgggcgccttggaggtgctctccaccgccgcggacggtgaaatggcagttcgtccagtggtgcctatcctggtgcggaagccgcctcgatgcagagcggtgcgacgagcagccaacacattcatcagcttcctctcgcgatcctgagctgaattcagtggtgcaatcgagggtcgattggcacccgagggcctataagtagtgggtttatcaccaacaacatctgtaagcagaggaatggaaaaatatttacttagattggctggcatattttcaaagtgcctttatagcttacacgttacaaaatgattgagtagattatataaataccttggatggccaagatttttatccaacgacaaacaacaatagtaatatacccacgaacttcagattaacttgatatcagtataggaaaataacaattaaatgtaaattactaacaacaacttttaattatgtgtaagcttaagagcaaacaactaccctttatttcaaatgattaattcttgaaattataaaaacacatatttttaaagacttaataagaaatctaaatcgcagaaaattgtgaacaatatatatgaagttttcattgaagttgcgtgccacaattgaccccgtttccttatcaattttcattgcagtgtaggctgcctggcattcttgacgccagatcgtgacaaatattggaaaaacaaatctcgaaatggaaattaagtgcgactaagacagcgagcacgaaacccgtttggaatgcgaactttgcctagggtaaggccgactcggccacaatcatcatcgccatcatcatctgcattattaacagacatacagcatcttttgccatcggcggcaacatgatcatctcgagaaacgaggctactctttgggccattaatcagttggccaaaatgctccttgcccaactggttcaacgcatatctatgatattatactgcagtttgctccaactagttaattaactaatggccccgaggtttctatgttctatgtgcctctggccaggcagctggtcattaaagcccgaattgagcaatgggcctaaatccatgctgttgctttgacccgcggcatcgggcaaaacaattacaagcggctgcttgcacaattgtttaattttcgcgttgccaaaatggtaagcaaaacaatgccaggcaaacgcaaacaaacactgctgtttttcacaaacatttagttcattggctggcagtttaggccaaggttgcatttcagtttcagccgtctcgagcgcggccaggccaggctagaacaagttgcaaatgccgcttccaccgccggctgccgcatttcggccacttcggccccctagcaaccaccactacacttccacctccccctatcttgttagcctaacaatttgtctttgttttggccaagtcgtatctcgtttactcgccgctccgcgttttccactcttcgtttgtcgcctattctgccgggttgttcaacactgtgcaacccatttgggcgtctcgtcacgtctctgcaatgccttcaatgaaacgccaagcagccgtccgctgccattttggccacagtcacagacggatcggatcggctgcgcctatctgttggtctatatgctaccaaaaggtatttcaactgcgtgcctagcttggagcacatccaaactggacgaaaagataaaaaatcgaaagaacatatcttatttttttgtttttagtttttaacaaggatttttattttacttgattttctagtattttaatccatttaatcattaataataatcgaatacttttacagtattttcaaagagtattccaattttaatcacacgtgtccctataacgtaggtatagctgaagtttataaagtagtattcatattatgtttatttcagcatgatattgtattggataagttgtcatatcatagtgttaataataaggtaaccaaaatactcccctttccggagggaaattacctggttaaagcgcactggattgcctacgacattactcgagctataactaaattctatgtatcaatttcttgatattaagaagcatacaaaaatcaatgacaccaccacaccataaaaatagcattgaaatttaaagtagtgagtgacatataagaaaatatattttaaatgttacattcctaaacaaattggaaagctacctaggaaagagtatccacatgttgactccgccctgatcgacttcttcattgtattgagggaactccaggccttagcctggccaatacttatcgattggcctgtgcgacttcttggcattagctatgctgccgttgccatcgtggccatcgacgccgccgccacttggcatgcgttgtggaattttaatttgattttggtcatatacacgatcttttcgactgcggctgcgagccaagttaagcgaatcgggccaaaaccaatggccaactaaccaaagtcgggcatcagaaacggttctccccttttttaatatttgttgtacctccgacaattggcaaataattggtaatgcgacggaacagaaattaactgcgtaatcggtttgggaattctaagctgtctgtttacctaactttcggcgagctgcttacataatgcccgaaaattgtgcagcattttggcaggtgattaatctccagccagctgagaacaaagcagccatcaaacggatgcagcggcgtgactaatgccaccattagcttctacatttttgcgaaattcgccatcgaacttcggccccatctggttccaacaaaaacagaaactacaatggagaagaccccgccccgttcgacgggcgattctggtcgaaaaaagccaagtttatttggcagctaatgagtcttctccgccagccacacaatgcccatcaaggctaattccgctctttcccgaccgataattgcacagatgccaccccaaccgaagcaacaataaatacatagctagacttgcgaaaaatatatagtacgtaagataatctaaaagttgaaactaatcccagaaatattactttcaatcaattaccactccagatcactacaatatttatattattgacacaataacttaaaattagttagttagttttttctgctactacaatcccctgatgattcttgcagtgtacgaagtacaattgaattataaaacgccaaactaagccatagataggcagttgactgggggttgtatattagcgcttgaatgaatcgcatgtcttgacttttgtttagaacttttaattaaaaatgaattacggacacgagtgggcagagcggctgacagacagctgactttgcagtttgttattcgtttttttattcattgctaattgacaaacgaacaagtacaccgacaccccagaaaataaacttcgcaaacacacagatactacgaaactcaatcgctcacgcaatgcagttgatcgtgctgacagctgtgtttgattcgattgtctaaacttatttaatggtgtcacattcggaattatgaaataccattcaatgagcggaaaattcataatcacataagtaccaatgagcgactgaggctatgacacaaatgtcaatcatacgcaccgttgcacaggccgccaaagcaaaattacagcctgccaaattgacaaaaaatttggaaattttcaaccgatcgcagccatgacacatagaccgaatattcgtattcaagaattattattctaagttcaattaataaaacgtttaaaatatgtaaaatcaattgtcacaaatattaaaggcaaactccccagattcaaaactcaaaatattatatatcaataaataataactaaattaatcagcttaaatctaaaagtctgtttaaatgtgaattattattgcattgctttgaattcaacggaaatagattttcgaagggaatttataaaactaaaattaagtaattatttgcagaccgaaggttagagtaacaatgcctttagtggacttagaaattcaatgcaatttaattcgtacagaaaatatatgatacgttttaataagttatttgatgttagcatgattcacaatttcacaggaatcaaagaattaataaatacgtaaaaaattgtactggatgttcaagtttattaatttataatgggttggtaaaatgtataccaaagcctcgctccatatttgttcacgccaacgtattcagcagaaaagacttacactttctgaccttgactcatcgctttctgactaatattatttgtttcctggccagcaaaagaaagtcatccaaaccgagcgcagatgcaaattaagcgtaaatgctgaaaactttcatcaattcacagaaacttaactttacttttgctttctggcctttagcctggtatttgtgcttgtatttacacaacttgctgcattcgagacccacacaaaggcactcacagccgctcacaccgatacgaaagtcagttcataaatacaatttttaaatgccgccttggcagaaacaaaaaaaaaaaaactttctccgctttcgttgcaattttctgcagctctgtctctgttattttcccagctttttttagcttctcgctttcgtttgcagcgtgcagtatttgctgcaccctatccatcctgtcccacgttcatggctaaaacgtgtttgcttatttcggctctttttttttggctgttcgttttttgactcactgcgctgcagacatgcaagacatgttttttcgtatttttatttttagtgggatcgccaatcgaaagcatttctaatgtgaaatcgaagcgtgcaacgcgaaaaaaagcagcaaatgccgcatagctccttaaccataacggggaattccgttttctcgggggtgtagtcaacattgctggactttaaagaaaaccccaaaagaaaagctattttttagttggcttaaaggaatacaccagcgaacttgttaaatgaccattaaaaataaaaagaaataaataaaaaaaacgctaaaaacgcatttcttattagttctcgacaatagtaatttgaaatatacaaaaatataaatttcgaaaaatatttaaaagcgcaatattaaaatataaatattaaataaagattaattcactttgaaaataacatatatatgctcatactccaataaatttttttctcttttttaatataagtgaaagcaggatattgtaatatataataatttatatataaatttacggatataccagcatgagcaaatatatacttatgcccgcgggactcataaatccgctttgagtccagttcaaagttgtccggttcgacattttggccaaaaaaggagccatcgctgccagccaactcttgtgggtgctgaaaagtgcggcgaaatgcagccaaatgcaggaagtgcagctgccagcgacgacgtgagaaagccaaaagaaatggcaaaggtactcgcaccgggccaaaacgaagaaatccaaaccaaaatgcatcgcggatgtcaatgcggaaatggagctgaatgtgaagctgaagttgtcgtgaaatgccgctaaatgaatcgttttggcgttggtttggctatggctttttgccgttttggctcggttggcttcctggttttgggctttaacccttggctgcccgaactgccttgacagactacacccaaagtgaaaaaaaaaagcttgggctgaccttttaattgcgcaattacggctcagcgagcgatttccactttagtttaccattttaaatgggagccccatatgttaaatgaacaacaatacgacctgcaacgttggataattacaaagttttgtttttcatgatttgttaggattttttatatcgctattttttttttcttcttaccatggcttccgtttttttgtttggcttagcgaattcagcaaaagttttcaataccccacgttgctgtgcattgaggcgttgcaaatggagtgggcgtggcacatgttcatcactttgttcatcagtcgcatccaagtatttacgcaacgtaagctactacgacttttgcaccaccccctatcattagcttttggccgctttcttttgtcccacggattttaattaagtccccggtaaatcatcacagttgcgtaacccttttccccaaagttttgggtcaccaccagttttactattaatcacgcatacgatacgtaaaagaaaaaaaaactaaatgcacaagaaagcgaaagacaaaagccaaggaaattaacaaaattatggacctgagaccaggggaaggttcaacaaactaaccacgctggccacatttttcgcaacgaaagctaatgaaaaagaaattataaacactttatataaaaaataaggcaaaaacacactaaattgaaattcgccgtggccaccgaaacacaaattgcgcgttttatttccttttcctagccgaacttaaaaaaaagttaccaccaaccacagagttaccaactccgaatgcgaatttgggtcttcaaattaaattcaattgaaaggcaaaaaccatgcgaaattaatgtaaatatccaggaaataaaaaagtaaatactttgcttaacaatttaaatattttttcggcaattgtataacatgatttgaatatatttgcatttcattttcgctttgcaattattatgaacaagcaaatttaagcaaaatacgaaaattgaggatcttagattagccgaatcatattaggggattcactatggccaaactatggttataaaaccaatcaaattattcgcttgtagttactatagtactggaatacacgttttaattctcactccacattccttatgttagttatttcagttctctaccttgttgatatttattcaacgtttgccccgcagagaatcttacataattttaaacaaatatgtaaataattcttggccttgccatccggctcaactgaaccctacactccatcgattagttccgtgacgaagatctattataaatgaatcgatatctgtgcttcgccaagctgtttacacatgtgagtttcgagccgatggaacaataaacagagcaaatgttttgattgaatatttgttataacatattgggagcagaaaagctggggtaaactcaaaacccgaatcagtgtacgtaatacggtagtgggtaacgtgaaagggctaaatatttgagcagttgcagtggcttttacctccggcaaacaatgattgttccactgcctctttctctcggtagttttcccattttttattcgttcccacattgatgcacgccctcatattgcgtatacgcccgggtatagaccgagtttggatcccccagctgcatctgcagacctggcccgaatgcacttggctggctgactggttggttggctggctggctggctctctgtgttgacttttcagatttgctcttcgggctcctcttcttcaaaacttgaagcttcactacgtctgctaaacgagtgggattacgcaatgaacgcacatgaggtctcagagcgccaaaaaaaataaaataaaggcaaaaagaaacaggtaaacgtaatgagcacacaacaaatttttttaaaccgagaccgagccacaccaatattgatatttttggccaagtatctcgagtgttcaagtggccagcaaacgacacctacaactggccagttcaactctgaaaaattgcatttcgtaagcgagtggccaaaaggaaaaaaacaaaaaaaaaataaaccccgaaattatgcccattcatcgggcataaattaagcataatcaaaatgcattaacatttgtttagttagctctgggccgcaataaaaaatccgagtagtctcaggccaaacaaagagttcatgaataaagatgcggacaatctgagtgttttcattttttttcgctttggaatttcggaactctaggcctaacactttgttccaataaaaaacacacttatgtcgtccattgaattcacatttaaatgcgaaacacaatttcaatttcgatttcaaacacccacgccgcgaagaattcgagaaacacagccaagtccaaacttaattgtttatgaaaacacttaattgaaataacaattactgtttacatttatgagtgtccgcggggcagccatgaacaaaatagccggtctaatcaatccattggccgccgatcacttgcagcctttttaacaagcgtttatgaaaggctacagctatcttcacctcgacatttgcccttgcagaaccgtttcatattatattttcgacggttgcaactcaatagggcctcacaatttgtgggctatctttgcggtggcatcttgaatcaataagctcgagtggagtccaaagggtcacacttttggtcgggacccttctaaaattaattactaatatttataaaagtgattgattattaatgtggataacagataatgacgatatccttatacatatatttatttattaataaattcattcaggaagacagtcaattgaatgtagtttctcaatgtaccatcgattactatgatgtttttatacggtaaatcttttgataaaataaaaaaaaaaaactttcttaaaagcctcattactgaaattatatgcacaatacatcgatttgatgtatccaaagcaaagacatacaattaaatgcaggcaaactgtcccaaaaaaccattcctttgtgtctcataacaacatcaagttggttgacaagcacttctggctttcaaaatgcaaaagattggccaatgccagagcaaaagtggcctgcagttagagccttcttcgcttcttcggccacattcgttggcccggccaattgtttttcagcttttagccagtttccactcgaatgttgcagcgtctacggcgattgttgtttcgtctgctggcagttggtcaataattggcatagatttattttggctagttggcaatttttttttgttgcccgaatgtgagtgtgttggagtgttcgtatgtgtatattactggctagaaaacttacccacatcgccggggctgaaaatttccgctgaatttcggctttcgccgtcgccggcggtcgcattcaactgcaattgaagttgaagttgctgctgttgcagttgcagttgcacaggcggctctctaattgcaccattagttgcattcgtctgcgtttcgctcaatgttgccgctgccgctgccactatcgcctcagccaacaacaatgccaccagcaacagcaacagtaaccagcaactgcaaaatgattcattgcctcgatggattttcatcaacgacatcgtaaccgaagcatacaccaaatagcgagaaaaaaatataaacaaaagtactaaaattatagttgctgctctggctgtgctgctttggctgattgttttctctgctgattttctatctggttttctattgttcgttttcgcacagaccgacacacacatacacacacgcgcgcggattttccacttttccacaattgttttgtagaatgaagctgcgtcttctggttgcctactgtggctcctctttctctgccccaccaagttgatgttgctgctgctgttgcgtgcaataattcaagtcgtgctgtcgacttatctgtgctgcggctttgggaaatcgtacgcctgccttttgctgcaaatgtcggaagagagatcggagtgcattagtgaaatgttggtgatttgtacagaaatagtcagtcagggaaaatgcggcaaaaatcattgggagagaaaatgcacttaaaagggggaactaaacgggtttgagccaagtgtccagtgcgtttgggtataatgcttgggcttttatttagggcaaactgaacaatgaaattcataattggtcaattggccattatagttcggctaaatatattattttttggtcagaaaaaaacttattagctaagaccaacgtagtgtaagtcagacataaattatagcacacaaacaccgaagcagactcattaatttgtttcttaactctgcgcaaaccaataaggtatcaaaaatatttccactgtcaaatgaaaccataagtttggtagtctagaagcagcttaaccaacaaattatgacacttaggacactaggccgctctaaggtccctccccacatggtagcccccagaaactcgttaaaaaataagctatgtgtatgtatacttggccatcgcatgggcaaacatcaattataattcgcggtaagtaagagtgataactgaggtcgccgagctcagctcggtctggctcaccgatcaataaaaatcccaaagcccaaagctaaaggcaaagccacatcacgcatacgccctgttgtacgcgggacttgtcagtttcgttagccattaaaccataagcaactatgaatttttatagcaatgtgtgtcattgcctggcgaggaatcaattaaaaatgtgttcgagaggcctttttggcgagt

SEQ ID NO: 437 - DNA, 4249 bp, DROSOPHILA
cgtgtgtgtatgtgtgtgtcggtctgtgcgaaaacgaacaatagaaaaccagatagaaaatcagcagagaaaacaatcagccaaagcagcacagccagagcagcaactataattttagtacttttgtttatatttttttctcgctatttggtgtatgcttcggttacgatgtcgttgatgaaaatccatcgaggcaatgaatcattttgcagttgctggttactgttgctgttgctggtggcattgttgttggctgaggcgatagtggcagcggcagcggcaacattgagcgaaacgcagacgaatgcaactaatggtgcaattagagagccgcctgtgcaactgcaactgcaacagcagcaacttcaacttcaattgcagttgaatgcgaccgccggcgacggcgaaagccgaaattcagcggaaattttcagccccggcgatgtggatgttgttggtgataaacccactacttataggccctcgggtgccaatcgaccctcgattgcaccactgaattcagctcaggatcgcgagaggaagctgatgaatgtgttggctgctcgtcgcaccgctctgcatcgaggcggcttccgcaccaggataggcaccactggacgaactgccatttcaccgtccgcggcggtggagagcacctccaaggcgcccagtgatcccagatcggtgtgcatccggaattgtaccaagaactttacccgccgtaccaccgccagttgcatgcggcaatgtgccaacttcacccgcatggccatgccctcgaatggcaatagttcggtggtgctaaaaggttcggcctctttaaaggccgctgctcctgcaggagatcgggatacaaacgagatcctctttagcgacgagtcctcacacggactctttgtggtggccaaagagcaaaatggaaccctaaaccatattgcagatggcactaagccagcagtgatgggcaagggaatacccagcaaaaccaactcaatggaggatgatgttgaagaggaggaagatgagctgaagccatatgtctactttggagccaagctgccacccatacgaccgggcggtttaacaattaaagcggcggagggcgacgacgaccatcctcgcgtgcttgaggtttcagtcgctcagagcaccacccccactataactacaactagcaccactcctgcgccagtcagctccaccagacccactgcctcgactcgaaggccattgacgcctgtggagcgaagtcgcagtaaatacaagtaccatatgagggaaaggggactggtgccgacagctgcaccacccccagcagcaccacctgcgccaccggtgagtcgaaccaggtatgtgggttccggaagacccacggctggactatcagattccattcaggatctcaagcaaaccgaatcggaagttgccaaacccgtggtgcgtcgggtggtgcaaaaagtatcgccgtcatcctcaacaccactgatcatcaccgtactaagtgccgaggaggaaaccacagtgggccagacggaagctcttccaacagatgaatcaaccacaacaacaagcaccaccacaacaacagaaaaacctagtactacaacaagtacaagcacaaccacaacaacaccagtaccaagcacttcaaaaagaacaaccacaaatgcaccactatcaacaacaaatacaccaaccaccacaacgagtagcaccacccccagcacgacgacaacgagcagtacttcgaccactgtcattcccaccacaacgaaagcgaattccataattgaaaaggacaaggaactcatcagagccttgggaccagctttaacccgagagataaacatcgatgatgcgaataacttgattgtattctgcaataacacttccgattgtggggtcacaccacgaacccagactcaaccatctcacaccaccgattccagtccaaagatccttcgcacaactgtcttgacctccataagatccactgtacacccgcgacccactagtaccagtactactacgagtaccacaaccactgcaccgccagcggtgactgcaccttccaatgaggtctacatcggcattgtggagtcatcttcatcagcatctccggcggacattagttcaacggtgattgcaaatgaaagagatctgaatatggagatgagacgaatgaatctggtcacattagtgctggtagcggttggggtgattccactagctgccatcattctctatctagtgcgaaattttgtgattcgacgaagggcgaagcagagtgaggtattcgatgtgtgcatcacagatcagcagcccataagtccggtgaagaaggtggattccaagtatcaggtcgatgatgatgaagatgaggtggatcaccagcaccaccagcacatgcagcaccatcagaaccatcagaaccatcagaaccatcagcaccaccaggccatgcccatgtcacaggcatctcagcgggatgcgaaccacaataggtacggcaacaacgatgataagacatctctggccagcgaatttcacgatttcgagcgcagcaatatcaggctaaagagcctcctgggcgagggaaactttggtcaggtgtggaaggcagaggccgacgatttgagtggtcatttcggagccactagaatcgtggccgttaagactatcagagcctgcagtgcacaggtgagcctcaaggacgaggcgaatatcatgcgcaagctgggatcccatcagaatgtggttaccctactgggtgcctgtgtggaaagtgaaccccacatgcttattatggagtacgccatgaggggtcgtcttctgtcccttctgagagcagctagaagtgccacaaacatattgccagcctccgttccaggtggtcgcagtctggcgcccttatcgccacgaaccttggcaggatttgcactggacatagcctgtggaatggagtacatagcagggaggaggattgttcatcgagatctggccgctcgcaatgtgctcctcgatcacaacggcatgtgcaagatctgtgactttggcatgtccatcgatctggacgccgagcgaatgcgcaaggagcaggagaagaatgcggcgaatgatctgatgcgccacaatgcgcacaagtttaagttcgacttcggcagtagatacatcctgcagcactggcagcacacttttggtcagggtcagggccaaggtcactgctccaaggatcagccgcacggggagaaaaagtcgcatcatggtcacgacaccattggcaagcgacacgccctgcccatcagatggatggcgccggagagcctgcagtaccacatgttcaccaccgaaacggacatctgggcctttggcatcgtcctctgggagatcgccactctgggatcaacaccgtactcgcagttaacgggacgcgaggttatccgccgggtgccgcagggtctgaggcccgatctgcccaaggagagccggcacgagttctacaacctgatgtcccgctgctggcacaaggagccgcacatgcgaccctcgttcgcccagtccagactagagatcacaaggtcactgcacaagtgggtggacgacgactcagcggcctcggattacatggacgtgagcgggtttagcgaggatctcgagcacggagtggtgtacttcaatcaccggatctcggagttcgagtgcgaaatatgacgctgactgagccaacccctacccggtcgaggagccaccaactaactgtgcatctcaaccaatccatccacaactcatccaccgcccacacatctctatttgcccacttgtagatctttcgaaattctccttccttgcgacgtccttgtcgagcagtattatttgtattttattgttaattttccatttcgaatgccccggaagtttctttcattgtaaatatttatttgttgagacaacaaaatacgttctaggccttacgattaatgaatggcgctacctatgcttagtttaaagttcgtcacttagttcttctagtctgtatctaaaatcccatcttcgagttgagctatttcccctggatgtagccaagatttgactgcacaaaaggaaactttgaaaccccgtcgtcagtaataagaaaataaatcgttgatttaggcgtgcagcgcataggatctatgtaattgtattgaaatctagctatagaattgtacaaataaattaattaaagacgaaatataattatgaatattac

SEQ ID NO: 438 - protein, 1177 aa, DROSOPHILA
MKIHRGNESFCSCWLLLLLLVALLLAEAIVAAAAATLSETQTNATNGAIREPPVQLQLQQQQLQLQLQLNATAGDGESRNSAEIFSPGDVDVVGDKPTTYRPSGANRPSIAPLNSAQDRERKLMNVLAARRTALHRGGFRTRIGTTGRTAISPSAAVESTSKAPSDPRSVCIRNCTKNFTRRTTASCMRQCANFTRMAMPSNGNSSVVLKGSASLKAAAPAGDRDTNEILFSDESSHGLFVVAKEQNGTLNHIADGTKPAVMGKGIPSKTNSMEDDVEEEEDELKPYVYFGAKLPPIRPGGLTIKAAEGDDDHPRVLEVSVAQSTTPTITTTSTTPAPVSSTRPTASTRRPLTPVERSRSKYKYHMRERGLVPTAAPPPAAPPAPPVSRTRYVGSGRPTAGLSDSIQDLKQTESEVAKPVVRRVVQKVSPSSSTPLIITVLSAEEETTVGQTEALPTDESTTTTSTTTTTEKPSTTTSTSTTTTTPVPSTSKRTTTNAPLSTTNTPTTTTSSTTPSTTTTSSTSTTVIPTTTKANSIIEKDKELIRALGPALTREINIDDANNLIVFCNNTSDCGVTPRTQTQPSHTTDSSPKILRTTVLTSIRSTVHPRPTSTSTTTSTTTTAPPAVTAPSNEVYIGIVESSSSASPADISSTVIANERDLNMEMRRMNLVTLVLVAVGVIPLAAIILYLVRNFVIRRRAKQSEVFDVCITDQQPISPVKKVDSKYQVDDDEDEVDHQHHQHMQHHQNHQNHQNHQHHQAMPMSQASQRDANHNRYGNNDDKTSLASEFHDFERSNIRLKSLLGEGNFGQVWKAEADDLSGHFGATRIVAVKTIRACSAQVSLKDEANIMRKLGSHQNVVTLLGACVESEPHMLIMEYAMRGRLLSLLRAARSATNILPASVPGGRSLAPLSPRTLAGFALDIACGMEYIAGRRIVHRDLAARNVLLDHNGMCKICDFGMSIDLDAERMRKEQEKNAANDLMRHNAHKFKFDFGSRYILQHWQHTFGQGQGQGHCSKDQPHGEKKSHHGHDTIGKRHALPIRWMAPESLQYHMFTTETDIWAFGIVLWEIATLGSTPYSQLTGREVIRRVPQGLRPDLPKESRHEFYNLMSRCWHKEPHMRPSFAQSRLEITRSLHKWVDDDSAASDYMDVSGFSEDLEHGVVYFNHRISEFECEI

SEQ ID NO: 439 - DNA, 10659 bp, DROSOPHILA
tttttgcatttagtttttagcaaaagagttcggaatgagcaactgattcgaagccacttcaaacatacggaactgtatgcttttggcacttgtgtgcgacctgatgcgcttttatatgcccataaagttcgcactaaaccactaaaaaaaactgttaatcagttgaaattgcttgaacaaaccgaaaaaaaaaacgaataaaggggctcatcaatgagcggcgatctgctatagagtcagctgctccacttgagccgttatttatttaacgaccgatcatttcgactgtcatcatgttaattactctcaggcaactactgggtatgtgggattaattggtatatagacagttctcaacccaaatcggttttgttgacacatgttcacattcacgacaattgccacttgaccagcactgagattgcggcttatcggtcaacaagcaaaccccctaagtggctaaagcaattggcccacagtcaataacaacactttaaatggtagaattcgttaaacttttagccactttcaccttccaagccattcaatgacgtttatgcaaatcgttcggctgcaacaactgtgaaatgcagtctaaggataaatttgtaacgaattaccaatcaattgaccaacgaaacaaccaaaacaaaccaaaccgagcccaaccgaaccgaactgaagccagacttcggggtggggagaccgcaaaagaggtctggactgccttgtaaaacgatttggaattggaattgaaattgcaatgcaactaaaacaaaaacaatttaaatataatggaaccacaacgacttggtctccaagggggagctgtaaataattcagcaagagccggagcagcggcgactgcaaattaaatcaaatagttatatcatgcgagtaaatcgctgtggatatcacacatacgccccgttgaccgcagacgcgagtcgcagctacttacacgccgcgctcatcgctccgggcatcagtgcgcgcccagtgctcagccgcagcagatcgtgaatgtgaacggatatatataacatatatctatacagttgaacagtgtgcatccccatgtctgggagatagagcagaaaagcgcacaaatatttgcacatcccaaaaggggaacaagacctcctgtccccgtacacgtgctgcatcgtctgcggccgggatctgaaaagtaaaaactccgactccggttccgtctccactttttactcgaactccaatcaggagccgtttcgtctagtttttttttcgtattttttgcccgagctccacgtccttcatcttgccaccatgcattcgccggctgccaaagtgtcgggctacgtcgtcctgatgattgtgcaaataatcttcctggttctattctggctgttcgtgcgttacgaaaagacggcgctgcccctggcaatcgacgccgaagacgctggatcagcaaacgaacacgtttccaaatatccgcgtgagtagctgggattttgtttccatccttttgctttccttgggaaaaaggacttccgcttataagcctctaaaatgaactttaaatggtatgaataaatatagtagaacttagtgcatttttttattattaaaagaatatttgctaggaagttttaaacacaaaaagtaatttataggtgtcttttttattagttgtaaacatagcattatgttttttagacaagctcaaccagataattttgccttatatgccacaggcaaaagtttttgataatcaaattattttgtatttacaaatatactccaaatatcattttatttttcgtgctttaaaaatatctttttgttggttaattagtcccctttgtctaataaaagtcacttaaattaaatatacatggcaacagtgcaaacattccattctgacaaatcaaataatatagttttctgcacgttgtggaattaatttacaccggacccctaaaaagtgcagctcttgtgtgcggaaactttctatatatttaggttcacccctccacaataaaagcaatcgtgaaaaatattatttctcgtatttgtataaatttatattatttctatattattgtagctttgtttgtttgcagttgtgtgcaataaaagtcactcctgtaaacgctcgtggcgtactcgtaattcgcaatttaaattacaactctataaatacgtatatgcatatagaatagctattttaagatttttgtataattagtcggaaatgtcacgcattttatttttggactcaagctttaactaattagccacgtagggctaatgaaagacaattggcaaatggattgaatgtgtggtatgctataatttttaatactttgctattcccatgacatagacgcataaaaaatatatcaaatgatgttcaattgagaatttcttaattcgtaaacaaaaacgtttgatctttagcggtttttaagtcatttaattaatagtaaataaacatgaattgaatgaaataggcaagattatgcaaaagaaacagtaatatgaaagtaacttaaaagaacaactaagggaaattcgatgggtaatggtcagaaacaattaagaggaccccaagtcgaagctgtaaatcaaatcccgcataaagctattacccatactaaccgaaatataaatgtatgtcctagtcctttgctatttcgatagagcgagaagatgttagaacgaggagtcctggcattgtttgccaagtgttggcgggtcataaataaatgaagttctttttcgcacagtctccgcagtcttttgggtcccgtggcaccaattccattaattacttctgccatggaacagggtacattgtgccaaaccgaaccgaaacgaaccgaaccgaaacgaacaatgggacacacacacacgcttacggatgaataattaaagtcattaatttcaatttatgcaaatgcgtctgtaaacaacttgttgcaattcataataaataaattaaaccgtatttcacactaattgcacccgcgcggacacacatacgcacacaggggatgtttgcgactggtgttggtggtgctctgtaatagtgggtggcagtgggtggatgtaggtgttgcctatccactattgcgtcttggtaccctggtgacatcaatctcaatgcaattgacttttggcagcagacaattgggcggttaattgaaacgacttgactctattaattggcatcccagctggcccagacaatggtcatcctgaagtccctcgcccgacttaccgctcctgttcctccccgcagagttccaggacatccaggtgatgatcttcattggctttggcttcctaatgaccttcctgcggaagtacggatacagtgccaccggattcaccctgttcatggctgctctagtagtgcaatgggctgtgctcatgaagggattcctccacatggagggcggcaagatcaggtgagtgcttggcacaacttcaatttattaattgctcgacttcgagtccaaagtcaaactgacaggccaaaaagcaaataagtgtgcgatgtcaaatgaagagaaatacccccaagcttaatatgaattcaggcaattactttaaatgaagaagtcaacctgaggaggcagggtccttgggtggaatcttctacttatgctaagtgaaatgggcgagaatccgaagtcaaacagcaaacaaaagtatacgaagatgtaaaaactctaaagaaactgtcagtcaaatgtactggaaatattaatatttaaattaaaaaaatatatttaaggaatgaaaagagtttatccttcaattcgcttcttactgatctcagtgcattttattaaagaactaggattatgcttgtcaacatctttccaaacattccaggaaattcattattcctcttaaatttttctgtgtaaatatacaaacagttttgccttataatgtactccatttcatttgacggcaatttctcggtaaagttgtccccattttttatgcggcagagggcgtgtcacctgtcgcacttcctgtttatcgtattccctctcctttttgcgtccacagcctctccctggagaacatcattgatgcggatatagccgccgcggtgcccctgataagcatgggcgctctgctcggcagaaccacgcccatccaactcctgtgcatgtccgtttttgaggtggctcttttcgcggccaatgagtatctggctcttcatgtgttcagtgtgagtagtgttaaaaattagaaatattatttaataaattatatattttcttataatattgtttaattctgatagatctgcgactgcggcggctctatcactgtccatgcttttggagcctactttggactggctgttgccctgatgctgagacccgccagcgaccagaacgaaacgggaaagctagagggcgccagctatacgtcggacatcttcgccatgatcggcaccaccttcctgtgggtgtactggcccagctttaactccgttctggccgacggagccggcggcgagcgggccattttgaacacgttcctgtcattagccgcggcaacaggtgagtcacgtgccccggcaattagctggctcaagtggagggcagctggaggacattccattctctgttctgtgcagtccatctcgcatctccggacatatcttccggccatcatcgcccactcgcacatacatatcttcacgctttgctgggtcattcctgccggtcttctcaggccttgttaattataatgttggcgggcctattagctcagcacccaatgaaattgaaaaaggatcccaggcaactccgtgcacaacccgacgccctgtaggtccttgtgcatgcgcctcacaaactaattaaatgtcaaatagtttcgttaacacatttgaaaatttattttgagcacgtagcgcacataaaaacgaaccagcctgtccgacatttgcttagtctgatgggtgggtcagtagtcgacggcaaatcccattcggatccagtctgtccaggttctggtccattccacgtccagcccagtccagtccaggcgcatatagaaaatgtgctaaaagcagcagcccggggtcgggctttgccttggttgactcgctcggttaatgtaaataacaaaacacaaattaaatgtatacaaaggacgcccggcagcaacaacaagagccgtaataatagtacggccagcagctgagataagccaactaggaatgggcgacacttggctaactgtggccggagtcttgcccgcttttagctccgtttctcctggccatggtattaaagccctcacgttacggcgatggaggtaacacctaaactgggcatacgagtcagcagtaagcagatggcagaagtggcacgatgtgtagccaaaaacacaaataccctgcacaatgcaaattacaaattacaaataataatacatcatttttttttttacttatttggcatcttgaaacttttcggactggaatttaattttttttaacaatgaatttactgaaatattccattcaatttgttaaagccaaggtggctatatatatttgcaattaatgccaaattcctttgattttccttccgtataaaatatttctttattaaaattggtgaatgaattcacttcatgcaaacaattaaacgcagaactcgcttgttaaattttcttctgtcaaggttcatttaacgacaaagaacacttcaccttgttttttcgaaatttttatttggccatatagaatgcgagcacataaagtataaatgaatcatgttgtatattttcaagagtatcacttgttagcatttcatttcgattttttgcccaaaacttctttgctctgcgtgaaagtgcttttcgagagtacatcttaatttgcgttaaaaattctcgtctcaataaagtgcatattcaaatttagttgcaattcatatctgaccagaggaaacttaatcaatgcattccaatctgtgcagcagagctagcccatctcataaatagacctcgtagagtatcctttcgggggaagagagagaaaaagtgggattctgggcgggcattttatgcggaaggatgtgcgattagttgagtcaacgtgcggctccgtccgttgcagtggcctaaaccccgctcccactccccttcccgcatgtcctgcccaacgtgtccttgtccattcggtggacaagccggttgcttggctcactagttgttgccttaattaaactaaagctggggttcagttcaatgctgaaattagaggcggtctggtgggtgtggcccacggtcgtagtcctttagtcggccatgcgggcggacatgcatggtctggccagcaggattggttttgggcggagctggagttggagccaggaccaaagggggttcggatcagacgacgccattcggtgtccgaatgcggcgccaacagcaaaaatacgccccagttgttgttttcacaccaggcacaaaatgagccggaacgccgtctggaccttctcatagaaaagcacagagagaaatttaatagaggggttatttaacaaaaacatttttaataaataaagattaccgagtctagtagcacgttcgatatcttaaaatgcaacaaatatgaatctaattgatatttaaaaatatgttctagcaaaagtcttttattctgactacttttattttctaccgtgtgatttgggattggacccggtcactaggacggtcttttccgggggcgatggcgggggaaaatctgcccgcatcggccaagaatgctaagcacaaaacacattttacagtcgcaagtgacaccattggcgttaatttaaattgtttaatgttcgggcaggagaaaagcgaagcaaaaacaaaagcaacggcagctgatgtcctgaatctcggacgccgttggcctggctttagtttagaactcgagcaggaccaacaggacgactatgaggaccggctgtaaaaaagctgtttaattgatttttaagccagaatttgccgttctcgttgttttgcgtcgcccggacaacgtcaaaagctgttttgaaattgttgcggttaaatgccccttccaacatccaactctcccgtcggctgagatttgccttacttatttgcagtggccaaccgacgccaggccccaaactaatttatgcaaattattatggctgcaacatatgctccgccataaaatggagatttttaagtatttagtgttattcagccgagatttatgctggctgatggccataaactgaagcgtccttgttgtgctgtgtcctgtggccagcggaaatgcgctgaaggcgacaaggcagggtggaaatccaatgggatcttgccactgtcgtgtttacatttttattagttttgtgtttattaccaaagtgtggtttcgttgctgttgggttgggttggctgtgtcattcctgcagctccagtgattagcgatagctgcttgttggtcttagagaaactaaacaggagggcttatgaatgcagaggtatttctcttgcaacaaagtttgctgagcagagaaaatgcagtgtgcaaatagaaatggttgttttgctattcaacaggtcgtatacgtgatttttctgttttatgtctcgtttgcgattgattgacaattgcatatagatgaatgaagcaaaatctaaaaagtcctcaaagaagttgttgtataggggcttgctttaagcttacgtataatagttgtgtattaataattgtatgtttctttaatatttatattttgcaactaaaaagtcttctctaggagtacggtgaacctcactctattcattacgcactctaaagagaaactccgaacaattcattggcctctaatgaactagccggagactcattcaaaaatgcattaaaatcatgtaattaagcctcgccattcgaagtccgtgcgctgcattcaccctgcctgcgaaccataaatgggagccacagcctccctcagtgcttttttttttactgtttttgggccatcttcctaacccgtaacccgttggtattttgcagtgaccaccttcgttgtatccgcgcttgtcagccacgagaataaattggacatggtgcacgtgcagaactcgaccctcgccggcggagttgccgtgggcacggtgtgcaacttgctgctcggcgcccacggagctgtcttaattggcattatcgccggcacggtctcggtgctcggctatcgctatttaacagtaagttcgcaacgctaaaactgaacacagcacactcacaaaatacaaccaacaaaaaaaaaaaaaaaaaaaagaagaggaaaacccaaaagggcctccatacaagcattcaaatcgcgtacctggaaccaaaactagctggcagtggcttcgctttaattagtgcgcctaggaaaaatgcgacgctaatgagtaaagtttgttgcccgccggccagcctcagccggagccggattcctccggacttcatcacggattccggcggacttccatttgcattatgaccacgcagcagccccgaaatccgtggagcagtaaataagtttgcaatttcgaaatgacacactgactgcctgccatgtttcacttttaaataatttaatttaggcactggtcattaattattccaagtttagaaaacattgaaatcaaatctgttgaatgaaatttaataactttttgcctgaagtgtgtgtagtgttagttaaaagagttataaattcataaaaaactttactaactttaatattttgatgttgataataatcaatctggaatccatcatttaaatttaaaagggctaagaaatattgcttgctcagaggttaaaatatttttggtttcaatctgcatgttgaaaagcaataaaaccacatttattctggtttctagccctggatgacggccaatctgaggctgcacgacacctgtggcgtgcacaacctgcacggaatgcctgccctgatttcggccattgcctccgccatttacgcctcgatggccaccgtgggcgagtaccaatccgagctgcaggacattttcccggccatggtgggcaccaacggaaccgagaccaaaatcatgggcgtgagtatccatgtccggcatctatgcaccggtgggtgttaataccttttggactcgtttcccgttttccgtttcccgcagggtcttggccggaacgctacttcgcaggcgggctaccaattgtttggcatcgctgtcacactgctcattgccatcggaggtggtattttgacaggtatgacaacttaaattatcctgtaaatttaatattgtagtacctaatgtacttaaaacccaaaaacaggtgccgttttgaagtacaccaacttccggaacctgaagaaggacgaacatcaccaggacgagcactactgggaagttccggctgccgagaacaaggaggaatagttaagtgttgtgcctgtcagattgatcacagttcacgcgactctaatgtgccttgtctaactacttacgactaccttactattattattattattttatttacattattttgttgtatgaaatgcacgcaatgccattgtgcctgcccgcatccgaaatcaaagttatccaaattttctgccatttgccactctttgcatttgcatttcgctgatttgatttgccgccttttttgcagtgaactagaaaaagttgacgagcttttgctttaagccaagtaagccaaaactaatgccaagccaaaacacccagataaatgcaccaatgtgcagagagcgcccaggacgatgggatgtggacaatccttttgttgcgttgtccttgcctgcttcgcttaatttttgtagacatttgtcgcatttcattaaaaactccaacaatttacacatttaattagcgtcgagcaccaaaaaaacagtaatgccaaaataaaaagaaacaaaaaaagtattagcaataaaaatattttaaatgtgacactctgcccttctccaactcctccaactcttttgtacacttcgcatgccgggcgcaatttttaatggaattaaaatcatacacataaaatccaacaacgaacgttggcgcaaaaagtttaaatatgctcgccaaacttttggatgacgatgccgccgccaccaactcgaattcccagtctgccgccaactttaattggcgcccatttctgttgcgcaactggaatgcaattgtccccgccaacaatttgtatgtgcgcggcgctctgcactaggagctctgtcctctgcactccgcttattaagtggcccaggacaaagtgctggctaattaggcgacttttggccaagacaccaggacaccttcgccgccgcccagacgccgtgacgccccagcgatcccatccaatccgatccagttagctttcttagcttttccagctttctcggccgcacagctcagccggcgattagctcacctggcgccgaaggccactaatcgccagacaaagacggagcaggaataatgtctttcaaacgactcacagtttcgcccaccagcggacaactggccgataagctggcggccaactacttaagttggctttgtcacaccccacggacgcacaaacaaagcccaaaaggc

SEQ ID NO: 440 - DNA, 1840 bp, DROSOPHILA
tgctcagccgcagcagatcgtgaatgtgaacggatatatataacatatatctatacagttgaacagtgtgcatccccatgtctgggagatagagcagaaaagcgcacaaatatttgcacatcccaaaaggggaacaagacctcctgtccccgtacacgtgctgcatcgtctgcggccgggatctgaaaagtaaaaactccgactccggttccgtctccactttttactcgaactccaatcaggagccgtttcgtctagtttttttttcgtattttttgcccgagctccacgtccttcatcttgccaccatgcattcgccggctgccaaagtgtcgggctacgtcgtcctgatgattgtgcaaataatcttcctggttctattctggctgttcgtgcgttacgaaaagacggcgctgcccctggcaatcgacgccgaagacgctggatcagcaaacgaacacgtttccaaatatccgcagttccaggacatccaggtgatgatcttcattggctttggcttcctaatgaccttcctgcggaagtacggatacagtgccaccggattcaccctgttcatggctgctctagtagtgcaatgggctgtgctcatgaagggattcctccacatggagggcggcaagatcagcctctccctggagaacatcattgatgcggatatagccgccgcggtgcccctgataagcatgggcgctctgctcggcagaaccacgcccatccaactcctgtgcatgtccgtttttgaggtggctcttttcgcggccaatgagtatctggctcttcatgtgttcagtatctgcgactgcggcggctctatcactgtccatgcttttggagcctactttggactggctgttgccctgatgctgagacccgccagcgaccagaacgaaacgggaaagctagagggcgccagctatacgtcggacatcttcgccatgatcggcaccaccttcctgtgggtgtactggcccagctttaactccgttctggccgacggagccggcggcgagcgggccattttgaacacgttcctgtcattagccgcggcaacagtgaccaccttcgttgtatccgcgcttgtcagccacgagaataaattggacatggtgcacgtgcagaactcgaccctcgccggcggagttgccgtgggcacggtgtgcaacttgctgctcggcgcccacggagctgtcttaattggcattatcgccggcacggtctcggtgctcggctatcgctatttaacaccctggatgacggccaatctgaggctgcacgacacctgtggcgtgcacaacctgcacggaatgcctgccctgatttcggccattgcctccgccatttacgcctcgatggccaccgtgggcgagtaccaatccgagctgcaggacattttcccggccatggtgggcaccaacggaaccgagaccaaaatcatgggcggtcttggccggaacgctacttcgcaggcgggctaccaattgtttggcatcgctgtcacactgctcattgccatcggaggtggtattttgacaggtgccgttttgaagtacaccaacttccggaacctgaagaaggacgaacatcaccaggacgagcactactgggaagttccggctgccgagaacaaggaggaatagttaagtgttgtgcctgtcagattgatcacagttcacgcgactctaatgtgccttgtctaactacttacgactaccttactattattattattattttatttacattattttgttgtatgaaatgcacgcaatgccattgtgcctgcccgcatccgaaatcaaagttatccaaattttctgcc

SEQ ID NO: 441 - protein, 449 aa, DROSOPHILA
MHSPAAKVSGYVVLMIVQIIFLVLFWLFVRYEKTALPLAIDAEDAGSANEHVSKYPQFQDIQVMIFIGFGFLMTFLRKYGYSATGFTLFMAALVVQWAVLMKGFLHMEGGKISLSLENIIDADIAAAVPLISMGALLGRTTPIQLLCMSVFEVALFAANEYLALHVFSICDCGGSITVHAFGAYFGLAVALMLRPASDQNETGKLEGASYTSDIFAMIGTTFLWVYWPSFNSVLADGAGGERAILNTFLSLAAATVTTFVVSALVSHENKLDMVHVQNSTLAGGVAVGTVCNLLLGAHGAVLIGIIAGTVSVLGYRYLTPWMTANLRLHDTCGVHNLHGMPALISAIASAIYASMATVGEYQSELQDIFPAMVGTNGTETKIMGGLGRNATSQAGYQLFGIAVTLLIAIGGGILTGAVLKYTNFRNLKKDEHHQDEHYWEVPAAENKEE

SEQ ID NO: 442 - DNA, 3859 bp, DROSOPHILA; identical to SEQ ID NO: 172

SEQ ID NO: 443 - DNA, 1675 bp, DROSOPHILA
taaaaaagtaaataaatgattgaaattaaggcgaaactgctgcgtgcggactcggccatctacgccacgggcgagagagtccagtgcctgatcgagttcacccacaaggtgttctccgacgagccagccgcgtcgcaggctgtccacaatgccaacgaagcaaggtgagccgagctgttgttaactgtttttcttcccttgattcaccatgcaaaaccgaccagaagccaggagaacctggcctgggcctcggcgcagctgcactgctaccggaaaactagctactctacatccgcgggcgaccgagccgcggagctcacggagatgatcggcaggacggctttggatgcggtgacgcaggcgccgggagaggtgattgtggccaccaagcccaagatcctcttctgcgacctgcgcctccagcctggagagaccaagatgtactttttcaatgaattcattccccgcgatggcccacccacgtacagaggccacaacatccggtacttctacaagatcaccattgctacgcaacgggtcaagtccaaggtgcaaacgctggccgttcccatccgggtgttgccaattcccataatttcgcggcccgacgaacttcccgtaaccgtagagaccaacgaagagctggcgcccactaatccgttcctggaaaagcgcgagatcagcgagcttgagatatcgtggcaccaccttaaggcaaggaaatctagatcccataagcagctgtaccttttctaccgcatctcgaacaaacgcggcttcgttggccgcttttgtttgttcaagccagcgtataagctcggtgaggacattgtgggcagcctggactttgatcccggcgttaacccccgaaaggtgcgctgcgtccagttttcggtaaagctgcagcagcaggagctttccatccgaccgcaaccagtgcaaaatcaccagctgcagtcgcaatcctcgacgggcgatgatgtctcctcgatgaactcctttgatatggccagcatagctagcggagtgttggcagataacctccacaagtcggccacatcggctagctcaaaggttaaggaggcgcctgagccaaccgggaaactttcgaccatttccacctcccaccaagtgtgctacgcaacgctgcagacccaggtcgtggtacccattccgctgcacgtaacacccacattccgcacagacctcgtcgacgtgcgatggcgattgcatttcgagtttgtgaccacaactttgattgactttggcattccgaatccggagtccggcgagctaaaagcaccgtctgaaatgcccgtggagacgatggtatggaatctgcccgtgaccgtctacgctgcgaatcctctccagatttatgctccaaaccagacattcaacctgcttataaagtaatagcacttcagttaactgtgttctcttgatggaagtaagtagtaagaagtattgtattaatatattggagaactaatccaaagggtttctcacttttaaggctatataaggccgtttagaaagagcaaacgaaagcaacaagtcgattacggttccttttaaaaacttctgaaacccaatcccctcttacgtctttgtaaaatacaaaaatcttaattaaaatttagtcgaatatacgaatcaaaccgcttgaaatcag

SEQ ID NO: 444 - protein, 363 aa, DROSOPHILA
MIGRTALDAVTQAPGEVIVATKPKILFCDLRLQPGETKMYFFNEFIPRDGPPTYRGHNIRYFYKITIATQRVKSKVQTLAVPIRVLPIPIISRPDELPVTVETNEELAPTNPFLEKREISELEISWHHLKARKSRSHKQLYLFYRISNKRGFVGRFCLFKPAYKLGEDIVGSLDFDPGVNPRKVRCVQFSVKLQQQELSIRPQPVQNHQLQSQSSTGDDVSSMNSFDMASIASGVLADNLHKSATSASSKVKEAPEPTGKLSTISTSHQVCYATLQTQVVVPIPLHVTPTFRTDLVDVRWRLHFEFVTTTLIDFGIPNPESGELKAPSEMPVETMVWNLPVTVYAANPLQIYAPNQTFNLLIK

SEQ ID NO: 445 - DNA, 4669 bp, DROSOPHILA
cccaccaccccgcggattctggtctcgaccggaagccgtattgggcggggacgggcggcggtccggtgctgaagccggcgacagttgcccgagtcagccactttcaaaatttgttggttaagtaacttagtagcttagcttcggattttcgtaacaaatttgctgttcagaacacttccatgtacgcggcattgccgagcaatttgcccattcttttgctgcagcgaactacgttccaatatttatttattatttattttgttattaaaatgcatatttatacaacttattatttgaaagtaacaatttctttttttacagtgaaactagaactctcaaaaatagaaccccaaatgcatttttgctcgtaacaggcaaacggtatcttgatactaatatacgggcatgtgtagcattacggatttcgaagagtatttctactagtttttaagttttgagatttttaatgcatatcgatttcatgaataaagtttccttccaaaaactaaatatgtatttctacttatactcaataatctcttttccatgagcattgcaatatgacgactattaccaagcaatttagaagcattggcacatttaggcagtattcagctattaggtccaccaagcacgaagttatcggtcctcgcactcggaactgatgttttatgtggaggtttacttaattgtacgttcaaaattgcttaagcaactaattgttataccttaacaaagaaaaaataaaaattgggggtattccattaggttgtaagtcggttgtgaatttttgaatttaaacctttagatcaaatgtacttgtcagaaaaattaaattagaacacaaatttttttaaactaaaagtaatttaagtaataaatgttcaggaatgcccttgccaagagctagtattttccaaattacatgcagtgcatttagtatatttttgacagtcgacctgtgagtgtgtgtgctactactacacggtcacactgtttgtatgttataaacaagcgtggttgccgcacaaaatggattctatttttctggtagacacaacaggacgccaggaattcaatggcgagcagcagcaaaagaagattgtgtacaacaaagagctgctcctgacagaaagtgacgcgcacagcgaggaggacgaggaacaaaatgagggcgcagtggagctctttggcctaaagttgaactccaaggaagtgctcgatgtcgtgaattccctgcctgaccgaaagaagccggtatccaaggttgccaagcagctggaggacctctgcgaaaaggtcgagagtgcagtggagaactccagcaaaccgaaagtagtgccccggaagcgggtaacagaactgaaccacgatgctccgcatctggacctgcggcaggaaaacctggaaagtaatatgaagaggacgaaacaggccttgaatccaggactagaacaggcgcatgcactgcccaccgtgggaaagaggcagcaacccatcatcaacagagtgagtgtgaagcgatttgttcgtacaaacagcccttttgcccatgatgaaatattcgacatcggagtttgcgcattggcgacaagacctaaggctcagactctagcaaatctagtttcatccgttgtaatctttgctgctgcactccagaatttgcagtggccgtaaggccagcgggacaccaacagccagggatcaagactattatctgtcattgagtcctagacagatagtttagtctctggtttacagaacacccaaatggaaatgaaacacgcgcttttgtcgacccaggagccagttaggtctaagctgtttgtcatggtgacgacgtctttagtaatctgagcgcaacatattggaaatttcagaccctaccttgcttttatttttaatcgccttccttttttcaggctgaacgctcaaagaccaagggcaagggatggtttaatctgcccgccacagagatcaccgacgagatgcgaaacgaactgaaaatagttcagatgcgatcggttctgaaccctaagcaattctacaagaagaacgaccttaagagtctgcccaaatttttccaaatcggtactgtgctaccttcgcatttggatcactaccaagaaaagaagtccaagaagaagcagtcgctggtaaatgagttgttagaagacgagagcttccagaagttcaacaagaggaagttcaacgaggttattaagcgcacagacaaatacgcctatcggaaaaacttgaagaaaatgaaaaaacttaagaaaaataaataaatataaaatattttaaaacctaacttactcgtctctatattttatttgaacttaaataatgatggggtaaatagtcaagtcagaaagtagtcactccagagatcgtggagtatcgcaagatccgtatggttagtacctttctgcgaaatagaggagtttattttatgttctcttcctttggccaaatatttaaaaatcatattcctcagtaagattctttatattgtgtgtattaacaatatttttgacaaactaaattgataactttattctaaattgttataagtgaacgaggaaagtttctttttaattttataaccaatctttgaatcatgtcttccatctagtttccgtagtgtagcggttatcacgtgtgcttcacacgcacaaggtccccggttcgaacccgggcgggaacagaaagattttttataacaatttttatatatattttttaatgactgtgttttaatttcgtttaacttaaatttatgatttcaaagtagaagaacagatcgataaatttcatataaagctggtcaagaagtaaatgttgaaaagtggtgaattaaggtatactttcaggcatcatctcttaataacccaaaatcggcgcaccggcatcccttggtgaaaatgcacccattacaacgtacaaaaaccaactttttaaaattttatttgccaaatccactaaaagacagggttttattggaagcccccgtaccacagccgaacgcagcaaggtaccttggagtgcttctggatcgcagactcacatttcccaagcatgtgactgacatcagaacacgcctacgtgctaagttggcgaagcactactggctactttgttcgcgcagtaaattgtcgctatccaacaagctgacaatttacaaacagatattagcaccaaactggaagtatggatgccaaatctcgggcttggcatgcgacagccaaataaaaaggatccaggctattcaaaataaggtagcaagactcatcaccggctgcgagtggtttgtgcgaaacaccaccctgcacagagacctgaaactcgcaacggtatttgacgagataaaccagcactcgagcaggtaccatgacaggctggagcgccacagaaatcggctggccagcgctcttaacagatctcgcccaccaaggaggctcaacagaaggcaaccgagggatctcattacccgatctcctttgacaagggtcagcagaggctgacgcttatcaaaaaacctatttgttatatgtgtttgttatgtactgtattattattgtaaactagaaaaagctaactgtagttagccggcgcgcccaaatgggcagaaataatagaaaagaaggacccaaaggggctccaagatttccccgtatgccttaaaaaataaatttaattataaaaaaaaaaaaaaaaacagccccccttcacgaaacttgtaatgcctcgtggtgcaccagaaacaacattaatttacatttatttactgtatcagctggctgctattggacggcaactttggcgcactttgcatttttattgcacaacatccggttgcaaggactttttgcagcattcaactgtgagagattccggcggacgggacggcaaccccaagtcggccccaaagggccattaccacagtgtcggcgaagctgcaattacaaacagttgttcaactgcttgacttaaaatgcagcgggccagtggcttgaatcgggaatgtcccgaaccccagttggagtatctgtatctgatgccgtcgtttgtggtttacggattaaagcgtgtacatccgtggcagcgcggaagggccggatgacgagccgcgcatgcgtccaccaaatcccggagagacccgcaccctgaaagtcataacccgttaaccgttaccagtatcccgtagcctgtaacccgaaacccgtaatccgccatccggacggaggttctcgagcgggatcacgggccacggggtcggcggtggtcaatggcgtccggtgtcattgcgtttccgtttgagttggcaatttatacaatttttgctggcgctgcttgtgaaatggaaaatggaaaatggaaaactttgccaccgccaccgccgcacatttacttactatgcggctcgaggctcgcacttttgtccggcctccttgtttggcaacgttaaattgatttataatttcagcccgtcccggagtcgcgttttaacttttcctgctgcgcccagttcccgttcatttggcattttttaattcgcatttttaacacagcgaccaccgtccgagttttcccctcggaaaagcattctttatagcgcaaatgtatgcattttccacggcctttcatgtttgtatgaattttaacg

SEQ ID NO: 446 - DNA, 1536 bp, DROSOPHILA
tatgttataaacaagcgtggttgccgcacaaaatggattctatttttctggtagacacaacaggacgccaggaattcaatggcgagcagcagcaaaagaagattgtgtacaacaaagagctgctcctgacagaaagtgacgcgcacagcgaggaggacgaggaacaaaatgagggcgcagtggagctctttggcctaaagttgaactccaaggaagtgctcgatgtcgtgaattccctgcctgaccgaaagaagccggtatccaaggttgccaagcagctggaggacctctgcgaaaaggtcgagagtgcagtggagaactccagcaaaccgaaagtagtgccccggaagcgggtaacagaactgaaccacgatgctccgcatctggacctgcggcaggaaaacctggaaagtaatatgaagaggacgaaacaggccttgaatccaggactagaacaggcgcatgcactgcccaccgtgggaaagaggcagcaacccatcatcaacagagctgaacgctcaaagaccaagggcaagggatggtttaatctgcccgccacagagatcaccgacgagatgcgaaacgaactgaaaatagttcagatgcgatcggttctgaaccctaagcaattctacaagaagaacgaccttaagagtctgcccaaatttttccaaatcggtactgtgctaccttcgcatttggatcactaccaagaaaagaagtccaagaagaagcagtcgctggcatcatctcttaataacccaaaatcggcgcaccggcatcccttggtgaaaatgcacccattacaacgtacaaaaaccaactttttaaaattttatttgccaaatccactaaaagacagggttttattggaagcccccgtaccacagccgaacgcagcaaggtaccttggagtgcttctggatcgcagactcacatttcccaagcatgtgactgacatcagaacacgcctacgtgctaagttggcgaagcactactggctactttgttcgcgcagtaaattgtcgctatccaacaagctgacaatttacaaacagatattagcaccaaactggaagtatggatgccaaatctcgggcttggcatgcgacagccaaataaaaaggatccaggctattcaaaataaggtagcaagactcatcaccggctgcgagtggtttgtgcgaaacaccaccctgcacagagacctgaaactcgcaacggtatttgacgagataaaccagcactcgagcaggtaccatgacaggctggagcgccacagaaatcggctggccagcgctcttaacagatctcgcccaccaaggaggctcaacagaaggcaaccgagggatctcattacccgatctcctttgacaagggtcagcagaggctgacgcttatcaaaaaacctatttgttatatgtgtttgttatgtactgtattattattgtaaactagaaaaagctaactgtagttagccggcgcgcccaaatgggcagaaataatagaaaagaaggacccaaaggggctccaaga

SEQ ID NO: 447 - protein, 453 aa, DROSOPHILA
MDSIFLVDTTGRQEFNGEQQQKKIVYNKELLLTESDAHSEEDEEQNEGAVELFGLKLNSKEVLDVVNSLPDRKKPVSKVAKQLEDLCEKVESAVENSSKPKVVPRKRVTELNHDAPHLDLRQENLESNMKRTKQALNPGLEQAHALPTVGKRQQPIINRAERSKTKGKGWFNLPATEITDEMRNELKIVQMRSVLNPKQFYKKNDLKSLPKFFQIGTVLPSHLDHYQEKKSKKKQSLASSLNNPKSAHRHPLVKMHPLQRTKTNFLKFYLPNPLKDRVLLEAPVPQPNAARYLGVLLDRRLTFPKHVTDIRTRLRAKLAKHYWLLCSRSKLSLSNKLTIYKQILAPNWKYGCQISGLACDSQIKRIQAIQNKVARLITGCEWFVRNTTLHRDLKLATVFDEINQHSSRYHDRLERHRNRLASALNRSRPPRRLNRRQPRDLITRSPLTRVSRG

SEQ ID NO: 448 - DNA, 13596 bp, DROSOPHILA
ttaattaatttattattaaaaagaaatttttaataaaatacgtaattaaagtaacaaaatggtctaacacttaactagaatgcaaggaaacggaccttcgtggaatattgagagaaaaacaaacaataatctgtggctcgctcagttcgtgaaaagacaaaaccaaaccaaccatttttgactatttcaaatttcacaattcaagactttcaaaactggttggttttagaattttcacctgaacgaccgcacatcatatggtatgattttaatagtaagtattttactttgatttttgtgttgtgtgtgctaaatttgagttgcaccgctagttcctacatttaatatttagaattgcatcctctggtcgtaaagctacaaatattaaactctattttcgcctcgtatgaaactagtctaggtttgtatctttgtatctatttgacctcagatccctcgtttctttcttgaaggatctgcagtcgactaacgcattcgaatcgcacttatcggtgttatgaactaagatttttgattcttttgaatcgttgtttccgttggttgttttttgttcttgggtttttctgttgaaacgctctgcacaattatatttagagctgctgcttaaaaagcccagaaaaatgcattacattacattccctaacaagaattacatagccagctttccagcatttcctaaaggatagtaactcaaaatgtgcatctcaggggaaagggatatggggatttgagatacacatttttaagttggtcgtcagagttgcccagcctttgaaaatgaagcaatattttcgactggagaaaaaagcctgttcagttacactttttcctatcgatatttggatatgcatttctttaaaggaaatgcatatatgatacaaattcctgatgtatttttatgctaacaggatatttttcaaacattgtgcaggacattttagagtcgacgaagccgaaacttttgtgatcttaagctgatttacatggctgatgagatctgctgcccctgttgatagagttgatcttgctgctgcggctgttgctgctgctgctgttgttgctgctgcggttggtactgctgctgctgctgctgcggctgttggtactgcggctgttgctgctgccccatctgctgctgcggcgccagttgcaatggcggcggtgtgttgccaattgctgccgcagctgctcgggcattttgctgcgttgtggcctcgttggtcttcaggaaatatgttattaaatcgatgggcagcgggaacacaatcgtcgagttcttctccgcagatatggtgttgagtgtctgaagtggtttaagcgcataaatcagtgttaaatcgctgctaaatccccgataagcaactcacctgaaggtagcgcagttggagggcagccggcgaatcgccaatcacctcggacgcctcgcgaagagccctcgacgccttctgttctccttcggcggcgatgactttggcgcgggcttcccgggcggcttctgcctccgcggccatggcacgttgcagttgcaccggcagacgcacgtccttgctgctcggtcgatggataaaatgagattagccggcgtgacttgcagattcggaaatacccctaactcaaagctagtgctattttttacccgcaaagcattttcactcagaaaaatttaaccccttaatttatcttcccctatatacagactagccattctaaatttatttttaaaacttaacgagaaactttatacaaaatttctattaaaagtgtaccatttacaggatttatttttttcagtgcacaagtgcgcacgacggagcttgaactttccattcagatttgtaaaatgtatctcggctcgcgtttgtccttagcagttttaaatttaaagctttcaactgaaatgtgcagagctgtatgctaatggcactcagctcaatggcacatctttaattcaaatgtggtcttggaaaacattttttacgaccagcgagccgtgatgttaaatttatgaaataatatttatatcgccctatttgtctcgaatttaaatcgagttatataactcataaacaccacaatttctcgcattattttattggccatttgaggaagttataaaccatctgatcaatatcacaatacagccggcgaagaagaagtgaggtgcataaatgaaatattcaacaactgccataaaatgaaaccgttttcatcgcaaatcggtaaacttttgcctgatgaagaagtggaagttttttttatttttttgcagaaaggggggcaaaaaaggtagcagccgcaacatagccacagctacagcaacaataatacgaccaacagcaagcgacagggcgtcaagttgttgcagctgtttcaacatggccaacacaccaacagcagcagcaggctcttccactccgccatattgtgttggccctgtatgagcatttgacatgccaacgtcaaaacacttggcactgcgaaaaagtgaagctgacaaagtagccacgtgccccctacccccctccacgagtggcaaataataaattataacaacagggcttcggtgacagcagacaaagggcagcaggcagctcccacaagcccacactttccgcccatcgggcagcgttattgtgataaatgcccggaaaaatggtataacaaataaaacaaataaccaacaaactcgagtgctgtggccttgcaggggctacgctaatgtttgtggggctcaaactagccaatttaaatgttatataagctggggattaggggagactcgagaggcactagtcagtagaaatgaaggggcgtactagagttttataacgttattctaggggttctctcgattaagtagttaaattataataattataataaaagcagtactatttgaaaaattagacacctctattatagcttaaaagactctcaatttcctcgttttcctcttcacaagtgacccaaagtgagaaatcaaatttgcaagcattgaaactaatccattccctttagagaaatcacccccaaaaagtagcactaaaaagcaaagctcacaatatcctttggagcacatcaacttcgacttggcgaggtgaaacgtttataacattacttttatagcttgacatagaaacttttccaggttgccactgcaagtgttgtgtgtgtgtgtgcatgggggggtaaaaaagctgtgctacttacatttccacacgttcaactttgatgccccaggcatcggtggcttcgtcgagttgaacctgtttatgattggaccaggccaggtagttgaggtgggtgcagttgttggttggtgagttgggttagacggttttgttggtttggaggcggatgagtcgtgtgagaaatagcagtaaaaatacattagtttttgtttacacgcgtttttcaggtcgttaacagttttgtttcggttttgcttttatttctttcaccctctccgctggcctagtgcatttttccgcacattgtttgtgggtcgtacagcatccttgaaaactaaaaatgcaacacttggcatcgtcgaggggagcgaaaggagccatgaagccgtacagccatggcaacttggcattttgcacatgttcgcacatcgacgtgctccagcggctgccgctgccgctgatggtgatgctcgagattttcgcctgattttgaactatttttcatatggcatggaaaataaataaataaaacgacccgttgccaggcttgccatagaatttgggttaagttggcagctgctaagatatgcggctcgtaactttaccaccatcgcatccccgatgccttttcaatttgtacattgcgatgaaaaaacgctttggctccgagattattttcatgccaggcacggagggcagacagacatatcgcctttggcagctgttaaatttcgcaattaatatttcgccagcggagtttcaccggaaaactttaaggcttatgctgcataattagaagcagaagcttaaatgtcatctgtcagcagaagggactggcatttattctgcgtggattttctcgtttcccttgtgcacgcaaaataaaatattggacttaacattaagataggacaggagattaaaatttaagacttctctggcctttttcacattataaactggagtgctttatgacgatgctttcgtaagtggcgcccaacgttgagcacacattcttgtctacggttgtacaagtggcgcccaacgtgaaaaagcaaaccttattagaattttgtaaagttggaaacagcatcaaatctttaatatcttctttagaacacattgtgtctaacatgaagcaatttagtttttcaacaagacttaatgaaagttagtagcattggaattttaaatacggctaattaattctccatgatttttccctacgtgtatttcattgtgccggtagactaagtaaattagaggaagcagctcgacgaagtcgctagattctttggagagggagagagtttgttggcgggccgggccaactggcaactgtcaactgttttgaactcacctgcattgtgccggaaatcgtcatacgctcgctgagtatctcatgcaaatgccgagttcccattgtgtttcgtagagtagtctgtgccagtagcctggtcgaatggtgagcattctccacgttcgcgatagagacggtcgcatttgatacccgatagtaaaccactgcatccaccgaaaccgtaacgctatcctttgtgagaacctacaagatgcagtgggtatttttttttttttttttttttggtttggggacatttgctttttgctttctctattgttcctgctattgttgtagttggtctgttagttatttttattattcgcttgttattgttgccaacaaacacattcacagaagtaaatatatgtgcgtatatacagatacaattcgtatacgagtatatatacacatgtgggtggtactttggtgataagctaagcattttgtatctgtatcagtggttggccagttgtgctgtgcactttatagccgacaaggagagtggtataatgcgaatgcacttgacttgaacgtcgctggcttcttttggccgggtcgcttttctctaatagaactaagtgcagggagtgcaaaacttttgccacagaccgacggaaggacatacaatggcgaaagacacacaaactcacaaagcacacacacaaaggcagtgctttttttttattttttcattttgattattgcatctgagtctgtgcatttggatttgcatttgcattttgcatttgaatgtgtatccgtgtgtatctgtgaatcccaaaagtcctaaagtcttttctcattgtttcgcattcagcgaactttatcctaccaatttgccggcacaagttttatgtgctcgagtgggattcgatcatctgcgcaatgacgatacatgaagcaaacccaagagcttggaggttacagtgtataagttaatgtacagatagtggggaagttaaacaaattatacaagtacacgtgtaaacggcacaaacgataagctgaaactgaagtacgaaactgaacagctaatcaaactcaagaaccaatagcaataaatcgtttgtagaaaaggtcttacattctattgggagaaagatagtgttgcaagggttttttttttgggaacagagagatgtggtaggaggtcgtgggcggtttatgtacaaatttccggttgcccgtgcttggattattccatcatgaccgcaagtttactggccctgccccaatggtgtcagactcggttcatgatgcccaaatcgaattctcgaaattttatttttatagtttctttcctctcggccaaaggcccagagttggctaaacttatgcccaactatctgccgcctctggcacacacaagtccatataccagtggtaaaaagttgctccctcaacgacggagcgctttacgttttatgacctgcccaaacattgttcggcgtagtctagaccgctttttacggcctctccacaaagctgaagctgtggtgtcaatgttgtttagtgtcatcgtttccactcggccagtttcgaggcttttccatgcccagactttaggcgctgaacttttgggctaggaaaatctctagcactttgcatgtgaatcaactgaaatgtgaacagcagcagctggaggaaaagctaaaagacaaggtcggaaatatttctgcaaatccagttatgcatttgaatttgccaagacttattctgtttgctatggttgtcatttgaaaattttgaactattgttggcaaactttaaagagagctcataaaggagttttatgaatgtctacacggtgcgtatacgttatatttcagtcataaagctttgttttatgatgttaattctgttatcctctttgcacagcattttattttattcagctaatttcatttgttttcatgccattcatctgagatattaaattttatttgaatctagggcaacagtgcgtatgattagctttcagcttgcatatttgcttgcaagcatgtcagagattcacacccttcagttaggtggctttgattactaccaagcgcaggcttaaacaaataatctacaaattcaattgggctttgtgtgcattctattgaaaaataccaggactttcgcactgcataccttctcataatcatgcactattcacttcattatgaatgccgttcgaacatccaaagcctgctgcctgtccatgaacaaagctctaaatcaatttggctcgaacaatggcttattatttcgaacaatagttggttggcttagttagggggggtggcgattgggcggtgggtggttggtggttggttttgtgttttaggtggagtggagtggtgctaagtgggtgggatacaagtcgctcgttcattgcattttacggaatagaattgaatgagcaaacgttcaggaatcaatgatgaaaccatggaaacaagagcagagatatagatagatagagaagggtaatcggaagtgaatgaaatgaaaattccaaacaatagtttatacactgtaacgcctaaactaatgagttttcaattaaacacaatttggttatttattacaatttgcacagtttatgctgcgaacttgtatcagcattgaaatttaagttcagctgaaaatgtccttcacttgctaacgactacaactgagtacaagtgataggtagagcgacagtttaaaagagtgacagtgagttttagttggaaatatagttctcatctttgagttccgagccttttaactagatatcgtatggtatatagtaatctatttcctagtctatggggcaactacagatgctgatgctgtgatgctgggacttgctctagctctagcttagttagcttaatatccatatactatatttaactactatatcatcactataactgctgcgaatctagcgcgttttggcgggcgggcggcgcattttagcttttgatttttgttggtctaatgctctggcttttggctttttgccctgcatgcgtgcaggagttgagttaccactttttaacagcttaaaccacgcaaaacacacatagatgaactcgacattatatgtatatatgtatattcgctgtgcgcatatatatatcgcatatatacaatgtgttcttgcattttatattgggaggggtgcgtcctttcgcttgtgctcaaacaaatcaaattgtaacgatttaattagttagttgtacaatacatattttgttgttgttctttttggacggggctggttggttatttttaactttttgggggggtggtggtggtggtgactatgtttgttaaaactaaaagctgttcgtgtgtgtttgtgagcgtgtgatctaaatgacgaatgttagatgtctgtgtgtgctttgtgtgagtgttatattccgtgtggtttacttatattttgattttatacttttgttttccagtccagtaccaacatttataaacaatctgtggtatctggtttttggtatggtttgtttggtttctttttcgtttaagacagttagaaagctttttagaatagacatttatgaaaatatatatttagcatgctctcaaaaattattcgaacgcttaaccgaacagggggagagtgggggtttatcaagtaagtgcaattcgatagtaaattttcttttcgtgtgatttgtttttgggggttttctttggtagttgtagtagtagtttttgttttcggttcttatataaggtttgctaaacaaaacttacgtagctcataaaacaaaatcaatatatatttagatatatagagacagacagaggtagttatatagtttatatatagagcttaggtaagatagacagtcagatagagacagagacatatagatagtttagacagagatagagagacagtgagagatcggtttgtgactgcttagcaggagagtgagcaagacagatgtagtagacagagagaggtatagatagacagattataattttttttttggtgggaggaagtgcaattgagaatgtttttgttgggtttttaatggggttccacttgcattttaagctacgcaagacctacaatttctgttgctttttttctgtgttccggtgttgctgtctttgtgtgggtgtcctgggacttgagtttgtgtgagtgctgcaccctgtgttcagtgaacaaacatttgacattcatttcttcatcaagttttctttttggacagacagagatagagacagacagtgagtgacaaacagagagggatagagagatagtggtggagagagatagagatagaggggttatgtgtgcgtgtgagagagagagagccaatgcgtaatgcgtacagttcttttgtggttttgccccgcccccgcccaccaattcgttttgcatatgcatatgtggtgctcggctgaacacagagagcgagacagatagatagagagaggtagaattttcagttgatatgcattctggcacttttgctttgaactattttttttatttattttctttgttttcaattttttttttttgggttttcattcctaattgcaggagacaatcagagctttaactatgcaaattgtaataacttgaagttaatgttcaaaagacatcaaaaactaaatacgattacgataacgattacgatacgattcaaaatgaaaagaaatccaaaatgaaagtgaaacgaaatgatgcgcaaaaatcgcatttcgtatgcacttaaaagggagattttcgggtgaatgtgtttgtaaatctgggcttgtatgtgtcttttggtgtttgtgaataataacatcgtcatcgagatggctttggggatttttttttcattttttcttgttattttttgttcatcctcgctgcagtggccttcatgcgatttacacaaaaaaaaaaaaccgaacaaactcaaatggaacatgagaatgctggcggatatgtaaaaaaaaacgaaaaaaataataaaaatggggtatttttgactttggtgtgtgagattctttatgtgagtgtgagtgagtttgctccatgtgacgtcagcaagatgttgaaaaagccagcggattgaaatcgaaccagttaccattacttctatcttaaaattcactttagcctcgcttttttcaccgctccatatttcatttaagtctgccaagtgaacaatgaaatatgcacaggtaaaaatgagaaatgggtgggatttttactgggttggcttgggcttgattgcgataaaagatcaagtaagcgaactaaaggatgaaaaattcccaaaaataaatggagcgcgtatctggatgagactcctgtgtagcactatgtgtgtgtgtgagtgagggcaaggtgagtcctacctctgtgtatgtgtgagttgtgggtgtgggttgagtgcacaccaatggcaataataataaaaattctgcaacattgttcaacttcaatacgacaacaagtaccatacaaagtatttaaaatatatatatatatataggatacaacaagactaccaacaacaacaacaacgagagtagagagagcaatgtgtatgtgtgtgcgtttgtgggtgttagaaccacaattttctctttcttttcgttttataaaacaaaatggactgcagccactcgaaatagtagggaaaaacaattaaataaactatatatgtggtaaacaaaagggggtttcttcactttgcacttgatgatgctgtttttgtataaaagtggttagaaagaggggttcttagctggttggaaagtggagatagatacgttaatagatatagatagccatagacatagatataaatatatgattatagaatgtatatagagggagagcaggaagacacacagatagagaggctgcattgggaagaaaatcaaaaccgaaaaaaaaacgaaacgaacgaagaagaaagtagaaactaaaagtaaacaccgtgacatgcgacgacaacaagaacgagggggaaaaaagtcaaagaaacgagaagacaacgttgcgtatgcgtaattcacgctccagttgcgcgtcctgtatccttgtgtctacatgtatgtgtatctgggtgtttgtgtggcttttggtacccatgtgtgtgggtgtcctgtcagcagaatccacaaaacaactcaggttccggctgtgctcagccaagcttctcttgcggattccgccaacagtgcccaaaatctgtatcttttcatctgtgtgatggtgtgtctgtgtatatttttatatcttttacttttggtcagaacacaaaacaagaaaatgcaaccaaaaaatacacatataagagtatatgtataaatatctcttgttaacaaacgtgtcggctggaataacttgtggcgaaagctaaaagtttaattggtttctgctttacttggcatcgctttaaaatgtcttgtgttagcgtgtgtgtttgtgggttggaggggacattttgaagtacataaactaaaaagatttccacttctggttaataaaacaacaacaacaacatcgaagaaggcagcatatgtttgtggctgccactgcaggttgcaacagtttttttttcggtatcaaccagaaccggaactgccaccggaacttacctcctgcggtggcacatcgtatgtgcgagtacgcaagtccacacgggcataggagtcaatgcagggcaggatgaagaagatacctgcaattacggttgaaatgctttaaacgctcgttaagaattacggactacactggctaacagggatataaaaattagagcaccacaataatttataaaaaaaatatacttctaagagacatcctaggttattcgatataaagacaattttgcttaatttttttattaatatattgtgaaatcgaatgttgttgattttacatgaatatcaagattaaatattttcaagaaaatataaacattttgttgtcctttgtttgtagtgcttcccttggtctagaaacttcttcacaaaaattatgcaaactagtgtcatgactgtgggagaagttcgcctcgatttggctaatctcttcctccctcggaatgggagcacaaaagcagagcacacggactgagagccgccccagagtcgctaatttggagcaagtgcagcaattaacacaaattcatgtcgcaggcgagcggcactaaaatttgcatagaatcgttaccccaccgctctcctgcagcccacccctatttgcacctgtgaagctgcagttctaagtactcacctgggcccttggcaccgccctgcataagacgacccaaacggaagataaccgcgcgctcgtactcctgcaccacctgcaaaatgtggcaggtgagtgaaatgttcatgaaacgaaattgaaacttgaggaaatgctagggttacaagccttaactaccctgttaatcataaaaactaacttcaagtataatagaatccagacatgtggtattaacagcttagagaagtgactgttaatcctgctgtatataaaacttaaaaaatttaccttttatctccttttttttactttgtgtttatatctgaacaaaatatgcttatccacaaggagcttaacattttaaaaaacttaatctccataatgcgcttattacttatcattaaaaaactgggtcatggttgccatagagatttacatagttttgctaacttaatttatgacaaaacagatttacttgaaactttaatatctgcttaagaaagagatcattcaaatgtatattgtttatgataatagtttgaaatagaaatcgttttaggtttgtaaaaacataggttattcgtttgaaaatgcttactttctattaatatttcataaaatttttaattaaaagaacactcaaaatatatgtattttaaatagaagcttaccttaaagcaaacaaagagactgaagggtagcgtcattatcacaagagccacggaaagaaatattagcaattttccgcatgttgatgccttatcgctgatttcctcgtccgctgcgagagaacgtggcgagaaaacgggagaattttcttataaatacatgtaacgtggcagaatggaatcaagtgctcaaagcaaatgctgcaaattaaggcttaagctataaattcgttttgtattttcctcgctttcctttgggctctgctctgctccgccgagaaaagagccaagactgttacatgaataatgcgctgagcatctgaagaaaataagaaaaaatccttaaacgaaagacctccgcatggcgcatacaaaaatcgcagacaatatgtcggaataaaaaatagtgagcagaaaaaaagggcattcttcattacgcagtactcgtattacttaaagtttggtcaaaaattgaagtttttgagagggatggttttttgggggggcaacaagtcgcccatttggcttattgatacttgagacgcgccataatttcgatgcggccctcgtcgcgtcgtaaaagtcaaaatgttgttcccgtggggagcttgaaaaaaactgtagcatacttaggtgcgctcaccaaaaaagaaaaggcggagacggaaatcgaaatacaagcaaacaaggagtgtgcatacattaaaaaacggaaatttctcagtaaatactcatagatagtagtcattatagttagatagttagagatagagttacacatagaaagtagagtatagctttgtaacaggttaaaaagtagctgtgtgtgtgtttctgtttatctgtttgattttggctgtaggatgtggggatctttttctgtttttttcttgggcattgtccaaattggtgcgacttacaatagagaaatccatgtgaatgttttgcttgtgtatctgcaagaatacgataaatcgaacaacaagagaaattaattggggggaaagcttttcggctcgatcagcaactagccaattggtgtgtttttttgttagattttctgggagctggttcttgtgtttcatcgtcttttttgagtgctcggcgatcctg

SEQ ID NO: 449 - DNA, 1223 bp, DROSOPHILA
cggacgaggaaatcagcgataaggcatcaacatgcggaaaattgctaatatttctttccgtggctcttgtgataatgacgctacccttcagtctctttgtttgctttaaggtggtgcaggagtacgagcgcgcggttatcttccgtttgggtcgtcttatgcagggcggtgccaagggcccaggtatcttcttcatcctgccctgcattgactcctatgcccgtgtggacttgcgtactcgcacatacgatgtgccaccgcaggaggttctcacaaaggatagcgttacggtttcggtggatgcagtggtttactatcgggtatcaaatgcgaccgtctctatcgcgaacgtggagaatgctcaccattcgaccaggctactggcacagactactctacgaaacacaatgggaactcggcatttgcatgagatactcagcgagcgtatgacgatttccggcacaatgcagttcaaaatcaggcgaaaatctcgagcatcaccatcagcggcagcggcagccgctggagcacgtcgatgtgcgaacatgtgcaaaatgccaagttgccatggctgtacggcttcatggctcctttcgctcccctcgacgatgccaagtgttgcatttttagttttcaaggatgctgtacgacccacaaacaatgttcaactcgacgaagccaccgatgcctggggcatcaaagttgaacgtgtggaaatcaaggacgtgcgtctgccggtgcaactgcaacgtgccatggccgcggaggcagaagccgcccgggaagcccgcgccaaagtcatcgccgccgaaggagaacagaaggcgtcgagggctcttcgcgaggcgtccgaggtgattggcgattcgccggctgccctccaactgcgctaccttcagacactcaacaccatatctgcggagaagaactcgacgattgtgttcccgctgcccatcgatttaataacatatttcctgaagaccaacgaggccacaacgcagcaaaatgcccgagcagctgcggcagcaattggcaacacaccgccgccattgcaactggcgccgcagcagcagatggggcagcagcaacagccgcagtaccaacagccgcagcagcagcagcagcagtaccaaccgcagcagcaacaacagcagcagcagcaacagccgcagcagcaagatcaactctatcaacaggggcagcagatctcatcagccatgtaa

SEQ ID NO: 450 - protein, 382 aa, DROSOPHILA
MTLPFSLFVCFKVVQEYERAVIFRLGRLMQGGAKGPGIFFILPCIDSYARVDLRTRTYDVPPQEVLTKDSVTVSVDAVVYYRVSNATVSIANVENAHHSTRLLAQTTLRNTMGTRHLHEILSERMTISGTMQFKIRRKSRASPSAAAAAAGARRCANMCKMPSCHGCTASWLLSLPSTMPSVAFLVFKDAVRPTNNVQLDEATDAWGIKVERVEIKDVRLPVQLQRAMAAEAEAAREARAKVIAAEGEQKASRALREASEVIGDSPAALQLRYLQTLNTISAEKNSTIVFPLPIDLITYFLKTNEATTQQNARAAAAAIGNTPPPLQLAPQQQMGQQQQPQYQQPQQQQQQYQPQQQQQQQQQQPQQQDQLYQQGQQISSAM

SEQ ID NO: 451 - DNA, 3108 bp, DROSOPHILA
ttgtacatgctgccactgggaaattaaagtttactcaataaaacatattcacaccttgcaattcaattgaattataccatttgtataatataataatatggtttctatcacaataatgggcttctggaaattggtagtagattatttaaatagaaataggtaaaaatagttttttgtatgatttggctgtttaagagtttaatctctataaacattctcaaaagctgcctaataaaagtcaacaataaatttgcaaacataagataaagaacggaaataacatttttctataacacaaattcacacccttcaattgtgcattacttatttatttacaacctccgtcgtataaatgcttgagaaatattatctattgtaagataattagggtcgttgatttgaaaagtatttggccatatcagcaataaacaaaacctcatgccgctttctccacaattttttttaatcaaagtgcaaacaattgattcgcaattcgttgactaatgacattggtcatcgggctgaagctgattaacactttgggccatatataaacacatcgattggatagttcgcgggctccaacaatttggcaatgttttattaacccaattgcagtccacatttgcaacacgctttgagagaacatacagtattatttgcttggaagcgaaatatttgcatacgtcgtgagttttttcccaccggagattctgggaaggtttcggatatatcgttcatgcctggatgaaccgctagcttcattagggcctgtgcttatccgagcaattagagcctcaattttggcagagatccccgggtagacctggccacccagttcatcacttcccgcagcgtgtgaattggaaatgcaaataaagagacttcggatctgatcagatcacatgactttaattgaacttggcgtgtcataaatattcgagtggcgggatgagttggagatgaggtttacagctagagagttcagaggtcgaccggcttaaacgcgagccgagagaatgacgggatcggcctccacctcggccaccttctccttcaacttctcctcgtccttcttcagcttctgaatgggctcctccgtggtggtggtggtggtggtggtgggggtggagctgctcacaatggtcaggatagtggtggagctcttgtcagcctcctccttctcgacagcctttgtggtcgtctccaccttggtggtggcttcctcggtgtttgtcacagatccagccagggccaccgcctcctctacactctcaattggcgccgtggacgtaatcgatgttttggtgatgctaatcttggtctgcttgccatcgctgctgtcgttattcgagtcctccttgatggtggccgagatcagcttggtgtggtgcacctggaaggtgggaatcagtggcagggcaccaccattgtgtggctgcacggacacatgatcgataatcaagtgggcgggtacaccatcctccccatcgggcaccttcctggtggtctgcagcagaatcttgcgtgccaggccatcgtcagctgtggccggcgtggactcatcggatcgcttggtcagcgcgtgctcctcgtcctcagtgatcgcagccggggattcgggcttcacctcttccacctcgctgcccggcgcactggcctggtgcagactcaaggcggacgtgaacagactgtcctccagatctccgatcaggccgtggaaagagatctgcttcagctcggcatcgggattggcctgcacctgccgcttgaccacatcctgtttctccagcggctgaaagcccgagaagatatcacccaaatcgaagggtgcggccaacgaagaagccgccagggtcgccagcaactaaaacataagtagaaaagtgaacaattagataagttcagcaacaacatgactgagctttaatattataattctcaattctcaactaggtggacattccgtagtttctttggtgtaaccacagtgattaagttcatatcttaaagtccttgaaagatcttcactcacggtggttagcaacgtgcacttcatggccactgctactgctgctttggtccggttggttgtgttcagctccaagctcagatcggaaataagtttacagcccagtggacggtgagtttttaaagtttttcggcgcccgcctaaccgccgactgaaagttgcgactaagctttattataacgttcagttagcacattaatcgcttggtttgccgaacttgttttggtgcctgcgcgtgctactccctcaatgtttgggcccaaaccaattctacttgtcattcgtccgtgttctgtttgttgtccagcttcacttattcgacactgtaaaaaaatctctggaacactggaccattcctcagatctaaaatataggaatgcaatgagtgtagttttcaagtgagataaatcatactcagcgcataatccttctatctagttaacacatcttcatcaaaatataactcctctttcaaattaatgataatattttgagccttcatcactcaaatttgtatcaattagtttaaatatattccaaggacttacatgatgtgacccaggagttttaaaaacacatcttagagcggcgctgttaagtccaagtttgattgtcttaattgcgcaaattaacatatatttactaaaattaaatttccaagaagccgatcaaaataaaaacaagatcagtctgaagacgttgaaaggccaaaacaagcgcacagaaagagagaccgcaaattattttcggaatatgtatgtatcttcgagatacttttacatccctgggatgagtgcactttgttccaattacaactgcgcctctttaacacttcataattagagcggtcgccatgagatcaccggggcacaaagttgatatgcgaaatgtgcaaattaatttcaaaaattttccgctgaaacaaaggtccatgcagaggtgaaaacttgttaaagaaacgcgcctggaaatcgatttgcctccatatcgtaaaaccgcaaaccgttcactgtgcctccgatttgcgggagaaagactggcgaccaaaaaaaacgcagaatccggccaatcatgaa

SEQ ID NO: 452 - DNA, 940 bp, DROSOPHILA
cttggagctgaacacaaccaaccggaccaaagcagcagtagcagtggccatgaagtgcacgttgctaaccaccttgctggcgaccctggcggcttcttcgttggccgcacccttcgatttgggtgatatcttctcgggctttcagccgctggagaaacaggatgtggtcaagcggcaggtgcaggccaatcccgatgccgagctgaagcagatctctttccacggcctgatcggagatctggaggacagtctgttcacgtccgccttgagtctgcaccaggccagtgcgccgggcagcgaggtggaagaggtgaagcccgaatccccggctgcgatcactgaggacgaggagcacgcgctgaccaagcgatccgatgagtccacgccggccacagctgacgatggcctggcacgcaagattctgctgcagaccaccaggaaggtgcccgatggggaggatggtgtacccgcccacttgattatcgatcatgtgtccgtgcagccacacaatggtggtgccctgccactgattcccaccttccaggtgcaccacaccaagctgatctcggccaccatcaaggaggactcgaataacgacagcagcgatggcaagcagaccaagattagcatcaccaaaacatcgattacgtccacggcgccaattgagagtgtagaggaggcggtggccctggctggatctgtgacaaacaccgaggaagccaccaccaaggtggagacgaccacaaaggctgtcgagaaggaggaggctgacaagagctccaccactatcctgaccattgtgagcagctccacccccaccaccaccaccaccaccaccacggaggagcccattcagaagctgaagaaggacgaggagaagttgaaggagaaggtggccgaggtggaggccgatcccgtcattctctcggctcgcgtttaa

SEQ ID NO: 453 - protein, 296 aa, DROSOPHILA
MKCTLLTTLLATLAASSLAAPFDLGDIFSGFQPLEKQDVVKRQVQANPDAELKQISFHGLIGDLEDSLFTSALSLHQASAPGSEVEEVKPESPAAITEDEEHALTKRSDESTPATADDGLARKILLQTTRKVPDGEDGVPAHLIIDHVSVQPHNGGALPLIPTFQVHHTKLISATIKEDSNNDSSDGKQTKISITKTSITSTAPIESVEEAVALAGSVTNTEEATTKVETTTKAVEKEEADKSSTTILTIVSSSTPTTTTTTTTEEPIQKLKKDEEKLKEKVAEVEADPVILSARV

SEQ ID NO: 454 - DNA, 2669 bp, DROSOPHILA
tatcataataagcttgtaaaaatgtatgtacatatgtgctatgtaaaatcaaggcttaactgcttatcaataaaacaatcaagttaaccgaaaatgatttggatcatgctgacaaatgttaatcgaaaataaaggtcaattggggtcattggcgataatgttaacggcgaaagtttaaagcatgaggttttttaaattaaatttgcattgacgcagaagtatcgtctgaaatgtctagattcggaatatttgttaggctgtccaggtcgtataatcaccgattgcagctgacgatttttttaaggcattttcctgctgttagttggacttattcaaagccaccctcatccgataatataagaaaactacagtctaggctccaatgcacgcaatcctgcctaaccacccctgagtacaatcccgtctggagtagtgatatggtgagctacgacaataaaagcaaattgaactgcgcaatcaagtgcgggttaagtaagtacacacacaatatctgcacaagtctccagatcggatcgttctaaaactacatccacttgtatcgttgtaaaactacatccatgtctaatctaaaccggcccggacgagtacgctagttatcctgatttggaatatatgtatatatacaagccgtaaagaaagcacttgccttacttttagtaagttaaatttggagctgcacatatgtattctcctgaacatgtaagtacctcaggtacaattcgcactaaatgttaacataaagacatgtatgtatgtatgtgcatggataaatatgcatgtgcatattttttttaaaacattgttcacagaatgcgtgtactggttttaaattccaattcctgaatttacggattttgctaacagtcgaaagcgaaaggcgctttcaagtttcaaagaatcaattgcgttaatctggtaggcaaccggcctataaataggcgtcactgggtttccggggacctcagaagtgcctggtagctcaagcgaagcggaaccaacaaactcccgaaatggattggatcaaaatatttggtagatgttgtgacgacttgagatcagcgatattaacttagactctagtttcaggtcttgccctgctattgattgggatggcgcagtgctacccgcagttcgatagcgaaaacccctggttgaggcctcggcaacccactgaacctacgatatctccgaatgcggggggcagtaccccggccaacgctgctccaccaaccacccagtcaccgcgctatttcgcctgtttccattcatgcccggccaccagcgagtacaatccaatctgcggcagtgataacgtgaactactacaatgaaaacaagttcaactgcgccttgaactgcggcctaagtgagtatataggctgcgtgcctccccagattcctttctaaaacgatgtatgtacacatggatgccttcttcattatagacatccggaaggtgcacaagggaatttgtcagacttagtctagatcgcttgaattcagttcacttgtgtatgtaagcatgaacgtattgcaaatactctattcatcgtctgatcgatgacatcagcgaatataaatatgtatatatgtacgtacataaataaaaacttagcgctgttactggtatatggacggtgtatgaccccaaaaaactcagaatctcttgcttccaatcagtcacagtcgggttgcttgtctgttcgcctgtagcgctaaagtctccatcatctattacctatttattgaggctttgtaaaattaaagaaaatggtttacatatgcagtaagtcgaggccatacattaatatatacataagatgtatatgtacatattgcatatatacgtaccttgcgttcatcccactagcagctcttgtggtgttgatctttcccgtcttgttgttgggtgcaccatgggaagggtcgcatcctaagtctcaggtggaatacatcagcaacgacaagagagttgattctggcttcgccaaccccaatatcgtgcccatcacccagccgtcggtcgtaacgcaaacagctcctcctccgccgccaaattccaaaaactttgcatatagtccgatgacgcagagctggaccctcattgcgccaggcgatccgctgcccaataatgacaccctcgtctggaaccagagcaatgacaaatggctcactcgctaagcaatgcaaccatcgatggctttgctttaatcattgtgtattactattgaaataaatataactaattcactgtaggacttagcggtggcgacggatgtggctggaggccacagactgaccctgctgccgcagccggcacaactcgtcggtactgtagttcagcttgcgggttgcgttttctgagaaacgctcgaacttggccactaggtccaccagttgcgtcttgatcgcctgcacctcggcgagcactgcgcttaggacattagcctgattcttcatctgtactgttccctccgcctcctggcggaactgctgcggcacatttgtagcggatcgggggcgcaaaagctcgtgcatgtgaaataaattctgtggagtcttctttgtggtccccgtggcaggttctggcttgaggaaatccgtgtggagcggctgctgctgacgctgtagactgcggctgaaaatgtt

SEQ ID NO: 455 - DNA, 542 bp, DROSOPHILA
tcaagcgaagcggaaccaacaaactcccgaaatggattggatcaaaatatttgtttcaggtcttgccctgctattgattgggatggcgcagtgctacccgcagttcgatagcgaaaacccctggttgaggcctcggcaacccactgaacctacgatatctccgaatgcggggggcagtaccccggccaacgctgctccaccaaccacccagtcaccgcgctatttcgcctgtttccattcatgcccggccaccagcgagtacaatccaatctgcggcagtgataacgtgaactactacaatgaaaacaagttcaactgcgccttgaactgcggcctaaacatccggaaggtgcacaagggaatttgtcagacttagtctagatcgcttgaattcagttcacttgtgtatgtaagcatgaacgtattgcaaatactctattcatcgtctgatcgatgacatcagcgaatataaatatgtatatatgtacgtacataaataaaaacttagcgctgttactggtatatggacggtgtatgacccc

SEQ ID NO: 456 - protein, 114 aa, DROSOPHILA
MDWIKIFVSGLALLLIGMAQCYPQFDSENPWLRPRQPTEPTISPNAGGSTPANAAPPTTQSPRYFACFHSCPATSEYNPICGSDNVNYYNENKFNCALNCGLNIRKVHKGICQT

SEQ ID NO: 457 - DNA, 5652 bp, DROSOPHILA
aggtgatgaggcctcacctgtcgcatcactcattcccaacgaaatttttaattagtttattttgttttttgctttattttcacgctgtcggtgcctggtgggaacatttctcttttcagctatgatccacaattcactcgccaccggtcacatttgtgtcacacgtcgccgaactatgaacccacctgcgactttgaggagattgtgaccgaccacgaaggagcttttacccaaattgaaatttaatcatacactaatttagcatacctgtcgctcatccagagagccttaccacatctgctaatgacttaatcatagcgaacataaaactatcttaattgtaatgcgtatttaagtttcaatggttatgctagttggattcttagctcttccaaagcagtgtttcacaagtatatatcctaaatgtataagtagtctggttctcaaactgtgtcgtacatactcatgcgctatttttatgggtcgtaggtttttatgctgcagctgcttgagtgtcgaacccacaaaagtcttaaaagttaagtgttcggcgggtcagctgctgtttattgctgtggttgttaggcttccagatacggtgtatcttttttttggctcacttcctcgagaatcatttcaattgtgttaaaatatctttaaagagtaaaaatatatttcaatttacacaccttacatactttatacctatacagaactcttagataacttaccatgcttaattcttgatacatatttattccaaagtgccacttcatttgtgtaagaaaaataaacattctgaagcttcggactttggaagctcttaaagttgctcatttattgaaatacaagaggcttctcttattggcactttatccaaacatgagcatttacagtgaaaacgttctataatgaaggctttccagcaacatttattacgatttttatttcggtgtgttgcaatcttcacccattgcagacattaaaacagttgcattaaatgtttaagagcagctgacatttattttaaagttatcttttacaattatactttatactatactatactttaaattcactttggcttagtggacttcgacctatcctatcattattgaatagcgaacagaacatcaattatagctaatccttagcttagatgataccaagaaatgctgagataaaacgaaaatatttcctaggaactgttgagagaacttattcgagtcttaggcgtattcgacttatcaaatacccgaaatctaattgggggctcattcaattacttttcggcatttgatacgaaagtgatctaaccatagacttagtccgagttgatgatggatgccatgacatggtcgtttaagaatagtttacaggcttcgagctcttagtcgcgtgtgtcttaacttagggctaactcagcttggctttggatcactggacaatacgtgttaagtctatgggtgacaggcagtcgcctccctagaatgctgctccagccgcctgctgctccaggattgattgccaatttagtactgttccaaactgaaaatgtgtcacaaaagacgggtcataatcgattgcagctcaaaagcaaataatgtcacaacatggcaacaacaagagttacagctcgacaaggcaacgataagaggagcgcatgcatacactgacaaaaatatacgcctagttagtcaactgaaaagtaattcaaggtggagccgaaaagagcaagccccttagatcagaaatatttttacaagtagaaatgttacgttaatgattatcggagtaaagattattattattattattattaagtaagattaaggcgaacaaatttgaaaacgatatttacacaaatatttcaaaacttgcttttggtcgaatattgatcaattgttacattcaaaaacgatgaaaacaagcatataattgggaacgaagtcattgttattaatatataaaataaaataatcataagaaacttttagaacgctagaaacgtttgactcggctgcttatagattttacagccagagtgtttcccgattagaggacacggcatttcgctcagtgttctagagaggtggcagttgcagttggaacaagtgaaacgtaaagcgagcagcagcgacgtttggagcatgcaaatccaatcagcccgagggcgtacaaaaggacatgcacgcgtgtatcatgaggacttagacacgagaccagacctcaaggaccttaggactaccctgtgctttaccgcggcatcagcttggtgacctccgagggcacggggttgtggtccgtgagggccaccgactcggttatggcgctgcgcagtccgccctcgtggtggccggtcatgaagtcggtggccgccagaccgccttccccgccggcggtaccgctctgggcgccgcctggccccagcagcttgagttcgcctttggagagttcggcgcccaacttgcgacgcctgcgcgccgccgcctggacgttgcagcctgtcgtgtgaccgttaagagcaacattagtgtctgagcaacggcagagcagttcttgaaattctttacggaagttgtcgttgagccagccgtagagcaacgggttggagcaggcggagctcatgccgatcatgtggcagatggcgtagcggactagcatgctctgagtgaccggcgagcgctccatgtccgcgtacaggttgaaaaagttcagcggcagccaagaaacgccaaagatgatggcgatgctgatcagtaggcagttggtgcgcttcatccgccgcccccgctccaccttccgctgagcggaggacgcctgcacagccaccacggtgatgcggctcttcagcttgttgtagatcccgaagtatgccaccgagacgatcaggatgggcaccaggtattgtacgcacagcgagaagatcgagtagtagaagcgcccgttgcgacttggccagtcctcaatgcagtacgggatcgtgtcctgcaggccgatctgctgcaggagtgccggcgtgtctgtgttgatcagctccttgtagacgaacagcggcgaggccagcagcagtgccagtgcccagatccccgccaggatcgtcaccgcgcccacgaactgcaggctgtcccgcgtggggtacacgatcacctggaagtgaggttagacggttgttatatctcagggcttggagtcttattacccattcgcactgtaaattatacttagtgaaaatacatcttcaactgggaatttataagcaaatataatttttaatcgattgctataagagtgtgacgtacaattaggtttggtttctctaaccgtgcaattactattctttaatcaccaaaaacattatattaaagctaacttataagtctttctttaagtcaactggccactcgccttaaattgattaaaaaaatcggattaatttatatgcgtcctacttctctactttaccccagaacagtccggctatttataatcaatacctaataatccttctgtttataatccatcaaccctttttaatggtctttgtttcgacaccataaaaataggtttaatcgtgggttaagcccttatgtaatcgccaaatatttactgagagcccatcgattttccctcaacgtcaaatttaatggttacacattgaaggtattcacctcattaatatccgaacacgatttgccccattgatggccccatttacatactaacgttggcattaaaaaaggctcgagtagcgactaacctgatatctgtcgaaggcaatggccgttatggatattgtcgacacgaaaatacaaagtgcctgcagcatggcaatcgttttgcacaggatggagcaggagccgtagggccagtacttggacaggatctccatcaaggtcagcggcatggtgactaggcataaaagtaggtctgaaagtccgctcggatgagactcacacttgctttggctctcagtgggaatggcaactcacccgatatggccaggttgaggatgaacagattgcgagcagtgcgcatgatgggcttccggatgacggctataacaaccagggtgttgcctagggcgccgaagacgattagcacgccgtacatgctgatgagcatgtggtaccaggggctgtccaccgccctgttgctcaggaacctatcgataagcaccgggtccagcggcctgctcccagtctcattcagatccgaggtgttgatggcagtggtgttgagggcgtgcaccgtgcccaggtcaaggtagtccagcggatgccggtcgtccagatagcgcacgctgttgctgctgctggcgtatccactcagatgctccccatctgccagctgggcgggctccgtctgattcatgctgattatctagggaacgaaggaggcaaacagggtctcattatttcccaaatccgcggcacgaaatattcaattgtcagggggcaaggaagcagcaactttgcgtgccacatcacgtatgatttatgagattggcttgctgcacacaccacactttctagcgagctgcgaatggcaaattccactggcttgcttaatgctttgtggcttgaaatacggggcaataatcgtataaaaagtttgtttggtgccagtaggtggcccagcaccaaaggattctatgggcatacgacatgcatgaaagttctgacgcctcactctctcacttatttgcagacactgggagaaaaacagtgtaaccttacgccagtgtaaccttacgtcatacgttcattattttaaaagcttttggggtattaactaaatcataattattataccatttaagtcctattaaattacattgttaaggatgcaattgcatcaaatgtattgctattagattaaagtggttttctgttcaaaagattcaagaaaatctttcaaaactttaaataaaaattggtaaatagacaaacggatagatacaatggttgtatacattttaagttaagtttgttgttggacacttgacaaaagtctaaaagctaaaatgcgattagagaactatctatgtcaatgtaaaatcatagtgcttatcgcctcatcttcttgctaaatccatttcccagtgagccattttaataattgaattcagatctcgaggcttgataaaacttcaaacgcccttggcattcgcctgttaatacccttctgaacacagacaatggccttgactcctgggactcgaatcaactcgactctgaaattatctgctacaggataactttggcaaggaaaagtaattcgctttgttttcaagtttcgaaagtcccttttttcgaaaaatatcttcccatttgtagtcaatttatgcaatatcccagtgccgagcttcagttagtcggttgttttccctcgtaaatattcatgcattacccgtcgccgtaatttatgcagcacatcaaggcgagacatgcatttaattggaaaaagtcaaaagtgccgtttcctccggggaaatgtgcgtttgattttgatgcctggtatttgttgccagatcaagatattccggtgtcgagggacagccgtcagacccatatccagatacagatacacaaacagaaacagaaacaggcaggttataaatgacgacatttgctaaaaataattgtgtaa

SEQ ID NO: 458 - DNA, 2145 bp, DROSOPHILA
aatcctttggtgctgggccacctactggcaccaaacaaactttttatacgattattgccccgtatttcaagccacaaagcattaagcaagccagtggaatttgccattcgcagctcgctagaaagtgtgataatcagcatgaatcagacggagcccgcccagctggcagatggggagcatctgagtggatacgccagcagcagcaacagcgtgcgctatctggacgaccggcatccgctggactaccttgacctgggcacggtgcacgccctcaacaccactgccatcaacacctcggatctgaatgagactgggagcaggccgctggacccggtgcttatcgataggttcctgagcaacagggcggtggacagcccctggtaccacatgctcatcagcatgtacggcgtgctaatcgtcttcggcgccctaggcaacaccctggttgttatagccgtcatccggaagcccatcatgcgcactgctcgcaatctgttcatcctcaacctggccatatcggtcaccatgccgctgaccttgatggagatcctgtccaagtactggccctacggctcctgctccatcctgtgcaaaacgattgccatgctgcaggcactttgtattttcgtgtcgacaatatccataacggccattgccttcgacagatatcaggtgatcgtgtaccccacgcgggacagcctgcagttcgtgggcgcggtgacgatcctggcggggatctgggcactggcactgctgctggcctcgccgctgttcgtctacaaggagctgatcaacacagacacgccggcactcctgcagcagatcggcctgcaggacacgatcccgtactgcattgaggactggccaagtcgcaacgggcgcttctactactcgatcttctcgctgtgcgtacaatacctggtgcccatcctgatcgtctcggtggcatacttcgggatctacaacaagctgaagagccgcatcaccgtggtggctgtgcaggcgtcctccgctcagcggaaggtggagcgggggcggcggatgaagcgcaccaactgcctactgatcagcatcgccatcatctttggcgtttcttggctgccgctgaactttttcaacctgtacgcggacatggagcgctcgccggtcactcagagcatgctagtccgctacgccatctgccacatgatcggcatgagctccgcctgctccaacccgttgctctacggctggctcaacgacaacttccgtaaagaatttcaagaactgctctgccgttgctcagacactaatgttgctcttaacggtcacacgacaggctgcaacgtccaggcggcggcgcgcaggcgtcgcaagttgggcgccgaactctccaaaggcgaactcaagctgctggggccaggcggcgcccagagcggtaccgccggcggggaaggcggtctggcggccaccgacttcatgaccggccaccacgagggcggactgcgcagcgccataaccgagtcggtggccctcacggaccacaaccccgtgccctcggaggtcaccaagctgatgccgcggtaaagcacagggtacttttgtgacacattttcagtttggaacagtactaaattggcaatcaatcctggagcagcaggcggctggagcagcattctagggaggcgactgcctgtcacccatagacttaacacgtattgtccagtgatccaaagccaagctgagttagccctaagttaagacacacgcgactaagagctcgaagcctgtaaactattcttaaacgaccatgtcatggcatccatcatcaactcggactaagtctatggttagatcactttcgtatcaaatgccgaaaagtaattgaatgagcccccaattagatttcgggtatttgataagtcgaatacgcctaagactcgaataagttctctcaacagttcctaggaaatattttcgttttatctcagcatttcttggtatcatctaagctaaggattagctataattgatgttctgttcgctattcaataatgataggataggtcgaagtccactaagccaaagtgaatttaaagtatagtatagtataaagtataattgtaaaagataactttaaaataaatgtcagctgctcttaaacat

SEQ ID NO: 459 - protein, 475 aa, DROSOPHILA
MNQTEPAQLADGEHLSGYASSSNSVRYLDDRHPLDYLDLGTVHALNTTAINTSDLNETGSRPLDPVLIDRFLSNRAVDSPWYHMLISMYGVLIVFGALGNTLVVIAVIRKPIMRTARNLFILNLAISVTMPLTLMEILSKYWPYGSCSILCKTIAMLQALCIFVSTISITAIAFDRYQVIVYPTRDSLQFVGAVTILAGIWALALLLASPLFVYKELINTDTPALLQQIGLQDTIPYCIEDWPSRNGRFYYSIFSLCVQYLVPILIVSVAYFGIYNKLKSRITVVAVQASSAQRKVERGRRMKRTNCLLISIAIIFGVSWLPLNFFNLYADMERSPVTQSMLVRYAICHMIGMSSACSNPLLYGWLNDNFRKEFQELLCRCSDTNVALNGHTTGCNVQAAARRRRKLGAELSKGELKLLGPGGAQSGTAGGEGGLAATDFMTGHHEGGLRSAITESVALTDHNPVPSEVTKLMPR

SEQ ID NO: 460 - DNA, 4274 bp, DROSOPHILA
agatatgacgcctcagaatctcagccaataaaggccaatttacaatattttattggccgttgtgcttatttgcgtcgctgtatttggtttttgcacgagatgaaaaatagatatattcagcacaactacagcaaatgttaaaattagcatatgaacatatacagttttctctgtttttggtcgattttggcaaccggtaaaactaagccaagccaagccaagccaaatcaaatcgaatcgttgccaattaggccaagttgaggttgccaattgctttatggtcaagatcaagtgcggaatgcgtgggcatctggctaattttgaggcttcgctgtggagaaataaactggaaaatttcccggaactcgtgtatctgtagagctgcttaatctttagttccctggatgcggccccatcaactgaagagcagcataatgggattgataaggtcgcccagctgcggatttattgttcgttcttgtttgtattgtattgcagcggccacttgttgcactatccaaggttcattggaactcacatccccagagacctttcaccgtagggtatctggtgtatcttctgctgtagctcgtcgacattataaatccgcttcagagccttcgctccccatcgaatcaatcaaaagccacagcaacgaaattacctcacatcacaatcgttttgcggtgaatacttttcccaattcccatctcccatctcccaatttataattaatgatcgctccaacgttttgatttgcgtcaatttatttgacaaattgtgtttggggccaagacacgcttggatggtcttgctagattttccaaactgaaaaataaattagttggcagctgtgcgccgggctaaaaaggtgcaagaaataaatagatggtcaacgttcatctaaaattgttcgaatgcccaggcgcagctgtgcatacagtgttttctctttattaagaatatacgataataaggtgtgtgtgtgtgtgtgtgtgctgcatttaatacagttttcatttacaacatatagtacatttaacgataagtaatactaccatacaaattcatgtttattcataagttaatacgtacaatcagcatattagtttagcagtactgttctctgtgaatgagatgcttcgcaatttgaattcggtttcctgacacaactaacgttttttatacaattgattgggattctaagtacaggcttcgattgccaattgcgatttaggttggaaagtctttactttgatttgcttaagtttccgtcgattaaacaaacaaaatgcgggcgttttcctgtggacttgggggacttggcaaggtctccggtggctttgtttcctggacaaatgcctggttgggatgggagttcacctggttgttccatctgaccctgggggatggcactataaaacgttccttcaatcccaccgtgttcctcatctggtttcgttgatgtacgtggtctcttcgatacacgaggcctgctcttcgttgaggagatcggtgatggagtaggcggacagggggcgtgagaacctccgctcggagagaatatcatcgatgctggtcaccggcgagaggcactggcagtccgggcagtcttccggctcctcggcactccgggcgatcacctggaatatatcctccatgctggtctgcaggcacagggaaggcggcttcctcaggagaaccggagatcgggagtgctccagttccggggaactggagagcggggaggccgtggagggcgtggcagaggtaccacgggttcgtcttggaaccggcactgccatgggctcccaatcgttgtggctggatgccttcttggagggctcctcctccagttcctgccacaggtgcatcgtctgctcgatgtgctgcagctgagccgagagctgactggcgatgctggttttccgcgagacgcagggcgtcgagtctctggactcatcgcttgctccgaacatcctgatctcgggaagcgttatgggcgcaacgcggctcacctggcgcgtgttgcccgtctcaaacatcctggctatcttggtgacgttgctccgcttaacgggcgctggactaggaggtggtagctccgctttgggcgccacctgctgacgcttgggatacacccgggtcactggcttcctggccttgggcttcacctttccggcgacctgctcctggcccagaacgtggcagcatagctctgggccgtagcagcggtgaaacatgttcctgttggcctcgtagtccgcgtccgcgaagcgtttcatccggatgagggacttcggcagcagggtgactaccacgtaggagacgaggaggtaaggtagccattccgcatacttccaggcggtttccacgtattccgtgtagtccgtcatgctcgctttgttatcacaaattgcaattcgatttgcttggcggtatttattaacttttacctcgcttttccgctgatatcgtttttttcacttttttttatattgtcgataagggcaaagttttattatgacatcacatcactctgcaaggggattggttaaataatgggatatttcatttatttattcactgctggcagaacggaacacattgcaaaatatttacttggagtttttatttattcagcaatgtcttccgtgactggtttatttacttagttcgcgtttttctttttgtgtccacaaaaatatatgtgtgtatgttctgaaaattatccagatctcattggacgttcagtttctaaagtgttttcaagagctggtcattacacttcgaagattttgattctttcttttcaaatatttttaggtatttatgtattagtttcttgtttatccaagctttgttttcgggtttgcaatgttttgtaccggttcagcttgagttcaatttgttttgaataaaaagagcttggtaagacatttaaaaaattatgagtgacattcaaaacattgcaaactcctatccaaagtttcgtagttttaaggataacattctcacacacccacacacctttcttcaagtggtgtccactgcgttttgcactttgcgactgccgcttgcattaatatttatatttatatttccattagtgcgtatttttatcttggcccgacatctgatagcccgagctttatttatttatttatttatttagcagctatttagttttttgcgagctgtttcggatcggattcttttgtttcttcagccgctttttgtattccgttgcgcctcgcggtcgttctcctctcttcggctcctcttttcgaactcagacgtgaacgcgaatgtcgatgcgaaactcagcggtgcgatgcgaaactgctccccaaagcggggagcttttgctctcccccacgctctcttgctcgctcggctgctctctttggcgagcgcagtcgccttaagctcgctcttcaagagagagcaaacctgctgcacttgcgcagaattcttcttggcaatctgatgatgctgttgcgctgttgttgttgttcgggctgccattgttgttgttctggttgggtcaagtagttggtcatgtctgataagagcgtgcgcgtgcgagggagccagcaaatgggcaactttcatttcaaagaagttcttttagcaaaccttaaccctttgcgaaatttatactgtatgtataacactgacataagtattataatttttgattctgagttttgtagttcattagtagcatgttatatttttcagcttcttttaggaatatatctctttcaaaattagtgtaaatatttgctgcggtttccacatttccactgcgctctgtatcatcttcggttttattatatttgcctggtttatcagagacgcgacatatgcaaacagctcacgtaggtaaataaaccaaatatagaaaggcacgatcaacaacaacaaacggagcaactggggtgcctctttgtgatttatgggaattaattgctaattgttgattttgcgccccttagaaatttgtgtcatctttttgtaaaatcttcccatctaatatagacatttgcatcgcgactagatgtgaaaacagatgcgcctttcggatttcagaacacattttgtgtcgagcagagtgaaatacttatttctgaatcatttgcgtgggttctggttcttttctacgcgatttgtaatggccaaagagattgcggtcacttcggagatttcatgtcaaatcttattttattttgacagtcgcactttgagaaagttttgtatttacaggtggg

SEQ ID NO: 461 - DNA, 1783 bp, DROSOPHILA
aagagaggagaacgaccgcgaggcgcaacggaatacaaaaagcggctgaagaaacaaaagaatccgatccgaaacagctcgcaaaaaactaaatagctgctaaataaataaataaataaataaagctcgggctatcagatgtcgggccaagataaaaatacgcactaatggaaatataaatataaatattaatgcaagcggcagtcgcaaagtgcaaaacgcagtggacaccacttgaagaaagagtgatgtgatgtcataataaaactttgcccttatcgacaatataaaaaaaagtgaaaaaaacgatatcagcggaaaagcgaggtaaaagttaataaataccgccaagcaaatcgaattgcaatttgtgataacaaagcgagcatgacggactacacggaatacgtggaaaccgcctggaagtatgcggaatggctaccttacctcctcgtctcctacgtggtagtcaccctgctgccgaagtccctcatccggatgaaacgcttcgcggacgcggactacgaggccaacaggaacatgtttcaccgctgctacggcccagagctatgctgccacgttctgggccaggagcaggtcgccggaaaggtgaagcccaaggccaggaagccagtgacccgggtgtatcccaagcgtcagcaggtggcgcccaaagcggagctaccacctcctagtccagcgcccgttaagcggagcaacgtcaccaagatagccaggatgtttgagacgggcaacacgcgccaggtgagccgcgttgcgcccataacgcttcccgagatcaggatgttcggagcaagcgatgagtccagagactcgacgccctgcgtctcgcggaaaaccagcatcgccagtcagctctcggctcagctgcagcacatcgagcagacgatgcacctgtggcaggaactggaggaggagccctccaagaaggcatccagccacaacgattgggagcccatggcagtgccggttccaagacgaacccgtggtacctctgccacgccctccacggcctccccgctctccagttccccggaactggagcactcccgatctccggttctcctgaggaagccgccttccctgtgcctgcagaccagcatggaggatatattccaggtgatcgcccggagtgccgaggagccggaagactgcccggactgccagtgcctctcgccggtgaccagcatcgatgatattctctccgagcggaggttctcacgccccctgtccgcctactccatcaccgatctcctcaacgaagagcaggcctcgtgtatcgaagagaccacgtacatcaacgaaaccagatgaggaacacggtgggattgaaggaacgttttatagtgccatcccccagggtcagatggaacaaccaggtgaactcccatcccaaccaggcatttgtccaggaaacaaagccaccggagaccttgccaagtcccccaagtccacaggaaaacgcccgcattttgtttgtttaatcgacggaaacttaagcaaatcaaagtaaagactttccaacctaaatcgcaattggcaatcgaagcctgtacttagaatcccaatcaattgtataaaaaacgttagttgtgtcaggaaaccgaattcaaattgcgaagcatctcattcacagagaacagtactgctaaactaatatgctgattgtacgtattaacttatgaataaacatgaatttgtatggtagtattacttatcgttaaatgtactatatgttgtaaatgaaaactgtattaaatgc

SEQ ID NO: 462 - protein, 315 aa, DROSOPHILA
MTDYTEYVETAWKYAEWLPYLLVSYVVVTLLPKSLIRMKRFADADYEANRNMFHRCYGPELCCHVLGQEQVAGKVKPKARKPVTRVYPKRQQVAPKAELPPPSPAPVKRSNVTKIARMFETGNTRQVSRVAPITLPEIRMFGASDESRDSTPCVSRKTSIASQLSAQLQHIEQTMHLWQELEEEPSKKASSHNDWEPMAVPVPRRTRGTSATPSTASPLSSSPELEHSRSPVLLRKPPSLCLQTSMEDIFQVIARSAEEPEDCPDCQCLSPVTSIDDILSERRFSRPLSAYSITDLLNEEQASCIEETTYINETR

SEQ ID NO: 463 - DNA, 4193 bp, DROSOPHILA
ttatagaagtctacgttttgcgatgacttacacatttttttaagtggccttcggttggagtcataacaatttctcaatctaaagcaagccgcctggcttgccccagcaaagcggctgctgcgctttcttttggaaaatgtggtccaggccagtcgactcctccgacggtgttgacatctccaaacaccacagccttctcggctactcagttgcagctactagtatcacctctttggctttggtattgactttgaattggccaagccaatcggaggaagttagagccgtagtgaagtgttataaaaagttaaaaaacataagcattccagggaattttgaacaatttggtttttataaataatcacagccttaaatatagataatatatatttaagcagtaccctagatgacgaaataaatacatcatatatacacgttacaatcctgtatgccagcagacaatagcttagataaaaaaaaatttcaatgtcaacaatccagaagctttaaactccggcaacatacagggcttgaaccaatttggattatgtttaaaaagaaaagataatctgtagccacgggaacttcgagctccagatgatttattgcgattttcccaagctcaatggcaaccctcgctgagacaagcaaagccaaaaaacacgccagtccacttttcctcagcttcttggcttagcttttcattgccttaattaaaagctgctttttatatttatcggcttcggcgcgagtaaaagcagagcaagtgcagaatttgaagactcgttttgtagtgaaatttttgccgttaattggaaacagctctagacctctggcaaaggaaactatggatggcatccttcctgtcccagtgcgaaattcctgtttattttacaaactttattttatttacaattagcgtaataaatattcttataggaatgcaacaaggccgaaggccgaataaataacaacgcggaggtggttggagtcctcgaagttagctcttctgaggctgttgctcggcgacaatgtccttgccggagtttcgtccatagtatccgttgtaggccgcctcctgcggatccccgaagctgacggagttgccgccaacctgctggccctggacctgctggccctggtagctcttgctgtagtagtcggtgtagggcttggcaaagcttggctcctggcggtagtaaggtcctggagcgcctccatggccgccctcaaagtgctcgtggtggtggtagtaggtggcagctcccactccctgggggttgtactcggggaaggtgttcttgccgccaaacaggcccgacagtccaccgccgaatgctcctccaacaccacctggcggacggcacagcttgaagtaggcgaacagaccgggcaggacaatagcggccaatccaaggatcttcttgaggccagcgattccaaggatgaagggcaggaagagcagcaacttcagcttgaagatcttcagcaccagcagcaggggaatgatcatcttcttcaacttcttacgcgctgcaatgggttatatcaaatttattattgtaatgcttgaaacctcgaggaaatgttaagacaattaaattctcaatcggcctagtattatttttataagttcaatgttccatgtcaaatttcaaatgtcattgcattaggaaaagtaaattatgattcaattaaacattaacaaatgtattgcattgaaaatataaattagaaataattttaaaattaaaaccattcctgactcatttgcatttttatctatttcggatatttttatccgcattcaaatttctctttaactcaacataaataataatatgtagacttacagaaatgtccagcccgctgtccatcatcaatgaggtccagttcgccatcaatgtcgtttccgatgaagcgtgcttcataacgaccggcttcggtgagttcctcgggccactcgacctctagagccgtggacttgatgaagctgcaaggaagcggaaacatgtccgcgaatgagcatttacattttcataaaaatctcatattttatgcaaaagccgggccaactttgcggcccaaattaatttgcatccggcacgagccgcagtcatttggctaattgtgacagcttaccgttcggcccttcggagtccatatttcagcagctgattccactcgtcgtcgtcgccacgtggctcctcggagtactcgaatggctcctgcagcaaggacctctgctgggtttctggcagtcgcaccacacgagcaaagtcggagagcctggaagttaaagggattcttgattagccttctcgtcaagtggtgtgtaacgcaagaaaaatatgcctataaaagtacgccttaacaaaccatttccctctagatgaaattcaggtcgagaaactatattttttacgttgagattgttaaggaagccattcttttcaagttaccgttcaagggaaaatatgaaagaggcatcactaggagattcctcttccccaaagacagcaagcgattattccgtttatagttgtatatacaatcatagcgcttacttgtactggtccttgaagaagatctcgtcgaaggtgttgagcgcctgagtcttgaagcactcggagaggtcgccgccgaggcagttgctgttggtcctggccaggaagggatcgttgtcgttgcccaggccaaagatgctgagcagggaggagcgtccgcgttcctcgccaactcctggctgctgtgcctgtggaaactgttgttgctgctggggttgctggatctgctgagccggtggctgcggtgcgtagacttgctggatgttgttggacgactgctggtccggaagccgaagaccttcgccagccaccagagtggcgagggccagaaagatgagcgctctcattgccatggctgtaagcaggagaagatgaaatgacttaaacaaagctactggcacaagtttcgttcgagccgctgaagttttctctcaatcacccgattattccagcatttttggctccgtctcgcgatgtcaaaaaagaagtgtatataggcaactatttggctactgcttattggcttaacggatcgactctccacttaaaactgacacacttttcacatggcttagcggtcccgatggctcactgtgcaattaaccgctcaaacgtaataactctcgctttcaagccaacttgaccacggcttaccactctttgctcttcggtgtttactgctaactcgactttggtttgcttaaatttctcgtggagctttctgcacccaaaaatacagataaacccacagatgagttggacccaaagtgaaatgccggcggaccggtttgccggcttaaccctttgtcggcaatgaggcgggaaatgctcgtaattgaattccgtgctagagcgcataaacagcgggcctaatgtgctttaaaaaggtcagctcagtctggtcaagcagaagtgcagtgaggcgttcctaatgcgcattattgacagtggttcgcatactaacggtaggcgataaaatgtctacgagatatgtactaactcttggtcataacaaattatgtaaaataaaaaaggattcgcaataaaatatctttcattctttgccatttctttatatttcgtaactttaaattggatatatagagacattaaaagagtttcaatcccaaaaaggaaatttccattcgacatgtggcccaaccactgtattaagatggacgccagctgaaatcgcacgcgaaaagttcgttatgcttcaggggcttttttggccagttgcttttactttcgttaggctttcgttatttgggccaaatacagaccgggactgggactcatcagcgcgacgcttgtgtggcaatccgctagtggtataggcgaaactaacaaagaattcggctcgcccaccaactttaaagaacttcaatgtccacgagaagaaaagtttgtgggacgccaaagagtatgcaacgaaaaacgctttatggcgcgaaagtgaaaagtttatggcaatggaaagtcaagcacccgaaagcacacaataaattgcggatgtttatgaggaatcgtaattggatgggaatgggtgcggaagatttatggattagtgaatcattatcgcttcacggcgaatattttgcacagtcggagtggtctttgcatggc

SEQ ID NO: 464 - DNA, 1362 bp, DROSOPHILA
cgagagttattacgtttgagcggttaattgcacagtgagccatcgggaccgctaagccatgtgaaaagtgtgtcagttttaagtggagagtcgatccgttaagccaataagcagtagccaaatagttgcctatatacacttcttttttgacatcgcgagacggagccaaaaatgctggaataatcggccatggcaatgagagcgctcatctttctggccctcgccactctggtggctggcgaaggtcttcggcttccggaccagcagtcgtccaacaacatccagcaagtctacgcaccgcagccaccggctcagcagatccagcaaccccagcagcaacaacagtttccacaggcacagcagccaggagttggcgaggaacgcggacgctcctccctgctcagcatctttggcctgggcaacgacaacgatcccttcctggccaggaccaacagcaactgcctcggcggcgacctctccgagtgcttcaagactcaggcgctcaacaccttcgacgagatcttcttcaaggaccagtacaagctctccgactttgctcgtgtggtgcgactgccagaaacccagcagaggtccttgctgcaggagccattcgagtactccgaggagccacgtggcgacgacgacgagtggaatcagctgctgaaatatggactccgaagggccgaacgcttcatcaagtccacggctctagaggtcgagtggcccgaggaactcaccgaagccggtcgttatgaagcacgcttcatcggaaacgacattgatggcgaactggacctcattgatgatggacagcgggctggacatttctcgcgtaagaagttgaagaagatgatcattcccctgctgctggtgctgaagatcttcaagctgaagttgctgctcttcctgcccttcatccttggaatcgctggcctcaagaagatccttggattggccgctattgtcctgcccggtctgttcgcctacttcaagctgtgccgtccgccaggtggtgttggaggagcattcggcggtggactgtcgggcctgtttggcggcaagaacaccttccccgagtacaacccccagggagtgggagctgccacctactaccaccaccacgagcactttgagggcggccatggaggcgctccaggaccttactaccgccaggagccaagctttgccaagccctacaccgactactacagcaagagctaccagggccagcaggtccagggccagcaggttggcggcaactccgtcagcttcggggatccgcaggaggcggcctacaacggatactatggacgaaactccggcaaggacattgtcgccgagcaacagcctcagaagagctaa

SEQ ID NO: 465 - protein, 388 aa, DROSOPHILA
MRALIFLALATLVAGEGLRLPDQQSSNNIQQVYAPQPPAQQIQQPQQQQQFPQAQQPGVGEERGRSSLLSIFGLGNDNDPFLARTNSNCLGGDLSECFKTQALNTFDEIFFKDQYKLSDFARVVRLPETQQRSLLQEPFEYSEEPRGDDDEWNQLLKYGLRRAERFIKSTALEVEWPEELTEAGRYEARFIGNDIDGELDLIDDGQRAGHFSRKKLKKMIIPLLLVLKIFKLKLLLFLPFILGIAGLKKILGLAAIVLPGLFAYFKLCRPPGGVGGAFGGGLSGLFGGKNTFPEYNPQGVGAATYYHHHEHFEGGHGGAPGPYYRQEPSFAKPYTDYYSKSYQGQQVQGQQVGGNSVSFGDPQEAAYNGYYGRNSGKDIVAEQQPQKS

SEQ ID NO: 466 - DNA, 4135 bp, DROSOPHILA
acaataattcaatgcaagttcttgtttatataaatccaactttctttgcgttcgcatcggtcgcgaaatggaactacacaccaaaatatttattttaattataataaatccaaatattttcatatgtgaatcaaagcaaatgaagcttttgctaacaattccagacgactattgtgaaacatattgtggtggcatctgtaatgatacagtcgcttcaaagacttgcgacagagaagcttatgattatattgccaccaatgaataccatttaattatgagagacggacatttagaggttaactggaaaattcccgatccaaacattttcatcataagtccgatcagcaaagaaaaccgtttgaaattgaatgagctaattgtatccgatacaagttacccaatacgtgcagtggattatcttcggcaacttggtgtggagacagtaacacgtttcgaaaatcaaataaattcatttaaagtaattgaaagagatgtccattatatcaatggacctaagtctcttaaaataattattcaaagtaacctttacctcaatgaaataatcgaatatataaataagacaacggataatgtgaatgaaattattatcaacgcatataaaacggttgaaaaccagcaaattgcgctagacaaccttatttttaatgggaagtcgcatttaagatcacttacatttattggatttcaaattgaaaacttatccacgaaaccatttgctcagtttattaatctcaaaaggatggttcttaccaattgcacggttcggaatttgacatttttaaggtttgtaaaattgattaaaattatagcttcctatacattgctctctcattaagttgtttgcaattcagtataaataattaattttctattactaactctatttagaactcttcaaaagagccttgaacatttggagctggatatcgacaacgaggtggatttaaaatactttacaaacttttccagtctcaaatttatgaaggttaggaactacattcccaacaagaacttcacagctttaatatgcacacacaaaaattgtaattttatccgtggaatcaatgggttagaatgccctaaactttgccaatgtctctatataattgatgacttggaattaaacatagactgcagcaatctgggtcttttgcaaattccgcccctaccaattccaagttatggcggtgtgaagttgaatttttccaataattctctctctcagttgccaactatgactttacctggatataaattggttaaaagacttgatgtttcgcggaataggttaaccaacttaagtatcaatcaccttccagcgaaactggactatcttgatgtaagcttcaacgaaataattaatatgggaaacgatgtaatcaaatacttaagaactgtccccatctttaagcaaacaggcaatcaatggactattcattgtgatgacaagccgttattaaatttctttagacatctcaaattgataatacggatgaaaagtgctgaaatgaaacctatgttcttgcactcgttaaccgaattacctaaggggtttttgaagtttttgggaaagcacttcatttggctaggtgtgagaaaacaagaatactatttgatcaatgaggaacagttgttgcaaagtatgcatcgcaaactaaacaaccttaatacaattatgagcatctataagtatatggaatggcttcaccgaaaactaatattcgtcaatcgggagtatgatctattttatattcgtcaaatggcagccccctgtcctcataagtgcgagtgttgttatagccgcgattcacttattttaaaaatagactgcaggaataaatttgtatataactttcccgatatcgttgctagaaatagtcgtcttatgtgaaaacaaaatatgtctagtcctatggaactgcatttatctaaaaataatatatcaaacataaccatcgcaatgctaccaaaggaactaaggtttcttgatctacgtttcaataatctcgttaccctggatgacaaagtcctgagttaccttaagaaaaattcaattaaaactaaactttctgggaatccctggaattgcgactgtaagtcgagatcagtcctttccattttgagagatcacgaaccccttgagtatgacgtcacgttgaaacgttgcaatatatctccaacggattgtccagatgtttgtgtctgctgcttggataacttgacatggccatcatttattgtcgattgcagaggagaaggacttctacagatgccttcactttcaagcagggttacctatgtggacctaaggaataacaaccttacggccctgtcacagaagaatcgttcttctatcgagaacagatcgttaaagctgcatttgcttgacaatccctggtcttgttcttgcaacgatatagaaaagataaatttcatgaagagtgtgtcttcaagtatagtagacttcactgagataaagtgcagtaatggtgagaagctagtctcgattaatcagcatattgtgtgtccatctgacctcttttattatttggcactcgcgatctccctagtggccacgatcattgccttaaactttttgatatggttcagacaaccggtcctggtctggttctatgagcacggtgtgtgtctcagtctgtcagccaagcgggaacttgataaggacaaaaggttcgatgcctttctggcgtttacccataaggacgaggctctgctggaggagttcgtggataggctggaacgtggtaggcccaggttccaactctgcttctacctgcgagactggctggcgggcgaatctattcccgattgcattggtcaatctataaaggactcgcggcgcattattgtcctcatgacagagaactttatgaattccacttggggtcgcctcgagttccgactggccctccacgccacctcacgcgatcggtgcaagcgtctgatagtggtgctctatccaaacgtgaagaacttcgacagtctggatagcgagctaaggacctacatggcatttaacacctatctggagagaagccatccgaacttttggaacaagctgatttactcgatgccgctactaccaagctacgttgactaggacattacattattaatttcaataagaaacaaaaatatataatttgttgtctcccacacagtttattttttgagatttacatagttcccggaagtattccgacaggtttccgggtcaactggtttagcagcaaggaccgcaaccgcaaaaactgctggtgccgccgcagcaaggtccacatcctccgcaaggaccacagcaggggccacacccaccacagcaggggccacatccaccacagggtccgcatccgccgcaggggccacagcaggggccctgataaatcatattaaaagtattcactcgacttacgagaccgataaatacataccccaaccaaaacgtaattcgggttgacgtacatgtacatgattttgtttcttaaaagatatttcccaaccggaatcgaaaggaaccgaaaatttaggtgttaactattgaaggtggaacggagaactgactgaatgtgatccaaattagccgaagcttcatttgacagcagtcatgagaatttcaaggctaatatgatccgacaaattatattcattattattattatattctggtatcccaaaacccataatctagttagctatggatattttcgacagttgtcaaattcatataccaacttgtgagtcaggtttccatcattcttattttggttctcggcctgtaatcatcgaaatattttttcgtcctaagttatttctttgttaggttcaaagtgagtatttctcaaagtgtaagcatgcgaagttttaacaaaatttttcttagaactttacggaaccatcatgtgttgcggaccccttggattctgcggaccctgtagcccgtgcggcggtccttgcggaccttgcggaccctgtggtccttgcggttcctgctgtagtccttgtggatcttgctgtgcgccttgcggcccttgcggtccttgcggtccttgctgcgggggctgtggtccatgcgggccttgtggaccttgctgtg

SEQ ID NO: 467 - DNA, 2135 bp, DROSOPHILA
atgaaggttaggaactacattcccaacaagaacttcacagctttaatatgcacacacaaaaattgtaattttatccgtggaatcaatgggttagaatgccctaaactttgccaatgtctctatataattgatgacttggaattaaacatagactgcagcaatctgggtcttttgcaaattccgcccctaccaattccaagttatggcggtgtgaagttgaatttttccaataattctctctctcagttgccaactatgactttacctggatataaattggttaaaagacttgatgtttcgcggaataggttaaccaacttaagtatcaatcaccttccagcgaaactggactatcttgatgtaagcttcaacgaaataattaatatgggaaacgatgtaatcaaatacttaagaactgtccccatctttaagcaaacaggcaatcaatggactattcattgtgatgacaagccgttattaaatttctttagacatctcaaattgataatacggatgaaaagtgctgaaatgaaacctatgttcttgcactcgttaaccgaattacctaaggggtttttgaagtttttgggaaagcacttcatttggctaggtgtgagaaaacaagaatactatttgatcaatgaggaacagttgttgcaaagtatgcatcgcaaactaaacaaccttaatacaattatgagcatctataagtatatggaatggcttcaccgaaaactaatattcgtcaatcgggagtatgatctattttatattcgtcaaatggcagccccctgtcctcataagtgcgagtgttgttatagccgcgattcacttattttaaaaatagactgcaggaataaatttgtatataactttcccgatatcgttgctagaaatagtcgtcttatgtgaaaacaaaatatgtctagtcctatggaactgcatttatctaaaaataatatatcaaacataaccatcgcaatgctaccaaaggaactaaggtttcttgatctacgtttcaataatctcgttaccctggatgacaaagtcctgagttaccttaagaaaaattcaattaaaactaaactttctgggaatccctggaattgcgactgtaagtcgagatcagtcctttccattttgagagatcacgaaccccttgagtatgacgtcacgttgaaacgttgcaatatatctccaacggattgtccagatgtttgtgtctgctgcttggataacttgacatggccatcatttattgtcgattgcagaggagaaggacttctacagatgccttcactttcaagcagggttacctatgtggacctaaggaataacaaccttacggccctgtcacagaagaatcgttcttctatcgagaacagatcgttaaagctgcatttgcttgacaatccctggtcttgttcttgcaacgatatagaaaagataaatttcatgaagagtgtgtcttcaagtatagtagacttcactgagataaagtgcagtaatggtgagaagctagtctcgattaatcagcatattgtgtgtccatctgacctcttttattatttggcactcgcgatctccctagtggccacgatcattgccttaaactttttgatatggttcagacaaccggtcctggtctggttctatgagcacggtgtgtgtctcagtctgtcagccaagcgggaacttgataaggacaaaaggttcgatgcctttctggcgtttacccataaggacgaggctctgctggaggagttcgtggataggctggaacgtggtaggcccaggttccaactctgcttctacctgcgagactggctggcgggcgaatctattcccgattgcattggtcaatctataaaggactcgcggcgcattattgtcctcatgacagagaactttatgaattccacttggggtcgcctcgagttccgactggccctccacgccacctcacgcgatcggtgcaagcgtctgatagtggtgctctatccaaacgtgaagaacttcgacagtctggatagcgagctaaggacctacatggcatttaacacctatctggagagaagccatccgaacttttggaacaagctgatttactcgatgccgctactaccaagctacgt

SEQ ID NO: 468 - protein, 303 aa, DROSOPHILA
MKVRNYIPNKNFTALICTHKNCNFIRGINGLECPKLCQCLYIIDDLELNIDCSNLGLLQIPPLPIPSYGGVKLNFSNNSLSQLPTMTLPGYKLVKRLDVSRNRLTNLSINHLPAKLDYLDVSFNEIINMGNDVIKYLRTVPIFKQTGNQWTIHCDDKPLLNFFRHLKLIIRMKSAEMKPMFLHSLTELPKGFLKFLGKHFIWLGVRKQEYYLINEEQLLQSMHRKLNNLNTIMSIYKYMEWLHRKLIFVNREYDLFYIRQMAAPCPHKCECCYSRDSLILKIDCRNKFVYNFPDIVARNSRLM

SEQ ID NO: 469 - DNA, 4076 bp, DROSOPHILA
tgaaggtgggatagcaatttcaagcgttatccttcaaaaataaaaataggatattttataaatgaagaatgagagtgctgagaaattcaattagagtggaggtgtggattttgcaataaactccaagttggttgggaatgcgttccacccttttacactgaacttaaaaacacattgaccttctccacccgggaatttattacatcagtacaccttgcttccccaacaccacaaacctctcatatccaaacccgtggctaaaaaatggctcccggcaccaattacttgcctgattaacgatggaactcgtgttgcagccactcccgcccggcgacccctgatctacaactacgtgcaaccacacatgccgtactaccgctcctgaggcgagaattagccaattagcagctaccaaagacccttgggaggaggaggttgctctgctgccataggacccaaatagcggacacgttgcatcggaaaaacagcctagcgagctggcgtattgttattatttattgaattgtatttaacttagttaaacctggcgcacacatttagtctagttcttgtctctgtaattagcagtcgaagtgctacaaaaaatacaaaaaaaaaaccattaaagaattgaacgcaaagttgttcagaaatcatattcgcttgcgtgcgctttttatttatgcaataaatattaataaataaataaattacgtgtaagtgtaagtttaaataaattacaaacgatagaatgagcatcattgagaaaacggaaacggaaagtgaaagtgtgagggagaattgcaattgcaatgagatgcgagagagagagagttagtgggaaacatagtaattctaagggaaagtggagaaagtctacaagagatcaataggaagatagagaagagagtgagaggagttcccccaagccagcggaaaagtgttagaggaaaacccaattcagttcattcctgatctaatgacatacataacactagctttattgcgccactttccccggctgttggccactgtaagccatgttttgggcctgctcctgctggtgctgcacctccttggccaatatatcggcgggcacgtctacaagtccctccacgaacccgtcaaaggccctcgaccacccggagctatagctgtcgtggtgggatggcacctccacgatggttttcttgctagagagcagcttcttcagtgagatgatcaccgccagcagcaaggcgattttcgagacaattagagccttgccggccagcaggaagagtcctttgagcagaagcgctcccaccatgcccgtcttggccgccatcatcatcagcagtggccccatgttcttcatcttgcctcgcccttcctgcaacgcctccagggggcgcactgatacgcccaaattcagactgccctccggatcgctgttgatcacaaagtccgtgttctctgagaacttgtatcgcagggagcgcgaacgaatgaatttccacagcttgttggccatcagaagggcgaaggtctcctcatcggaccccatagagcgtgacagcagctggttgacctccggatcatctggtaccattgagatattcctgcaaggaaacgaattcgattacggagaaaagtttaacgccagagcattttattctaatatttttcgtagaaagaaatgtagtgaatatggtctctaagcaaggattctaagaaatagctaaaaagtgtttttttttttgccattcttaaacgccagtaacattctaatcttagtcattaaaagttctttaaaccttggtttttaacagtttaacactgtcgtttaaaaatggtaaaaaaaactacgattttttaacatttaagttgtttctccaaaaattggggctgcagagaattttgtatggttagctttgtaatcatcgatacttttggttccttttaatgtaatttagtgcttttacaaaaactgtagtactatctaatcagatacttttaggtggtataatatttgtattgttgttattttccaatattttccgattttgttttaatattttctcaattatttgtttgctgtttaaacaattgttactcacccgttttctgtgaccttgaatcggtcgccaaggtcgatacgggtgttcaggtacagatggttcatcacaatagacatcttgaccatcttacaggcgcgatcgtcttcctgcctgcaattttgcttaagcttggccaacagaaagtcctcaatgttctttcgttcgctctccgatatcttaaaagaatgataggtgacatttcttgatgaattatgaaatttataaaagtcctaaatatgtgcatccttccttatgatatccacatactttacgtagagttcaaaagtataaaaatagatttcataatcgatctataagaataatggctatttcagcttaaagatttattatgcaattaaatacgttagctactagacttcataaatctttttatcagaaatctttgaattcctcaatgcggaatgccagttaggcactgaaaaggcaaacagttttctgttttcttcttgtattttgacccttgaagaattccatagcggcactggcgacgaacttttggataaagcaataaattcggacaggaaaaaaatatgttattgtctttatggtgctattatccttgacactgacaattattaccggatccatcgcccacttttgctacttcggcaacctttttccggacttccaggacatttccttaccgtaacggtgccatcgcgccgtttgctgccgcgggcggaaacgaggacgaagcagaacgccaggagagcgcagaccttaaatgtttgcatcgttggtctcgttgatttcgggctatttaagcgttctcagttgttgcgctcagtttttcttgggttacacttggattgactgatacacacactagcacacgtatatcctggccgtatcctctggctctgatcacacacaatcacactctcacagtcgcccgcgtcttcgctctactagaagtgctacggtcttgctgttgacatcgtcgtcttgatagaaaacctaatgcgaatttcccgccagtgatttcgaatttatatgaaaagcggccaaaagcaccgcaaacacaatacaggtctctgccgcagtcggcgatgactgcgacgccggcgcctgtttttgcaggcacgagatgtggattttgcacctggaactggtccccaaaaagaccagctccttagccgagagccactggttcggccagtttctggggactctcttatggccttgtccccgactggccgcatcattctgccacttttgggtatgactttgtttatgtttttcccctgcgacaagttcttctctgcctttgttgtctttgccagcgtgggtcgtcaacaaaaacacaggcagtcgaaagtaaacaacagacctaattcccaacaacaaagaggccaattttcccacacagcatcgtacgcagaggtgtggtgtggtaaagggagggagggggtcggaaaagtggcagcgaattatcagtgaaaagccgagtgccattgacaacacgcatgcaaacctgaaattttttcagttgcgccaattagtcaaaggctcttcattccacggaacacttttagccagtgccgtcactgagggggatctagagagcccagattattaactaagaaattatttaaccaaataagttcgtaatgaaatttcgaaattctaaatttaaagggaatttctaagtaacgtataaataagttgttttcttttcagctactattgtaatgcatttcgatagctgctcttcgtttttcatgtacaatattacatttttcaacctagccgtgaagttattaaatgcggggttgcggtgaaaactcttggttttcccaccgccgagagaccttcgttacaagtcatttcagtacgccgcacgcgggctgcatttatccggggccttcttttagacgaaactgattaggagcaagtttaatttattgcatctattacggattcagccgagtcccgcgggcgtgacgacccaacagg

SEQ ID NO: 470 - DNA, 1089 bp, DROSOPHILA
ttttctatcaagacgacgatgtcaacagcaagaccgtagcacttctagtagagcgaagacgcgggcgactgtgagagtgtgattgtgtgtgatcagagccagaggatacggccaggatatacgtgtgctagtgtgtgtatcagtcaatccaagtgtaacccaagaaaaactgagcgcaacaactgagaacgcttaaatagcccgaaatcaacgagaccaacgatgcaaacatttaaggtctgcgctctcctggcgttctgcttcgtcctcgtttccgcccgcggcagcaaacggcgcgatggcaccgttacgatatcggagagcgaacgaaagaacattgaggactttctgttggccaagcttaagcaaaattgcaggcaggaagacgatcgcgcctgtaagatggtcaagatgtctattgtgatgaaccatctgtacctgaacacccgtatcgaccttggcgaccgattcaaggtcacagaaaacgggaatatctcaatggtaccagatgatccggaggtcaaccagctgctgtcacgctctatggggtccgatgaggagaccttcgcccttctgatggccaacaagctgtggaaattcattcgttcgcgctccctgcgatacaagttctcagagaacacggactttgtgatcaacagcgatccggagggcagtctgaatttgggcgtatcagtgcgccccctggaggcgttgcaggaagggcgaggcaagatgaagaacatggggccactgctgatgatgatggcggccaagacgggcatggtgggagcgcttctgctcaaaggactcttcctgctggccggcaaggctctaattgtctcgaaaatcgccttgctgctggcggtgatcatctcactgaagaagctgctctctagcaagaaaaccatcgtggaggtgccatcccaccacgacagctatagctccgggtggtcgagggcctttgacgggttcgtggagggacttgtagacgtgcccgccgatatattggccaaggaggtgcagcaccagcaggagcaggcccaaaacatggcttacagtggccaacagccggggaaagtggcgcaataa

SEQ ID NO: 471 - protein, 288 aa, DROSOPHILA
MQTFKVCALLAFCFVLVSARGSKRRDGTVTISESERKNIEDFLLAKLKQNCRQEDDRACKMVKMSIVMNHLYLNTRIDLGDRFKVTENGNISMVPDDPEVNQLLSRSMGSDEETFALLMANKLWKFIRSRSLRYKFSENTDFVINSDPEGSLNLGVSVRPLEALQEGRGKMKNMGPLLMMMAAKTGMVGALLLKGLFLLAGKALIVSKIALLLAVIISLKKLLSSKKTIVEVPSHHDSYSSGWSRAFDGFVEGLVDVPADILAKEVQHQQEQAQNMAYSGQQPGKVAQ

SEQ ID NO: 472 - DNA, 4157 bp, DROSOPHILA
atgacttgggagtgtctgttttcactgcctccacaatcaccgggaatgactttgcgtgttcctacgagtgcgtctggacaatagctattgatttaaagcgtgacaccttcaatggagaactacttaggaatttcacttagcaaaacaattcaaaaagaagagtgagaagagtccacgattgggcccgaaatgaagttgtaaactgcggtagaagcagaaccaagcagttgtgtgctgagcaagcaaatcaaacaacgaaacgccaaccaaccggccccaatgatcatagaaaagtgcttttaagccattcggcgacacattaattgctgacgtatttgtgcacgaagaaagccaataggcagtcaatgtgcacagcatccatgagccagcccccaaagtgggtcatattcataagtaaagcacctatcggcccatcagccatcagcggctgtaaagtgccgttctgccaaccggcaactgcagttcagttcagttcatttcagttcagttacttaggctcaattgagccgggcccatttcgacggcgtttacaactttctttgggccaaaaggtgctaagcgtcgcctaacaatggggctccgtcaggtggagaaatattaaaatacaatacgatggtgccccgccttgaatgaaccgaaatgcgcgtagctaaatgtttgttttatttttcagcaaattgcctttgttcatatgtgcctttgttcacagtgaaaatggagtttaccagaagcagaagagtggaagtgaaataagtgggtgaaatttagaaaccccataaagagttcgatttttggaggctgatagcaggaagaatgaggcgggtaaaagtgaaatgaaagttgcgccatccacgtgcaaatgctttgctagacaacgcggcgtatgagtgatgctgtcgagggctgtgatggcgagttgcgtatgcaaaccgaaatgaaaattgtgtggtgatgagaaaagagagtcgtgttggtaaagtattttttatgtttgaattattatttgattctttgatttagcagcattcggttggtctttcccgggcggtaaagtgagaaagtccagatagtcagacagatatggatagacagataggtagatagattaaggtagaggtacagatagagatagtcgtagaacagagatagatggaaacagatgagagatagatacagttagatgggcgaggcgactggctttgactgatggatcgactagtcgcaaagatttgcagtccatttatcaaaggtgcagccatgaaattgagatacagcgtgaagagtgaggagtgcggaaagtagtaaagattcctttgtggaggttattggcggttctggatgaaaggtggtgtttggtgtttgggtgtgtcttgttattaagtgattgtttttttgtctaatggaaggcactttgttcgtctcgtacttctcgttcaagtaataaattaaaataaataatttataaataaatataaatataggtcatcatttttagcgattgtttctctctctctccttggccttcgtccttcggttaatttggctcttgaccaattgtttaccggcgggcctgcttgtatccctggtaggcgatggtctgggccacaggcgagctgtaggcaccatgggtgtcccaacccgagctgccgccagaggaccatccggcgctggaggcaccaccacccgaggaccatccaccggtgctggcagccgacgatccaccggcgttcttgccgccgaagagacctcccagaccgccgagcagaccgccgccgcctccggatccaccgatgcgtcccagtccgctggaagcaccagcagccagagccaggaagaaggcgataacagacacaaccagtgccttcttggccaggaacagtagtccgaagatggagccgactccaaggacggcgatcttagcaccaactcccagcaggatgggcaggaacttcttcagcagcttcttcttgcgggtacgggactcaacaaccagctcgcggagatcagccttgatgtcatcgggaatggcgcgggccacgctgcgagcggcgttagcgaagttgaagttcagggagcgttcagcgaagaagctcttggcgttgtccatgaagtagttgcccatctcggcggtgcgggcctccacggtgggagcggcctcaacagccagggagttgtccagggacttgccctgacgaccttcattggacttcaccagagaaacaccaccgaaaagctcgatctgagggttatcgaacacggacttggccttgcggaagagctgtggaggaggtagtggggtttcgaattagagcgaactgtaataaactgtgatctaaagtctaaaatattggtcattgaggatatgtttgattgattgttataattatatgacttcatgtgtatgtaaataagtggctaaggaagaatttagttgtgagtgaaatttaaaataatttcttagtttgcaagtaagggaaaatttgttgttatcaactgtttttagattttagaattttagaatagaatttcgatgatatatttttagctcggaaatataaaagagatgtgcttagagcagctggcaagtctaaaaaacacttttaagtggtaatgttgttttcacatcttcctgtcaggtgtcaattgtgtttggcaaactacacactcttttcaaaattgattattgcgaaatagttgcagcttgacaggaagctgtaaagaaactgtttttcactttcacttcaatagtatcctttagatcacatgggacaacacgtaatcggtgatctattgattttttggtttcactttcactgttaagcatctttgcaattgttctcgattgtgctttgatctttcgttttgtaataggggtatataatccttagggcctagataatccgtaccgtgagctgcaggcacgagatggagtcggactcgaggcactgggcaaaggcgccgggctgctcctcagcggccttgacgggatcggcagagatacctgctgccaggagcaggatgcaggcggtggcaacgaagaacttcatgctggtggctgggttggtggattggtgatttctgagactgaattcctttggcaccaccgaaatcactggtgtgttcattcgaatggaacaagctgcggtttgataacttttcgccgctgtcaggctgtttttaaagagtttccaacgtagcggtcgcctcggcagcggcataacgtaaaattatgtaaaaagcgccggtgcccacacatacagctagggtctccgtcgccgaagagcctgagccctcttccacacgtgtctgcgtgctctttctggcattttgactctgcgaagacggcagctgccctctctttctgaccgcagcgctgcctctctttctcagcagcctccgagcttagaagccgcattaggcaagcgcaggcagagctttgtctgcttccgcattaaagaaagtcgctgcgcatgagcatgcgaagacgagtcttcttcgtcttcggtcgacgtcagcgcaggcagcagggctgttgaatgtgagagcacgagaaagtttccatcggagagccaaagccaaggttgttcgtcttctctcccccacacactcatacacatgcgcgcatcacacacacacacagcgaagagacccctgaagacgcatcttcccgcagagtcttctgcccatctcctcgaacaaacgcacgcagacaaagaggtgtagtttcttctggagcctcacagattacaacacatgaagtgataaacaggtgctgcgcaggttaaccctccacacaccccgactcttaacccgtggatgccgggccagccccccccccctccgccataatatgtgtcatatattcttctggattttgttaattttttgaacgcttttgttttttgggcactttgccgcaagaaatgaaagttgtctgtataatattttcatactactgttatttctggcccttggtctgtatgtcatctccgtttaataccccccgtcgacccggtatcaccgaaaatagttatgtttaccgcatgtgcgcgtcttgaaattactttttattttcgtgactttattgtggttctgtttttattgcgcaacataaagtgtgatatataatgacagtt

SEQ ID NO: 473 - DNA, 1529 bp, DROSOPHILA
gttccattcgaatgaacacaccagtgatttcggtggtgccaaaggaattcagtctcagaaatcaccaatccaccaacccagccaccagcatgaagttcttcgttgccaccgcctgcatcctgctcctggcagcaggtatctctgccgatcccgtcaaggccgctgaggagcagcccggcgcctttgcccagtgcctcgagtccgactccatctcgtgcctgcagctcacgctcttccgcaaggccaagtccgtgttcgataaccctcagatcgagcttttcggtggtgtttctctggtgaagtccaatgaaggtcgtcagggcaagtccctggacaactccctggctgttgaggccgctcccaccgtggaggcccgcaccgccgagatgggcaactacttcatggacaacgccaagagcttcttcgctgaacgctccctgaacttcaacttcgctaacgccgctcgcagcgtggcccgcgccattcccgatgacatcaaggctgatctccgcgagctggttgttgagtcccgtacccgcaagaagaagctgctgaagaagttcctgcccatcctgctgggagttggtgctaagatcgccgtccttggagtcggctccatcttcggactactgttcctggccaagaaggcactggttgtgtctgttatcgccttcttcctggctctggctgctggtgcttccagcggactgggacgcatcggtggatccggaggcggcggcggtctgctcggcggtctgggaggtctcttcggcggcaagaacgccggtggatcgtcggctgccagcaccggtggatggtcctcgggtggtggtgcctccagcgccggatggtcctctggcggcagctcgggttgggacacccatggtgcctacagctcgcctgtggcccagaccatcgcctaccagggatacaagcaggcccgccggtaaacaattggtcaagagccaaattaaccgaaggacgaaggccaaggagagagagagaaacaatcgctaaaaatgatgacctatatttatatttatttataaattatttattttaatttattacttgaacgagaagtacgagacgaacaaagtgccttccattagacaaaaaaacaatcacttaataacaagacacacccaaacaccaaacaccacctttcatccagaaccgccaataacctccacaaaggaatctttactactttccgcactcctcactcttcacgctgtatctcaatttcatggctgcacctttgataaatggactgcaaatctttgcgactagtcgatccatcagtcaaagccagtcgcctcgcccatctaactgtatctatctctcatctgtttccatctatctctgttctacgactatctctatctgtacctctaccttaatctatctacctatctgtctatccatatctgtctgactatctggactttctcactttaccgcccgggaaagaccaaccgaatgctgctaaatcaaagaatcaaataataattcaaacataaaaaata

SEQ ID NO: 474 - protein, 286 aa, DROSOPHILA
MKFFVATACILLLAAGISADPVKAAEEQPGAFAQCLESDSISCLQLTLFRKAKSVFDNPQIELFGGVSLVKSNEGRQGKSLDNSLAVEAAPTVEARTAEMGNYFMDNAKSFFAERSLNFNFANAARSVARAIPDDIKADLRELVVESRTRKKKLLKKFLPILLGVGAKIAVLGVGSIFGLLFLAKKALVVSVIAFFLALAAGASSGLGRIGGSGGGGGLLGGLGGLFGGKNAGGSSAASTGGWSSGGGASSAGWSSGGSSGWDTHGAYSSPVAQTIAYQGYKQARR

SEQ ID NO: 475 - DNA, 6710 bp, DROSOPHILA
ggtttcaattttgggcgctaattaaccgcccaaaaaggagtgtgaagagcaatgttggaggcaagcaattaagatggtttcttcacataaaaggagcttagaacggatcccgtttcagagctgctcgggagtcaatctgatcagacccgggggtcataagtcgaccaccaacgagacgaacaaatgacataattacattgcacattactcaaccgtcgctggctaccgtaattccatgcagcctcattgcttctgttttaggcatttgctcgtcaatttcgaaattccaaataggaaagaaaagggaagccagccagacatttttggccgctcggggctaaggtcatgtgaaactatgcagaagctgccgccgacggaacaaaagccaagctcggatgatgagctatgacttctgtccgtccggctgtctttttggcctttcggtaatcgccaatgctgggggcagttgccgtttgtttgccaaatggccaagatataaaaaatatcttttttgatttcaatttcatttcggttttttcctttcggccgcttatgccgctgtgtgcattgggacagacgacgcccattgtctcggtgagtactcttattaattacagtactgctgctggagcgttactatgataatgtttagtctttgtctcagtggacaaggttaaacagaagttcatgttgcggtcttcgaaagtttatgactttgcccaatggctttcaattaatcagctggaaattaaataattaaatgaccatatcattttgcgattgcttttaataaaaagagtatattgctgacaacgtctttatcgaactaactttgtaaaactttaaacaagctagaaagagacttagaacacgaacttgtagctttatttaaaaaaaagttcgtgctctaagtcttttgtattttgaaacttgatcatagttttttacctatttaatacttaaaataagaaattcccattgttttttttagtctatcaacatgtccgccagcgcctcagcctgcgattgtttggtgggcgtacccactgggcccaccctggcctccacatgtggtggtagcgccttcatgctgttcatgggcctcctggaggtctttatccgctcccagtgtgatctcgaggatccctgcggaagggccagcagtcgggtaagctataaatgacgaaggccactaaaagtggctacccatatctcaatatgatttccaacattattacagtttcgatcggagccggactacgagtacgatttcattgtcattggcggcggctcagcgggctctgtggtggcctctcgactgtccgaggtgccccaatggaaggtgcttttgattgaagccggtaagggatgttgccccagcaactcatacccatacacatacctacatacataaagtttacactgctcacggcaattagaggcacgttatgtggcatttgtttagaagtaattgaagcttaacagcggcataaactgcaacaatggcaccaacactaatgccacttgggcaagactcggcggcaaagaagcaaccgcaactgtcacgagcattatgtaaactaaacgagctgccaccacagcccgatgccaaatcttggcccatgctaataccttctctctatacatacacatatgggatttacttcgcttggagctgctagccagcttacagagcccgaaaagtgttttcctcttcgtttcgcttgacttcgctttctgcactttataattgctgttgctagcagcttattttatgaatgaataaccattcggatactacacgagactccttgcgaatgtgggtgaattgcgagtgtatttaattctgctaatcactgtcgatattcaatgcagtgcattcactttgccttaattagacgcaaatatgcggagagctctgccttagaggctttttagcactgcataatttaaaatgtgtcttatatatttgttcaagcacgggttttaagttaacttgtttctttgcagttcagtactcagataatataaccacctttttaaatatatttgtaataaataacttacaatatatgggccagtgacttggcatacctttaataagtaactaaatataaatttcaaatcgtgcacacttaatatagtttaatgtcaaaagttatttcaactagcaacaggcctcactttaagttcccgatacccactcaaaaccatcattaatcatcagttctttctcgtccaacgctaatgtcttaatcagacgactaagtgctgggaaaatcacttgaaatatcttcaggcctggaaaagcattctaatggctctattaagtcttccctatcaacgttctcggctctgcttggcttactttgtgggtctcccttagttttccaatttttgcgcaaagtaattgtttatagcgacaatttttacgcctcgtcactaattacactaattacgagccaaaatacgcgaaagagaaacacattcgaagttgtcaatgcgttggcgttaattatacaacaatgcctgagccgcagtgcaattagccgcggctattacctggcttattatacgaccatatcactgtgagcagataaccctcgtctaaagtggcttttgttgctaccaagattctcactggacattagacatgcacctcgtcagaataagtcaatgccaaaagcatgccggaaaaaaattaaacttattaaatcttcaaattcttgaagaagtcaacccggtgcctggcacactggcccctggaatgagctcgcctcgggttaatggcacaactggtggtgtaaacttgtgatatcacctggttactctaagccatattctatttttgcacttcacgaagacacaaatcatttgtcacactaatgtaaaggctaatgtttaagccacttggttttgttatattttatttaaaatttcataaatttcataaatttaacttatctcccagcacgtgttgttaatgattgcacttatattaatggtttttttcaaataattttttaaaataagtgcagaagtcagcgcacatgcaataatggcatttaccattaggaaggttaccttctgaatttacttctttcaactaatgagatattatgttttccactgtgttttaaatattgcgtatacaaatacttttagcgttgcaaacgttatacgcttttaatttatgaggcgatgttcgaccgtccaatgctccagactgcatcttgtttatttgctttagattttattcgaagctaatttgaatgcgtattcccggtgctaattgttttcttttatccagtggcgtaaacaccaagaaaggcatttgttttttatttgcacgacacagacatatgttaagagttgccgcagaacaagttattaacaatttcgagaacatatataacgcttgtactcaatgaatcacagcatcgccaggctattagtaagtctttctaaaatttggctattttgtttaattttcctttgttgaaatttcaagttaaattattacttcaggattgtgcggtaacattttttttggctcccacgctatggttggcaatcaaagattccacttgaatcgatttaattaacgagagtcgtggtcccagcgcaacagaaattctagaacgccgattgaggcaatatactaattataatggattgccatgggttaagctaaagcgtgcctcagatgtcccgaaagccaaatgaggctgcccacccaaatgctgaaggctgaatcggactttgtttgcactgcttcttaatgggcagttagggtctattaatcaagactcacgaccagttatttcagttatcgtggtgctgtgaataggtgcatatctattatcctaaccggaaggaattaagcatttggacataactgattcgttaacttccccttcttgctactactcaaatttctctgttaaactttattaaaatttaagttaatataatatatataataactatatattaaaataatataatataatgattatagttcatttaagaagttggataagttctagtcctaatatagaaccgacaaactaatcatacacttatataaactacaaaaactataacaacatgatattttttaattatgtatttaaccgtatcttaaccgtcttacacaggtggcgatgaacccgtgggagcccagataccctcgatgttcctcaactttattggcagcgacattgactaccgctacaacacggaacctgagccaatggcctgtctgtcctccatggagcagcgctgctactggccacgtggcaaggtacttggcggaacctcggtattgaacggaatgatgtatgtccgcggcaaccgggaggactatgatgattgggcagcggatggaaatcctggttgggcctacaacgacgtgcttccgttcttcaaaaagtcagaggacaacctggatctggatgaagtgggcacggaatatcacgccaagggtggcctcctgccagtgggcaagttcccatacaacccacctctatcctacgctattctgaaggccggcgaggagttgggcttctccgttcacgatctaaatggtcagaactctactggatttatgattgcccagatgacggcccgaaatggcatcagatatagctcagcccgggctttcctgcgtccggctcgcatgcgcaacaacctgcatatcctgctgaacaccacggccaccaagatccttattcatccgcacactaagaatgttctgggagtggaagtcagtgaccaattcggcagcacccgaaaaatcctggtcaagaaggaggtggttttaagtgctggcgctgtgaactctccgcatatcctactactaagtggagtgggtcccaaggacgaactgcagcaggtgaatgtgaggaccgtgcacaacctaccaggtgtgggcaagaatctacacaatcacgtgacctactttaccaacttcttcattgacgatgcggacacggcgccacttaactgggccacggctatggagtacttgctctttcgggatggtctcatgtccggcactggcatttcggatgtgaccgcaaagctggccactcgctatgccgacagtcccgaacgtcccgatctccagctgtactttggcggctatctggccagttgtgcccgtacaggacaggtgggcgagttgctctcgaataactctcggtccattcagatcttcccagctgttttgaaccctcgatcgcggggctttattggcctgcgatctgcagatcctctggagccgccgcgtattgtggccaattacctaacacacgagcaggatgtgaagacgctggtggagggcattaagtttgtcatccgattgtcgcaaacgacgccgttgaagcagtacggcatgcggctggacaagacggtggtcaagggatgcgaggcccatgcctttggtagcgatgcctactgggagtgcgccgtgaggcagaacacgggtccggagaatcaccaggctggctcctgcaaaatgggtcccagccacgaccccatggcggtggtcaaccacgagttgcgggtccacggaattcgcggactccgagtcatggacaccagcataatgcccaaggtcagctcgggaaacacccatgcccccgccgtgatgatcgctgagaagggcgcctacctgctgaagagggcctggggcgccaaggtctgacgcgtggatgcgacgtggacgttgcatagagtaatttaatcagaatccaagcgaaaattacagcgagtaaaattttaagcgaaattacacttatggcacctcagatccaaaactaaactattttaccctaatccaatcttatttaatccgatcctattatgaaggtttctcactctaggcacaccgcgttgcgcaatttccattaaagttatctataagttaacaggctcccttaaaactaactactgttacccactgaatatgccgtcaaacttcttgaacagcacactcagctcaaattaaagacaagtaaaacttattaggtatctagtaaatttactaaaattccaaattaaatttatgtgaattcaccctaagaagttgaaatttttccattaattgcgtttaatttcaaaacattattgatagcttgagttaaagaggtttgactatgtagatttctattaatgcttaatttatattgagctttatgttgaccaatccctacacttaaactatagatttcgacctactggacatgtaaatttcattttaaactacatttaaagtatataattcgtgttacccattgacaatgtaaatttcgtttatcgtttatttcgaatttggacggatgattgatgtcctatatttctgtatacgcgaatattgcatgtatttattgttcgattaaagtgcaacaatttaatttaactaccaaacgatctcatgaatttgaaaacatttatcgcaaaataagcgataattgctatatatatagaggcgacaaaatctgcttaccagtcagtttttcgaaatgtttcattctctatatctgattggaattctatctctaatttgggtggccgcccaggatatcgtacctgacgatccggaagtgcagatgcaaatgcatgccatgttctatacggctcgtgttgcttgtgcggatgagaatttaataccgtatggtaagtggagtaatgtaccaactctgaat

SEQ ID NO: 476 - DNA, 1839 bp, DROSOPHILA
atgtccgccagcgcctcagcctgcgattgtttggtgggcgtacccactgggcccaccctggcctccacatgtggtggtagcgccttcatgctgttcatgggcctcctggaggtctttatccgctcccagtgtgatctcgaggatccctgcggaagggccagcagtcggtttcgatcggagccggactacgagtacgatttcattgtcattggcggcggctcagcgggctctgtggtggcctctcgactgtccgaggtgccccaatggaaggtgcttttgattgaagccggtggcgatgaacccgtgggagcccagataccctcgatgttcctcaactttattggcagcgacattgactaccgctacaacacggaacctgagccaatggcctgtctgtcctccatggagcagcgctgctactggccacgtggcaaggtacttggcggaacctcggtattgaacggaatgatgtatgtccgcggcaaccgggaggactatgatgattgggcagcggatggaaatcctggttgggcctacaacgacgtgcttccgttcttcaaaaagtcagaggacaacctggatctggatgaagtgggcacggaatatcacgccaagggtggcctcctgccagtgggcaagttcccatacaacccacctctatcctacgctattctgaaggccggcgaggagttgggcttctccgttcacgatctaaatggtcagaactctactggatttatgattgcccagatgacggcccgaaatggcatcagatatagctcagcccgggctttcctgcgtccggctcgcatgcgcaacaacctgcatatcctgctgaacaccacggccaccaagatccttattcatccgcacactaagaatgttctgggagtggaagtcagtgaccaattcggcagcacccgaaaaatcctggtcaagaaggaggtggttttaagtgctggcgctgtgaactctccgcatatcctactactaagtggagtgggtcccaaggacgaactgcagcaggtgaatgtgaggaccgtgcacaacctaccaggtgtgggcaagaatctacacaatcacgtgacctactttaccaacttcttcattgacgatgcggacacggcgccacttaactgggccacggctatggagtacttgctctttcgggatggtctcatgtccggcactggcatttcggatgtgaccgcaaagctggccactcgctatgccgacagtcccgaacgtcccgatctccagctgtactttggcggctatctggccagttgtgcccgtacaggacaggtgggcgagttgctctcgaataactctcggtccattcagatcttcccagctgttttgaaccctcgatcgcggggctttattggcctgcgatctgcagatcctctggagccgccgcgtattgtggccaattacctaacacacgagcaggatgtgaagacgctggtggagggcattaagtttgtcatccgattgtcgcaaacgacgccgttgaagcagtacggcatgcggctggacaagacggtggtcaagggatgcgaggcccatgcctttggtagcgatgcctactgggagtgcgccgtgaggcagaacacgggtccggagaatcaccaggctggctcctgcaaaatgggtcccagccacgaccccatggcggtggtcaaccacgagttgcgggtccacggaattcgcggactccgagtcatggacaccagcataatgcccaaggtcagctcgggaaacacccatgcccccgccgtgatgatcgctgagaagggcgcctacctgctgaagagggcctggggcgccaaggtctga

SEQ ID NO: 477 - protein, 612 aa, DROSOPHILA
MSASASACDCLVGVPTGPTLASTCGGSAFMLFMGLLEVFIRSQCDLEDPCGRASSRFRSEPDYEYDFIVIGGGSAGSVVASRLSEVPQWKVLLIEAGGDEPVGAQIPSMFLNFIGSDIDYRYNTEPEPMACLSSMEQRCYWPRGKVLGGTSVLNGMMYVRGNREDYDDWAADGNPGWAYNDVLPFFKKSEDNLDLDEVGTEYHAKGGLLPVGKFPYNPPLSYAILKAGEELGFSVHDLNGQNSTGFMIAQMTARNGIRYSSARAFLRPARMRNNLHILLNTTATKILIHPHTKNVLGVEVSDQFGSTRKILVKKEVVLSAGAVNSPHILLLSGVGPKDELQQVNVRTVHNLPGVGKNLHNHVTYFTNFFIDDADTAPLNWATAMEYLLFRDGLMSGTGISDVTAKLATRYADSPERPDLQLYFGGYLASCARTGQVGELLSNNSRSIQIFPAVLNPRSRGFIGLRSADPLEPPRIVANYLTHEQDVKTLVEGIKFVIRLSQTTPLKQYGMRLDKTVVKGCEAHAFGSDAYWECAVRQNTGPENHQAGSCKMGPSHDPMAVVNHELRVHGIRGLRVMDTSIMPKVSSGNTHAPAVMIAEKGAYLLKRAWGAKV

SEQ ID NO: 478 - DNA, 3407 bp, DROSOPHILA
gttatagagttaaaagttgtgaaatcgccgtacgactttgcttaaattaaagtagacgacgtgctggcgactcgaaactttcagccgctggctagggggctctccgaatgtcataaacgaggcatttttaagttgataattaaaaatctgtttaggtccacagagcaggtgagcccgacgccaatcgggccgacaagccgttcgagtcgctcggatgcataaagtacgcttaaggagttaaaatattaaaaaaaaatatttttacattacgcggaatcactgggcgtgtgcatgtgtgagtggcagtggggtttatttatttttttgggaaagtagagcgctagaaagtgacagatgcaaaggcagcagaaagagatggcggataggagaaatgagaaagttgaagagtcgtagtggaagtcgagtgtcgagtgtcgactgaggaagcagtggccctgagttagagccggaaaatgagcgcagtttggtgcggcgatgtgtgttcgaaaacctatggcaagtgatggcatgcgaatgaccaaaactatgactcagctaaaggcgagaaattgaaggaagatgtggaagtttctcagatgatagacagtggttagatagatagctagattgatagatagtgatagtgttagagctagtaagttaaagctaatagtaggcatgctcgttgttgctggtgttgttgtattataagactagaattgcatgtgaagaacatagtagaacagaaagggatatagcgtacagatatagattatagagttaggatttgtacttttctgcgattgcatggcaatcggcaaagttttggtataggcagtatgcagttttagatgaaagcacagaaatagagagacagaaacagaaacagaaacagatggagatgtagatgtagatagaggtataggtgtagaaactgacagatgagagtgcacttgatatagagcagttgggtgatcgattggctgatgggtagtgctggaagtgctgtgcgagcttagacttaaggctgagtatttgcaacttgtggggtaactctcgctggccgctctttttacaaacttaactttagcgtcattagtttaaaaactaacatatatggttctgatactggtgttgtccggtttaacattatcttgcgtgtgtgtggttcattctttttcgttttcattgcttggagaaataaataaaataaattaaattaataaattaattaaaacgaacgataaataatgtgtgtttctcttcgagagtcgcgggcgagctctgcagctcaagtcgtgtgatttcgcgtttctgattttgcttcttgagtgattgtgtggtatgatccagtgttatcttaggcctgcacgggcttctgggcaccataggccaggtcctgggcgtcaatggagcgtccccagccaccgtgaccgctgctgccgtacgaggcagaggaggctccggcatcggcgctgtagccactgccgtacgagtcgtggcttgtcgagtggctgctgctgtggtgtgggtgggcgaccacctcgtaggtcacgtgcttctcctgcgacagcagcttcttcaggccaatcacggctgacagcaccagggcgatcttaccaatcagcagggcctttccggcgatcagggcgatggcgcccaacagcaggggcagcagagcagcggccttcagggcaaccagggcgaggatgggtcccaggatcttggcggccttcttcttcttgccacggctctcctcgggagcgttggggtcgttggagccgaacagagactcggaggcatcctcgagggcacggccggtggagctaacagcctgcacaatgtcggctcccttaagctccaccttgatggtgtgtgagttcaggaagctgctgatgcggttcagggccagggactcgaacgactcatcgccggagatggagcgggcggcctcctgttggggagcgtctggcgagcggaccacggtcacaccttcggtcagggcgaactggtcgcgggcaccgagcaccttgtccacgaagctgaacagcttgtacttgacacacgagacggagtccttgcgcaggcagtcgctgtagatgctatccataatgtcgttctcgccgccgatggcgttgcgggcgtggccgcgcgtctcctcagccggaagggcggcgctcaaggcgaccagacacaagacaccgaaagtaactttatggcttgccattatgcgtttttgtttggttggtttttgttcttgcacgtttaacgatttgggttctttgaataatccttttgttgatccacactacactttcacgtagttcggcggcgaacgcactttctcttaaatggaaaactgtatttttgtgtatttcggtctaggctgactgctgctgccgtatagctgctcagacggttaaggattgaatgatacaattttccaccgcacacgacaatttatatacggcggcagtggcagtgacttcggcatcggcatgctcatctgctgcgaaagcatttctccgacccacctgccccctggcccccagaagcggttcccctaaactagtcgtgcaagtttctcgcttaagtctttcgtttggccggccaacggtaatgcgcagtcggcatcgacgtcgccgttagcgttggccgcgctgcagcggtaccccagcagctggaaaagcattgttactgtaatttgtaagttgtcgctgccgctgcgctgctttcgcccgaagttcatgtaacattgtcaacagacgcagcctcctgccggtgggaaaccagcgaacaaaaaaccagctacttttacccggactgcagagagcgggccaaaagtgccgaaaatcgtagtcgtaatcttaattgtctgggctttaattgaaaatgagattttgtaaaagtaagtaaaagcattttcctttcaagcccagtagagcgctggaagcgtgcggctgaggggaacagaacggctaatttgcatttccaatttactgccagttagaaatcaatatatttaaattttagtcgactctcataatttaattttataatattgtcatacaattttaatttgaaaatagattattaaattaacaaaaaatttcaatttgaatataccaagtttattaaaatatatcactttatttaaactatcgaattatttttttctattcttttgttaaaacaaaccgtatttagcaacagtgatctttatttaataattttttaactaattcatagttggtcttaataaattcaatgataattttatagaatatataaccaagtattttgcattattatcagcagtttgcctaacacgtatcggacataatataaaaaccaataaaataatttttattttgaataagtagagctttatctgatatttaatatcg

SEQ ID NO: 479 - DNA, 1360 bp, DROSOPHILA
ctatacggcagcagcagtcagcctagaccgaaatacacaaaaatacagttttccatttaagagaaagtgcgttcgccgccgaactacgtgaaagtgtagtgtggatcaacaaaaggattattcaaagaacccaaatcgttaaacgtgcaagaacaaaaaccaaccaaacaaaaacgcataatggcaagccataaagttactttcggtgtcttgtgtctggtcgccttgagcgccgcccttccggctgaggagacgcgcggccacgcccgcaacgccatcggcggcgagaacgacattatggatagcatctacagcgactgcctgcgcaaggactccgtctcgtgtgtcaagtacaagctgttcagcttcgtggacaaggtgctcggtgcccgcgaccagttcgccctgaccgaaggtgtgaccgtggtccgctcgccagacgctccccaacaggaggccgcccgctccatctccggcgatgagtcgttcgagtccctggccctgaaccgcatcagcagcttcctgaactcacacaccatcaaggtggagcttaagggagccgacattgtgcaggctgttagctccaccggccgtgccctcgaggatgcctccgagtctctgttcggctccaacgaccccaacgctcccgaggagagccgtggcaagaagaagaaggccgccaagatcctgggacccatcctcgccctggttgccctgaaggccgctgctctgctgcccctgctgttgggcgccatcgccctgatcgccggaaaggccctgctgattggtaagatcgccctggtgctgtcagccgtgattggcctgaagaagctgctgtcgcaggagaagcacgtgacctacgaggtggtcgcccacccacaccacagcagcagccactcgacaagccacgactcgtacggcagtggctacagcgccgatgccggagcctcctctgcctcgtacggcagcagcggtcacggtggctggggacgctccattgacgcccaggacctggcctatggtgcccagaagcccgtgcaggcctaagataacactggatcataccacacaatcactcaagaagcaaaatcagaaacgcgaaatcacacgacttgagctgcagagctcgcccgcgactctcgaagagaaacacacattatttatcgttccaatgaaaacgaaaaagaatgaaccacacacacgcaagataatgttaaaccggacaacaccagtatcagaaccatatatgttagtttttaaactaatgacgctaaagttaagtttgtaaaaagagcggccagcgagagttaccccacaagttgcaaatactcagccttaagtctaagctcgcacagcactt

SEQ ID NO: 480 - protein, 288 aa, DROSOPHILA
MASHKVTFGVLCLVALSAALPAEETRGHARNAIGGENDIMDSIYSDCLRKDSVSCVKYKLFSFVDKVLGARDQFALTEGVTVVRSPDAPQQEAARSISGDESFESLALNRISSFLNSHTIKVELKGADIVQAVSSTGRALEDASESLFGSNDPNAPEESRGKKKKAAKILGPILALVALKAAALLPLLLGAIALIAGKALLIGKIALVLSAVIGLKKLLSQEKHVTYEVVAHPHHSSSHSTSHDSYGSGYSADAGASSASYGSSGHGGWGRSIDAQDLAYGAQKPVQA

SEQ ID NO: 481 - DNA, 5253 bp, DROSOPHILA
aaaatgtttacacaagtgaacagtggaccaacttgcttcttcgcttaaatttccgttgtcttgtcttgtgtgtttgggccagggcaataaacgtgggccataaggttgccgaatatgggacaaacaccctgggacactacaagtggaattaatggaagctggagctggtcaagttttattgggatttgtccaaggcaagcggaagtagtctccggcaaatggttacaggaagcttatgatattggccaagtatctttagtctggcccacacacgcccacggccattcaacacaagagaaacctgcccttcgcttggtatcagtgattttatttgtatacattttttttgcttttctgttttttgaaaactttgctgcttacatgcgatttacacttacggctggtaaataaataataaagttaaataaattattacacctagtggctaagtacagttagacaggctagagttaatcaaagtgcgccagtggaatgagttggacttggaaacgggctgcagaagcggaagtacgagaggtaattgaaaatagcaagtgcagttagccataagaattgaagcacagtgagttgcagatacacagatacaggttgaaaaaaaagatacagatgccgggctcagcaacagtaaacccggctggaagaacagagcagggcagagcgatacattaaacaaaacgtaatcgattaaagcaaatactaatcattataaaaaaatccgcagtgcccagtgggaacgcacgttctggatacatttcatccgatgtacccataggtgccacagtgcgtcgagtgaaccgttggaagtgcatcaagtcatcttttctgcccagcagtgcaagtgcaaaaagagagttatgtgtatatctaattacaatccgtccgccgtccgtgatttatccagaagataaatgcagctatgtaacacttggggtcactcctccactcctcttgctctttcctgtctatctggatttccatcctacgatttggtcacttgcggcgcagctgctttcggatgcagatgctgcagctgcgggcggctctgtgcgtgagccacctgctcctggtggtgggctcggtaggccagctcctgggcctcggtcagggatcgtcggtcccagccaccgcctcctccaccgccgcctccggatgaccagccaccgcctcctccgccgcctccggaggaccagccagaactgccgcctgacgacttgccggacatcagcttcttcagcccgatgatgcccgctaggagcagggcgatcttcgagataatcagtgccttgcctgccaggatgtagagcgcacccatggcaatcggaatcatgcccatcatcttcatggccatgcccatcatcatcatgcccatcatcttcttcattttaccacgacctgcaaaagatgtacatagataattcgttaatttgtggttgcattcatttagtattttaaataataatgttattttcttaaagaaatattttcgcttgtttagaaatgagtaaatcctccaacaatgccctcaggaaatgcatgcaaaaacaatagttcgagtatctgaatctcagaagattttccaagttgatatgtatttggagggcacaactgcaaaatatggagaaacggtgaaagtgccagctcaattaaccaaaggctgcatgggaatattttcccatggaaatctcagacgccttttgaaagaggctctggcattccgatttgccagcaccgtgtgtggctttcattttgctgccttcattagggacactgcgggcgatttcacttgcctggctggctggctagctggttgtttggtaaaattgcatttcgacatgggcacgtccatggacatggaaatggaaatggacataaaaatggaaattgaaatgaaaatggcgactaatgctgcccaaaagatcaatgatcggaaagtcataaccagatttaaacaggcatctcagtcgatcgagcaagtattagccaaaaatggctgtgccattgagaaagtgttggccaacttgactctagctcctcgtatcgattaaaaatcttgatcaatgatttgaaagtaaaagaaaaacttcatgaggcgtgaaagtaagttcacttttttttgcatcgcctgcattgcgatcttgatgtggacgctgcctaagtgcttgtgtcaaatttgtaatttgtaattgacgacagcccgcattcaaaatggaaattccaatgccactggaggagtttcctttcgtggcctcgtcggagaaacgtggtcgccactttcattgcatttgacatggtcatgtcatctagacatggcttagtttttgcttttagagcgttctactctttgcttttagggcttagatactttgccttaacgttgggggacacgtatactagagattcgctaagtaatttcaaatataatttttcgtaaatataaggcaattatactttgggttttgaatctggattatctatatagccgagtaaaacaaggtttttaattgatatttgcacttacttccaatattatagattatttttaaattttattgtaataccgaacatttaggtaaaataaagatttacgtgctttttaattttcgattttctaacaatttttgtataaattttggcttaacaattaaatctagagtggcttagattcgtggtggcaaagctacagcgcatgtcatgtttttcggctgtttttggacaacacgaaattctggcatgacattttatattcgacgttgtcgccaccgtctggctgatgtcgttgttaaggtttctgggtcagtcctgagttgctcaacgggttttcttgtgtgcgcgttataaaataacgaaaactaaaaacaattgcgcattttcccagagacagtacaatgtgacctcttcctcctccccgcctttctatacatttctcccacccccaggctggcccactcaccctgtttatatacaatgcagaaatgataagccaggaagtgggccaaccagcggttgctgacgatgcagttgcgaatgtcactgccagccgagataaacacacgctttggaccactatcacggctctctcggctctaataagcacctggaaattgccggcgatatggccagagtcatagccggagtcaaattatgtcactgttacgcgcaatgaatactggggtattagcggtaaccgcaattagactgcccccagaaagtgatgattggcgctgtgcggtggatcgatttgtttacccaagaaatcttgggttaattgcaggcaagagatctgatgtaatcactggctatttagccagtagggtaaaataacattcttgcgatactaattgaagaaaataagtcaacaacgttaataggtcttttgctgttactaaaaaatacatttcccccattgatggcagtggtaaaataataaaagttgagctactttaaattagtaatcactaactgttttctaaacgaaaatcctcatgctgacagtcaatgtgttatatggaaaccgattcattggttaaaaaccaatgtttttgtttgtatgtttttcggtttttaccatcaacgtaacccttaatcccacccagtccactcaccttcctctagtccgcgtccaatctcatcggatgtgagcttggggaagctgacctgcagggagtgaccgttgaagaagtagctgagacgctcgatcagcatgttggtgagcttggcatctcggtcgctgccggatcggggcagcgaggactccagctcgttctcgctcgtggcaggcggacggggagctgtttccaggcgcaccagcttgatgccctcggccacgttgatggcgtcgatgggggccaggcggtcgataaaggatatggccttctttttcagacatggcacgaatccggcctcggcgcgggtgcactcgtcgtagaccctgaggagggtccgtgccccggcgctctgggatgggctgggaccgggcgggctgcccagctgctcggtggccgccccacaactgctggcgaggaacaacacggagagtaggctgatgagggcctgccagggccactgcttgaatatcattcttaggcacttttcacacttttcccggctaacgacgtcaacaacaacactcgcggcacaccgcgcgacaggtgctacacacaggtgggtgggtggttagtccttcggccacaaatccttgtctagagacactgggagccacttgctctggctgctagctcgaatcaaactgatgccgagccttggcgggctttgttcttttatagacctttctttctttctttctgtctttctgcgctcgctcaacggcctgttgatcgcaatttgattttcctcggcttcgtcggcgacttcgggcccccagctcgtgctggctctttttcccactcggttttccattgcggtggaaaaaagagtgcgtcagtgctggtacttgagttttccacagcccgaagtaaatttagcttcatagtgtcgattatctgatgtctattattttcagaccataaacgttaaaggtaatgtgttatgtgtttacttaacatctttgagttttcgttatatttcgatatttatttatatatttattttgcagtaattagctgagatacaaattttaaatatataatgtattatatattatattattattatataatgtaatatataataattaatttcttaaacaatatgtgctatatataaaagtatgttaatgtatataggggttaagctataaaggctcgctcttactgtgaaaaattagttttgtgtgctagcattatatgaataacgaaatataaaagtatcttaaaccaatttggctcgaaaacagccagtctggcatcgccattgccgtcaagatcattggcagcagcactcctcaatgaaccaaggcgcccagcagcgaggcggaggcgaggccaaggcatttccaacgggttgcgacttgtttttccagccgtagctttcgttgtttatggccaaacatattagttgcattagtggtttttggtaggagttcgcttttttggcatttgaccatttctgcaactggctgccgttgtcgttgacacgttaatttcaatttggcttttagcagttttcgccattcaagaacgagttttggccgtaaagaaagtcattgccagcctttaaacggtggccaatggccattttttatgtaatgcaaatggcagcgagggtgtccatggg

SEQ ID NO: 482 - DNA, 1172 bp, DROSOPHILA
gcagccagagcaagtggctcccagtgtctctagacaaggatttgtggccgaaggactaaccacccacccacctgtgtgtagcacctgtcgcgcggtgtgccgcgagtgttgttgttgacgtcgttagccgggaaaagtgtgaaaagtgcctaagaatgatattcaagcagtggccctggcaggccctcatcagcctactctccgtgttgttcctcgccagcagttgtggggcggccaccgagcagctgggcagcccgcccggtcccagcccatcccagagcgccggggcacggaccctcctcagggtctacgacgagtgcacccgcgccgaggccggattcgtgccatgtctgaaaaagaaggccatatcctttatcgaccgcctggcccccatcgacgccatcaacgtggccgagggcatcaagctggtgcgcctggaaacagctccccgtccgcctgccacgagcgagaacgagctggagtcctcgctgccccgatccggcagcgaccgagatgccaagctcaccaacatgctgatcgagcgtctcagctacttcttcaacggtcactccctgcaggtcagcttccccaagctcacatccgatgagattggacgcggactagaggaagggcattgttggaggatttactcatttctaaacaagcgaaaatatttctttaagaaaataacattattatttaaaatactaaatgaatgcaaccacaaattaacgaattatctatgtacatcttttgcaggtcgtggtaaaatgaagaagatgatgggcatgatgatgatgggcatggccatgaagatgatgggcatgattccgattgccatgggtgcgctctacatcctggcaggcaaggcactgattatctcgaagatcgccctgctcctagcgggcatcatcgggctgaagaagctgatgtccggcaagtcgtcaggcggcagttctggctggtcctccggaggcggcggaggaggcggtggctggtcatccggaggcggcggtggaggaggcggtggctgggaccgacgatccctgaccgaggcccaggagctggcctaccgagcccaccaccaggagcaggtggctcacgcacagagccgcccgcagctgcagcatctgcatccgaaagcagctgcgccgcaagtgaccaaatcgtag

SEQ ID NO: 483 - protein, 338 aa, DROSOPHILA
MIFKQWPWQALISLLSVLFLASSCGAATEQLGSPPGPSPSQSAGARTLLRVYDECTRAEAGFVPCLKKKAISFIDRLAPIDAINVAEGIKLVRLETAPRPPATSENELESSLPRSGSDRDAKLTNMLIERLSYFFNGHSLQVSFPKLTSDEIGRGLEEGHCWRIYSFLNKRKYFFKKITLLFKILNECNHKLTNYLCTSFAGRGKMKKMMGMMMMGMAMKMMGMIPIAMGALYILAGKALIISKIALLLAGIIGLKKLMSGKSSGGSSGWSSGGGGGGGGWSSGGGGGGGGGWDRRSLTEAQELAYRAHHQEQVAHAQSRPQLQHLHPKAAAPQVTKS

SEQ ID NO: 484 - DNA, 3592 bp, DROSOPHILA
tagaaatcgcgtggcaggccaaaaatccaaaacgcaccgctcgccgctgcaataacaataacaataccgaacggcaataccaaaaatccaaaagcaatttatgcaaagcatatgcgtatgctacctggccggcagtttcttgaccatatttccacgcacgtcgcgatgtcaacgaaagggaagtggccagtggtcggccggctgaatattatttttttgtatataccatacatatattttatataagcaagtggcccgatttcgggtgctcgaccgttatccgtatcctaattggcattcaatggagtcgccggtgctacgtgttgggattgcctgcgccagattcttggccggttgttcctctccattagctccatcagggctcacgatggagcggagaatatagtggtggatctgcgagacccacacgtatttggtatgccccgccggtggtgacttaatgcacaatttggcccagttagttactctggcgctttcaacgctttcgatttcattctccctttgtcaactgtcgttcgtggcttgttttctatttcaattgcttctaaatctgcctgtgaaagaaagctgaattgtagcacatcgccgcatatatctcttttcaatcgcaaagtgacacttttatgagcataagtagaaagtttctggcaaacaattaacatgccgaacggccgtcacatggccactagaaactccaattatgagcaggccaccaacttgccaaaaactaaatccccagcttatcagctctttttctcaacattttctgtgttcttttgggtttttttttgtgttcagaaacagaacctgccacaagttttaattgccagccgcaaacttgttgccgcccagcgagcaaagttccacatatttgttttggggtctgtcagcatttcaattaagccctgggaaactgggaaagtctctgggcacaggtgagcactgtccacgtgcgtggatttgcggattatatttttttcgggtgcaatactcttggttttattcatacattcgacttgacttgcgggtgatgtgtgcgtggtgtgtcaataaattagttaattacatttcgaataaattactacaggctaaaggtttcaaaacgaaggcacatctgtttgagctgtctcccagccgcttctactgctgctgctggccggcgtaggccaattgctgggcatcggacccatcctcgctgatgctgcgggcatagggataggacgaggaggctcccgagctccagccggcgctggcgggtgcggaccatgcgttcgagttgtaggctccggcaaaggagttacctccgaacttgttgccgaatccgcccagcaggcgggatccgccgaccagaatggccaggaagaaggccagcttggccacgatcacggccttgaaggtcagcagggccagaaacccgagcaccaggggaatgacggcgaacagcttggcgccaatggccagagccacgggtcccagcatcttcttgatcttgccacggcctgtgattggatgttaggtaaccatgttttatcgtatcccaagtcaaaacccaccttcatcgagggcacgagccacctgctgggtggtctcggcgggcagcttgaactccaggttgtgggtgcttaggaagtcggcggcactagagacggccagatccactagacgaccagtacgctcatcggcattctggggcagctcggcatagacatcctgctcgctcatcgattttcccgtgcgggaaacgggactggcgggatccctaaaatgatattgtaagttataaatacattttcacatttacttaacttttatgacaacttatatgccgaatgcctctaatgtcttattataccacttttaaatttactgtcataatttttggaattatgtaagaattccaataataattaacattaattatgaagtgtttttagccttagccttggctcaccatttaaatctataaagaccataaaaaatgggtatcagaatataactatctaataactaatttctctaaacttatttttaattgcctacatatcttgatatcataatttcattttaagtatctttcctagtcaacttttgtgatgcaatcactactttaactaacacggattgaagatttcatctcgggcacgttcttcttttggttacagtttcgctttcgatttggtttttgtttcaagaaccaggcactttcactgttaaaaaacacacacctctggaaggtgactccactggccagctcgatgttgttgctcctggcggcgcggttgagtgcggtgatgcccttgacggccaggcaggtggccatgtcgtcgctctccagacaggcgcccagataccgggcggcccggcccagggtattgtcgccctcgacctggttgtcttgaacactgggcgcggcaaagacgcagctggccgccaagagggtcacacaagcgatggcaaacactttcattttcgatcgattggtatttagacgcggttaatccttgctaatatagctgatccggggtttcaattctgggcttcgggctgctgcttttctgagggagcgctgagatgagtttgatgtatgcgtctccggacatctagccttatatattgggcctctcggtcggcgtcgcagtcggtgcgcattacaaaacaattcaaaagtaaattaaataaagcccggcgagagacggcggaagttatggccaagacgcgaaaagagcgaactccgaattggagacagggcccaaaaaaagagtcacagacgcagccgcataaatctagagaacggcggggaaacaaagtcaacttgtttgttaagtgaacatgttcatttcggtctgcctttttttcggcagcgccgctccggcgacgtcgtcatccgtcaacgttggcgtcgcggagagagaaactcgtacttggacttggtcttggtcttggccattggccaaaaaggggcgccctggagtaaacagtcggcccattggcttaggtctgcacagcgacaaaaatcagctggcttacataaccggggtggtccacggtatcacttataactgcattccttgggctgtcttgaatcctaaaaagtctcagattattgaaaccaaaaagtggtgctttgggtccccacggacacgccttcaatgaagctggggccctggtgtttaccggtggtctgagccctcggcttcacgtttgcgcccagctttcatcagactctcgcaatggccaagtcacatatttgctaatttactgacgcttcttaaccgatccggttgccgtatatttcacgcagcccatttatgaacgcaaaaatgtgtttttctctttctccggcattaaatgggtcagtcttatttgccgtagttgtttttttattgttgggatatggtgaaatagtgtttagcacttcgatgattgaactggactgtgtggctaatgtgtctatgttgtaataattgaaagttaaaagggctgtgtggatggagaaggaggtcattgagaatttatataacaagctgaaaggaatttgcactaacagaatgataaataaccttagtgcagg

SEQ ID NO: 485 - DNA, 1072 bp, DROSOPHILA
ctcagcgctccctcagaaaagcagcagcccgaagcccagaattgaaaccccggatcagctatattagcaaggattaaccgcgtctaaataccaatcgatcgaaaatgaaagtgtttgccatcgcttgtgtgaccctcttggcggccagctgcgtctttgccgcgcccagtgttcaagacaaccaggtcgagggcgacaataccctgggccgggccgcccggtatctgggcgcctgtctggagagcgacgacatggccacctgcctggccgtcaagggcatcaccgcactcaaccgcgccgccaggagcaacaacatcgagctggccagtggagtcaccttccagagggatcccgccagtcccgtttcccgcacgggaaaatcgatgagcgagcaggatgtctatgccgagctgccccagaatgccgatgagcgtactggtcgtctagtggatctggccgtctctagtgccgccgacttcctaagcacccacaacctggagttcaagctgcccgccgagaccacccagcaggtggctcgtgccctcgatgaaggccgtggcaagatcaagaagatgctgggacccgtggctctggccattggcgccaagctgttcgccgtcattcccctggtgctcgggtttctggccctgctgaccttcaaggccgtgatcgtggccaagctggccttcttcctggccattctggtcggcggatcccgcctgctgggcggattcggcaacaagttcggaggtaactcctttgccggagcctacaactcgaacgcatggtccgcacccgccagcgccggctggagctcgggagcctcctcgtcctatccctatgcccgcagcatcagcgaggatgggtccgatgcccagcaattggcctacgccggccagcagcagcagtagaagcggctgggagacagctcaaacagatgtgccttcgttttgaaacctttagcctgtagtaatttattcgaaatgtaattaactaatttattgacacaccacgcacacatcacccgcaagtcaagtcgaatgtatgaataaaaccaagagtattgcacccg

SEQ ID NO: 486 - protein, 268 aa, DROSOPHILA
MKVFAIACVTLLAASCVFAAPSVQDNQVEGDNTLGRAARYLGACLESDDMATCLAVKGITALNRAARSNNIELASGVTFQRDPASPVSRTGKSMSEQDVYAELPQNADERTGRLVDLAVSSAADFLSTHNLEFKLPAETTQQVARALDEGRGKIKKMLGPVALAIGAKLFAVIPLVLGFLALLTFKAVIVAKLAFFLAILVGGSRLLGGFGNKFGGNSFAGAYNSNAWSAPASAGWSSGASSSYPYARSISEDGSDAQQLAYAGQQQQ

SEQ ID NO: 487 - DNA, 4037 bp, DROSOPHILA
gccattctgccattctgccattcgatgcgtaatgtaagcactgtgggtaacacccccgtgggttgttgacacacagttggctcggtggaactgtgccagtaaaatgctactgctacttttgttttttcggtgctcatgccactgatcgtagcccagggccacattcccgaaggtaaacaatgcacaagagcgataagatatttgtatgtacctatgtacgtatgaatgtacgtatgagccagcgatcgagccctgaatgacttccattcggctttcaattgctcaagagcctctggccaaatgtgactcgtcgcattgcggatacttctggagatacttgtggtatggagaacatcaggggattagtaagggcaactatatatacatatgatgaataagatgtttcattttatcctctattttgtgtgtccaactggttaatgcggaagcgtgtctatagcagttaaactactggctggcaattagttacagtgattagcacagttagaggttgggaattgctcagtgacacaacatgaaaaagatgtcttaacctataatcattctttacactatacgagtataagtataagatagtcgctgaaatatgaatagtacatatttgttgagaattagttgttggaaaaagaagaagcaattttaatctgttagaaatgttagcttattcgaaatatttgaccttcttggcagaaaaatagaagaatgcgaaaaataaattcacggcctccgaacataatatttgtgtcatttacaattatttaataattattcatgtttgcttgccgaacaaagacaaaatatgtacctatccatttcatttgagcgcgaaagccaactgtgcaaatggattccattgccatttcgccgtctgaactcaataactcggaacgtggtcgtcatcaaatgtggccaacttaaatcaaacacagttgtttcaaccaggctcttgtttttgcaatggttttccacgcgaaaaggcctagaaaacggcgagcacgaaaggttttttcagctgcgcagccaggcacttgaagactttccatggaaaattctcattggcgaacgggggtaaatatggctatgaattaaaaatgggaaaggcaaatagctgatggcgacaaatatgcgttaaataattatttagtatttgctgccgccgctgtttatttgcgaacaaaggcactttgcatgcgcctgctgccagctgaaaactccagtccgcaattattctacgcgctcgcgtatttattttttatcattgatattcaattatggttatcgccaattgcgctaattggcaacgcagtgaaaagacacgcgcaaataaacttttattattttcagggggaagccaaagaggggttccttgatcgacagaaagaggctttcatatactcaagcttatgaatagccccctcctgacgattcgggtacttggttgtcacattcacattgtcacggtgatacaactatctgggcagaggaaaccctattttcccgcccgaaatcgtaacggaaattagttttgccaatcaaacgggaacgcaataatagggaaaactgctcttatgtgagtgcagaaagaggaatgtagtgcagaagagatgttttaataaagataagcactagcaaccttttaaaaaaaaggaacgattcaaagtgtaacttaagaaaatctaatgatatatagtagagtacccttgatttagctagtgagaaacttcaatatgttgttggcatatcgattgaagtagcagacaaaaacaaaataaataaaatccatttgtctgttacacacttttctaggaatctagtagaatccactgactccacgggtgcagaaacaagcattataaagtggaatatttaggcttagatatattaaggttcgagtttctggcttgatcaaaggagttttgtaggaggaaaccccaaataagtttggaatttcaagtatggagctttgaagcacacgcgcctcccaaaaagccaccacacttcggctggacttcagactgtctatataaatatgccgaagcaaaatatatttatgattctaaaacttgcactgtacgacaattgaatttaaattgaaatgggaatgccgccagtatcagattcgaacaatcaaagcaatcttttataaattggtatgcaatcgtcgatccacgcgttcgcggatggatagcgacgactaggcgatgacgcagcgaagaattctacaatgccgaagagtcaatctggaattaaagagtgtgagtggcggaattattgaggcgtattattgcgcaggggatttcacttacctctccataagtcgctgcgagtggagaaacgcccttttgctgccgtaaaagctcctgcttataccgttgctgccgctccacgggcgacacctggcggtaggaatccgccgaataatgggacaccacaatgcccacgccctctattagggccaatagagccccgcccaccaaggcactactgagcatggaggttagtcctgccaaaaagaggaataagcaaaaaagtaaatattcgcatattcgtgcgataatagccataaagttaagcagaaagaaaaacaaggcaaaaaggatataaggatataaaagtcctgagaaagcattgaaaaccagcctggtttactaattgttaatgcatttgtctgaaaaaaaaaactttaaaactcaccagttctagcagcaagaatgcccccggtggttgctccactaattatggcgttccacgggtcctccttcttccggaagtaaaccagtgagcagtcgatggcgctgaaggtagcgccccacaccgcaaagttaccacccaccaggccggatcgagcccgtaccgccgccaatcctccgctcaatcggtatcccaggccggagggggcgtttcgaaagcccttgatcgcctggaaggctcctccgcccaaggcgcccattgcgaaggctccaccacaatcctcgacaatgcgaaagggacaaggctcccgaccgtactccgccatgtcagttgattatcggactcaggagagttcagtcgataaaattgatggggtgacagacacacacagcagaatagatggacaagtcaaagcctccttgagagcgattttcaattcaaagtttcattaaaaaacttttaaagcaaatagaaaaaattacattttaaaattagaatcagtaattagaagcactcgacacgtgtgttattccttacaaattacttatacttcatacttttccgatttaattctatcgaacacctaaggacaagtcacatgaaaatcgtgacttctcgccaattgtttaaaggctgatctaacaaaaaacaaaacagatcaaaaaccgtttaaaaaaacatttaaaatgcgtcgttttgccgtatttggacactcgctgatcgtcaagataatcattacaaaacgatagcaattgcacaacaaaaaggttgaataaaaaaggcaaacgggctgccaataaataaattgttattacccggttatggtcacaattcgagctggaaatttgtaagtgataaggatcgcaacagattgcgctccgatcgctacaagcccaaatattccattcccaaccgatttacaaccactctcccacttttccaggagcaaatcgcgcagcgtggatcacggccttgcggctccattcgacttggactcgctccgctccaaagtggagcagcgcttcgagagcgtcgacaaattatcaagtaagtcactattcaaataagtataatttaattagacagacttaaaccgatggagaatctttggttagggcagcagatggatgcagaattatatgaaaatcattttgtatttctcaaaacaaatacttatttcgggaaggatccttgctgaaccccggcttaagccccctgtatccactcactttcaattaaaatagttcaatttaaacttatatgtaatatgaatgtaaaatttgtgtagaactcgtaggttcctcaagtcaacgctagggtattct

SEQ ID NO: 488 - DNA, 618 bp, DROSOPHILA
atggcggagtacggtcgggagccttgtccctttcgcattgtcgaggattgtggtggagccttcgcaatgggcgccttgggcggaggagccttccaggcgatcaagggctttcgaaacgccccctccggcctgggataccgattgagcggaggattggcggcggtacgggctcgatccggcctggtgggtggtaactttgcggtgtggggcgctaccttcagcgccatcgactgctcactggtttacttccggaagaaggaggacccgtggaacgccataattagtggagcaaccaccgggggcattcttgctgctagaactggactaacctccatgctcagtagtgccttggtgggcggggctctattggccctaatagagggcgtgggcattgtggtgtcccattattcggcggattcctaccgccaggtgtcgcccgtggagcggcagcaacggtataagcaggagcttttacggcagcaaaagggcgtttctccactcgcagcgacttatggagagccatatttacccccgttcgccaatgagaattttccatggaaagtcttcaagtgcctggctgcgcagctgaaaaaacctttcgtgctcgccgttttctag

SEQ ID NO: 489 - protein, 205 aa, DROSOPHILA
MAEYGREPCPFRIVEDCGGAFAMGALGGGAFQAIKGFRNAPSGLGYRLSGGLAAVRARSGLVGGNFAVWGATFSAIDCSLVYFRKKEDPWNAIISGATTGGILAARTGLTSMLSSALVGGALLALIEGVGIVVSHYSADSYRQVSPVERQQRYKQELLRQQKGVSPLAATYGEPYLPPFANENFPWKVFKCLAAQLKKPFVLAVF

SEQ ID NO: 490 - DNA, 3566 bp, DROSOPHILA
tttgtgtgttgatccttttaatttttcttatgaagcttatcctgatgtactctgtgtcgttgtggttgtagttgtggtccacttgttcctgaatttttctccaaatctttcgaacaatttggttccattgttattgaaaggcgggaatcggagctgtccaacattttccacttcctcaaccacaggggcagcttcgattggctgctcggtgttcacagcatcatcttcagttatgaggggttttccatcatcctcgacaggaagtgcccaggccaaggataccaaaaggccaacaatcaaggcgaatttaatctgacagccaatgagtttgttgcttaagccgttcatattgattctgttgacttttggtcagcatgagtggtgtttttataccaacgccaagtgggacatttgattaaacatcaattaggaagttgacgcaaagaaagccacgggcccaaactcaactttgctaatataattaagtggaaatgtgtcttcaatggatttgtttttgcaagaggttcaaggaaagtgtttaagtaaaagccactaatttcactttccagcttgatgctcacactcttcctagtgatttttcagaaaatacctttgagactcaataaggaagctttgagccggaaattatacaagtcattgcctttttaaaagtataatacctgtacatttccaaagtttccgactcgggcaaaaagtttaaagattctatggttttgcatttgatgaatcatttttattcaattgctttaagttgtacgaataaatacttagtaagtaagctctttagcaggcataatcttcgttgctttcgatgaacctgagtgacatgtacgaccgccaagagacatgtggatggggaaatgtgcaataattatggcgcaatcattgattggccgtagtatccttaagcattgtcctttgggctagccaagagtcgagggaccgtttcaatagttctctttttttgtgattttttttggtatgtcgcagctaactaactaaatgtaactaaataattattgactacgaattaggccattcttcaggaaagtcttagagggataggttgtggaaatggtgatgaagtggggggaagttgaagaagggagacgctttggtaggataagatatagcaggtgaaagatagaggctagtacagagtgggatggatggatcggtgggtgttttccggcttagaagggctgggccagaccatagtggttgtaggccagatcggcggcacctgcctgaccattgcggctccagtcggagtgcacgatgtcggcgttcagcgggctgccggtgatgtaggcagtggtgatgtgttccttcttcttggccaacagatccttgaagaaggtggcacctgtgcgggaaacgtgggtaaaaagtgctattcctgagatcattaaaagtaaactcaccagccaggatgagggccaggaaggagatggccagagccttcagcgagatgaacttgatgatggtgaacataatcttgacaacgacggccttcttcagcttcagggccaaaagaaggggcagcagcatcttcttcatgcgcttgctgcgggactctgtttattccgggagggagaaagtaaagagaaatcggggttttagccatgctcctaaaagtattcaaggcctggcagtcgaggtaaagctttcacttcgcttcccgtcagcacaactgagtatgctagtagttttgcttttggcagttggctttctgcacagcagagtggaccttagtacgtttagccttagtaagtagactttgaagtgttcgtttaccgtacagaacaggaacgacttgagagccaggacggtttaccaaagctattctcgtatgcgcacgaatgcctctgtttttgtagtaattaataaaaatgtaacttataactcgtttaaaattatttcaaaattctttggctatcaactcacgtatttactaccattctatcgatttatgtctctcaaaaacatacaaatttttaaattctgacctaatattaagtatctaagatattcaacgcaatatgaaaactttaaaagcaagtagcttaaatagcttttttttctttggattaaactatattctgtttttcaaataaaggaaaccaagatcactcaccatccatggcgcgtccggtgtactcgttctcggagttctcgtcctgctcatcgccggagaaggagaggtttagctcgtgggtctccaggtagcgctcggcgcggtcctcgaaggactcgacggccttggatgcaccgaagctacggcccgactccgaccggtcgatcctcagaccgccgaacagcgcgacggactcctcgctgtctaagcggttcagcatgttgaccaggtcccgctcggtgttgtcctgggagggaagggccatggaaccgcacacaaggctggccagcagcactacacatacgaatttcgcgcacatttttattagcacttgggggtgtcttgactttgggtaggttataatccgtgggacggctgcctggagctggtgagtgctgccgatgtgaacgggaatcgctttgtgattaattgaatgcactgcccccgcgttttataccatttcgatttgacgtcgattgaccaattttgtggctagaaatcgcgtggcaggccaaaaatccaaaacgcaccgctcgccgctgcaataacaataacaataccgaacggcaataccaaaaatccaaaagcaatttatgcaaagcatatgcgtatgctacctggccggcagtttcttgaccatatttccacgcacgtcgcgatgtcaacgaaagggaagtggccagtggtcggccggctgaatattatttttttgtatataccatacatatattttatataagcaagtggcccgatttcgggtgctcgaccgttatccgtatcctaattggcattcaatggagtcgccggtgctacgtgttgggattgcctgcgccagattcttggccggttgttcctctccattagctccatcagggctcacgatggagcggagaatatagtggtggatctgcgagacccacacgtatttggtatgccccgccggtggtgacttaatgcacaatttggcccagttagttactctggcgctttcaacgctttcgatttcattctccctttgtcaactgtcgttcgtggcttgttttctatttcaattgcttctaaatctgcctgtgaaagaaagctgaattgtagcacatcgccgcatatatctcttttcaatcgcaaagtgacacttttatgagcataagtagaaagtttctggcaaacaattaacatgccgaacggccgtcacatggccactagaaactccaattatgagcaggccaccaacttgccaaaaactaaatccccagcttatcagctctttttctcaacattttctgtgttcttttgggtttttttttgtgttcagaaacagaacctgccacaagttttaattgccagccgcaaacttgttgccgcccagcgagcaaagttccacatatttgttttggggtctgtcagcatt

SEQ ID NO: 491 - DNA, 948 bp, DROSOPHILA
ttcacatcggcagcactcaccagctccaggcagccgtcccacggattataacctacccaaagtcaagacacccccaagtgctaataaaaatgtgcgcgaaattcgtatgtgtagtgctgctggccagccttgtgtgcggttccatggcccttccctcccaggacaacaccgagcgggacctggtcaacatgctgaaccgcttagacagcgaggagtccgtcgcgctgttcggcggtctgaggatcgaccggtcggagtcgggccgtagcttcggtgcatccaaggccgtcgagtccttcgaggaccgcgccgagcgctacctggagacccacgagctaaacctctccttctccggcgatgagcaggacgagaactccgagaacgagtacaccggacgcgccatggatgagtcccgcagcaagcgcatgaagaagatgctgctgccccttcttttggccctgaagctgaagaaggccgtcgttgtcaagattatgttcaccatcatcaagttcatctcgctgaaggctctggccatctccttcctggccctcatcctggctggtgccaccttcttcaaggatctgttggccaagaagaaggaacacatcaccactgcctacatcaccggcagcccgctgaacgccgacatcgtgcactccgactggagccgcaatggtcaggcaggtgccgccgatctggcctacaaccactatggtctggcccagcccttctaagccggaaaacacccaccgatccatccatcccactctgtactagcctctatctttcacctgctatatcttatcctaccaaagcgtctcccttcttcaacttccccccacttcatcaccatttccacaacctatccctctaagactttcctgaagaatggcctaattcgtagtcaataattatttagttacatttagttagttagctgcgacatac

SEQ ID NO: 492 - protein, 214 aa, DROSOPHILA
MCAKFVCVVLLASLVCGSMALPSQDNTERDLVNMLNRLDSEESVALFGGLRIDRSESGRSFGASKAVESFEDRAERYLETHELNLSFSGDEQDENSENEYTGRAMDESRSKRMKKMLLPLLLALKLKKAVVVKIMFTIIKFISLKALAISFLALILAGATFFKDLLAKKKEHITTAYITGSPLNADIVHSDWSRNGQAGAADLAYNHYGLAQPF

SEQ ID NO: 493 - DNA, 3495 bp, DROSOPHILA
tacaaaaggacttgtcttggtgcgtcataaatttcatggtttgaggtgcgactgcagagcagactgacagtatgaacacgtgacgccgggtctcttaattacatttgcattattaaattttatgacagctgttggactcaataacgcctacgaactgaccccaggtcgctggttatgggacgttgcaatcccaattaaatccccgctacctttaacagaaatgaagcatttgcattttgtggcatagaagaatatgaatcctttataaattatactcaaaaacttctccaacaggtgattctagttttaaaaattaagaataaacttgtatatgtaacagaagttcttaactagcacctgacatgtggcatgtacatacatatgtatgactgatgccaagacatgggcggtgcatcggtgtgtccgatgaggagcacacgacgaccaacgaagaccaatcgtaatagggtggggctggcatagtgctcctaaggaacaggggtctgctttcaggaaatatttcagtgcgtcatacgtggataatgcaaaagaacatattggccgaactagcatttctattacatcacgtgaacgagagtgtatgtacgtgcgatattttcttgcaggacattgtaaactaatcggtggggtgtctcctatatttttctgtaaataaacattttcgatattgccgagcagactcggttctgcctagattgtggtccactgcatccagttgagcatcatataatttcggataaaaatagaatgtaaaatatttatgtttagaacttgcgcagctcattgataaaagcccaagcgccggtgcgcactctctcagtagaaacggacaaaaaggacatgaaggcgaaactggacgggaaaaatcgagagaacaggctttctcatgagcataaaatcctgcaagatattatacatgccgtggccttttatgctgctgttcttatatcatttcattcagtttcgaagagtcgtgcaacgagagcagttgaaaccattgtctttaaacaaattctgcgctgtgtctgagtctggagtttttctgtgtgtataacttacggttggtctcaaattttatgggttgtgtgcaagtggaatttgaataaaagcattattgtaaactaaactaaacagcaggaaaaactgcgccatagtgaactagcaacctgtgccgaaagggaaaaactgagaaaaaatccaaactcatgaatattgatgaatttccttggtgcaaatgtgtcgtgtgtgtgtgtgtgtatgttgtatcaaaagggcatcccagttacagtgcaaaaatgctattttcgaataaaaatgaactcttcgatacattttgatctgagtcataccttttctgtaactacaattccaccatattttttcattgagaaatgggttattttttcgcagtgggcagcagcagaagtcgcaccatgagaattaattgcaacgcgcttttcctggcatcgctagtgacttggtcgggggtgatgtgcagcacggtactgggcaccacagaaggccaggaaacacctttggcccttcctgtggcggagcagacgcagcccactacagccatacaaggagaagtatgggaggaggacgatcacgaagtgcttataagaaatgaacgtggcaccaagagcgacggtgagtcgggggatggttgagcgcttaagggagattgggagtttgtgtgagttctctgcgaccaggagctgctttaatacactgtgctccttttttcctcaaggtctgtcttgtcgatatggcaaaaatccgtggactgagtgtgacaccaaaaccaatacgcgttcaagaacattgacattaaagaagggcgacccggcatgcgaccaaacgcgaaccattcagaagaaatgtaaaaaaggtaataagataggataggactcttcgtgttcgcctataagaaggacttatgccaattgtcatcctcaaccctcccaacagcctgtcgatatgaaaagggatcttggtcggaatgtgcaaccggacaaatgactagagctgataagttgaaagcgagcagtgatccgtcctgcgaagccacgcgggtcatcaagaagaactgcaagcccggaaagtccaaggacaaaagtgccaaggagcagcggaagaacaaagataaaggtaagttgactagttgtgaatttgaatagcacattgaaaagagttggttaattggtctgcattaatttggggttttatcattgatatgttttatggcaaagaccactaagcccaaatttcttctatttacatgcagctgctcgcaaaggacgcgtttaagtgatatcgaactcgattattttaaattccagtgttattttgtttgactccaatgcaaataactataattgatttttttaattcaaaactgaaaaatcgtaacgacgttaactgtctgctatgtatacccaaaggcatttaaataaaatgcacacattaattaatgttgtagtttgatttacaagcaaacgaaacgataaccataatataaacgaaagctgtacgacgtaatagaaaccttgcggagtctaaaatatgtatgcaatgcagaataagatatattcatacaataccataccataccgacataaataccgacttatttagtttattacccaatgaaaatcatatgtacatccaagccaacacctattaccattttatctgaaatgatgaaatctgtaagggcagttgccgtattgaaataaaggataattcttaaatacagcctcctagactgcgtggctgttgggtccccttcatacacttagcagagttgttcttcaatggaatttaaataatattaaccgtaaaatcggaatgaaacccaaataaataagatatactgaaaacattttttcattcacagctaacaaataaataaaacacttagtgtaaatattgtaaaaataatgacatactgtagaggaaaaatttctgaaagacgaagaatgagacgcgacggtctaaacacagatccatcgtagttgcagtgtaggcaattggcattttaaagtagtttacaactcacttctaccgggtacaattaacatataaatttggaagtatgattcccaaaactaatatacaagtcgaaatgcagacatacttacatacttacattcatatatattctgatcaaaaacttaccatttcaaagatgtggtttatctttttaataaacacgtacatatataaacttagagcgttaactacgaattaatgtatctatctgtaagcagttttacaaccatacccgtgcattcacaactacgaacgacgaagtcgaggagaacaacagctcagtcacagcattcaaattcatagtatgaattttatacacatcatccgtaggggcagttatcttctttaagtctttgaattccgtaaggaacagcatgaaagcgactcccccaaagggaagtgaaatttgtttacgtacgt

SEQ ID NO: 494 - DNA, 855 bp, DROSOPHILA
cgagagcagttgaaaccattgtctttaaacaaattctgcgctgtgtctgagtctggagtttttctgtgtgtataacttacgtgggcagcagcagaagtcgcaccatgagaattaattgcaacgcgcttttcctggcatcgctagtgacttggtcgggggtgatgtgcagcacggtactgggcaccacagaaggccaggaaacacctttggcccttcctgtggcggagcagacgcagcccactacagccatacaaggagaagtatgggaggaggacgatcacgaagtgcttataagaaatgaacgtggcaccaagagcgacggtctgtcttgtcgatatggcaaaaatccgtggactgagtgtgacaccaaaaccaatacgcgttcaagaacattgacattaaagaagggcgacccggcatgcgaccaaacgcgaaccattcagaagaaatgtaaaaaagcctgtcgatatgaaaagggatcttggtcggaatgtgcaaccggacaaatgactagagctgataagttgaaagcgagcagtgatccgtcctgcgaagccacgcgggtcatcaagaagaactgcaagcccggaaagtccaaggacaaaagtgccaaggagcagcggaagaacaaagataaaggtaagttgactagttgtgaatttgaatagctgctcgcaaaggacgcgtttaagtgatatcgaactcgattattttaaattccagtgttattttgtttgactccaatgcaaataactataattgatttttttaattcaaaactgaaaaatcgtaacgacgttaactgtctgctatgtatacccaaaggcatttaaataaaatgcacacattaattaa

SEQ ID NO: 495 - protein, 187 aa, DROSOPHILA
MRINCNALFLASLVTWSGVMCSTVLGTTEGQETPLALPVAEQTQPTTAIQGEVWEEDDHEVLIRNERGTKSDGLSCRYGKNPWTECDTKTNTRSRTLTLKKGDPACDQTRTIQKKCKKACRYEKGSWSECATGQMTRADKLKASSDPSCEATRVIKKNCKPGKSKDKSAKEQRKNKDKGKLTSCEFE

SEQ ID NO: 496 - DNA, 2669 bp, DROSOPHILA
taggcctcaagtttaattttaaaatgctgcacctttgatgttgtctctttaagctttgtatttttaattacgaaaatatataagaactactctactcgggtaaattgtgactaactacacataactacatacttagcccatatttccgtccctttctagaatgaacgaaaacagtatctggttttcccgaaaatcttatgaatttaaaaatgcactttattgcacatactcacacatgcctgccataaaatatgattcgcgatttttccgcgaacacccgcggatcataaaacatttgcaccagctgcctgtgtttattcacctacctgaaacccatactcttatcgcctgatcctcgcgcggtcgcactatttaggtagacactgtacaggcagcactcgcggggcgccgccaggcaacttgttgcccctattttctttgatataagttttgggaaatccagaagtccaataacggggcctatatgaacgaatattgattgggtttctcccagttatagagtttttattgatcttgggcgcgttttagtaggtggattatggatgtcctgggaaaaccaagctctgaatccattcttacttatcacaagacttgttttcctgtgcccttcatcacacctagtttaactactataattaataaactactttttaatccgccatttatgaagataatttatagcatctatgcatctttcaaatatcgcgagatatcgcaaagtattcataaattagttttttattgatattgtaaagctttttaatttggttcaggtttttattgtaaatacttttcacaattgtgcacagtgacccattaacatggttgcgatattaacttaagacttaaacaagttaattaagagttttagcacttcttttcaaaagatcatgttttaattatgtttttaaatgaatcttttcgacaattctaaaaatattatttcgaaaatgttaattttcatatataacctaagtaaagatattttcaactgtacctcactctcgccgcgacatttccacacggttatcctgttatgacttttcctttgttccaacgtatttttagcgaattctcggaaggagaaaatccgatagcgccagtaataaaatttgcgaacaattccctagttcgaggactgaggatgggaaggcctatggaccggagacccgagacagattcgcattcgccgcgtcggagacttgagcatatactccttggaaacaagcagagccataaactgtccaaatcgagcatgaaaccccgaggagcatcctttctcacagcgctgctttcattgcattatgaggataattgcggacggcgagcgaccaaaagccgcgacaacagcttcggtttcactttcagcgccgccaccggaggctctttcaacaggtgctacaagttggacaacaatcgcctcggatctccgatcatcatcagcccgtctacctggcgagactccggctcttgcggcccaggaaccctggaactgtctctcacgcaacgccagatcctggcaggatttcgatcaaaacaagcctctagattgcccattgccaatggccgggagtcgtcggacttggctagtctccgaggtgccagtcgggcagtccagcgacgaagggatttacgactcgcggcttaggcaaattttttcgcaacgatgcgtcggcggaattgacctgttatgtcgtctacctacaagccctcctatataagcatgatgtttgcttaggacgacagatcattccacttttgacagctcactcggcagtaccagaaaaaatatgtcatccgtcatgcactactatccagttcaccaggctaaagtcggctcctattcagcagatccttccgaggttaaatacagtgatgtgagtactcagatcaaaaatcgaatatcagcaataaactaattagttgtttacccgctttcagttgatctatggtcatcatcacgatgttaaccccatcggtctgcctcccaactacaatcagatgaactccaaccccaccaccctcaacgatcactgctccccgcagcatgtgcatcagcagcatgtgtcatcggacgagaatctgccatctcagcccaaccacgactcgcagagggtgaagcttaagcgatcacggactgccttcaccagtgtccaactggtggaacttgagaacgagttcaagagcaacatgtacttgtacaggacgcgcaggattgagattgctcagcgcttgtccctgtgcgaacgccaggtgaagatctggttccagaaccgacgaatgaagttcaagaaggacatacaaggtcaccgcgagcccaagtccaacgccaagttggctcaaccccaggctgagcagagtgcccaccgaggcatagtgaagcgcctcatgtcctactcccaggatcccagggagggcacagcggcagcagaaaagcgtcctatgatggcagtggctcctgtgaatccaaagccagactatcaagccagccagaaaatgaagaccgaagcatcaaccaacaacggcatgtgctccagcgccgacctcagcgagatcttggagcatctggctcaaactacagctgcaccacaggtcagcactgccacatctagcacaggaacatctaccaactcggcttctagctcctc

SEQ ID NO: 497 - DNA, 669 bp, DROSOPHILA
agatattttcaactgtacctcactctcgccgcgacatttccacacggttatcctgttatgacttttcctttgttccaacgtatttttagcgaattctcggaaggagaaaatccgatagcgccagtaataaaatttgcgaacaattccctagttcgaggactgaggatgggaaggcctatggaccggagacccgagacagattcgcattcgccgcgtcggagacttgagcatatactccttggaaacaagcagagccataaactgtccaaatcgagcatgaaaccccgaggagcatcctttctcacagcgctgctttcattgcattatgaggataattgcggacggcgagcgaccaaaagccgcgacaacagcttcggtttcactttcagcgccgccaccggaggctctttcaacaggtgctacaagttggacaacaatcgcctcggatctccgatcatcatcagcccgtctacctggcgagactccggctcttgcggcccaggaaccctggaactgtctctcacgcaacgccagatcctggcaggatttcgatcaaaacaagcctctagattgcccattgccaatggccgggagtcgtcggacttggctagtctccgaggtgccagtcgggcagtccagcgacgaagggatttacgactcgcggcttag

SEQ ID NO: 498 - protein, 203 aa, DROSOPHILA
MTFPLFQRIFSEFSEGENPIAPVIKFANNSLVRGLRMGRPMDRRPETDSHSPRRRLEHILLGNKQSHKLSKSSMKPRGASFLTALLSLHYEDNCGRRATKSRDNSFGFTFSAATGGSFNRCYKLDNNRLGSPIIISPSTWRDSGSCGPGTLELSLTQRQILAGFRSKQASRLPIANGRESSDLASLRGASRAVQRRRDLRLAA

SEQ ID NO: 499 - DNA, 3467 bp, DROSOPHILA
tgtgctctacaaccgtcgttcgcggatgaaccccctctacattgacgtggttgtcggcggcgtggacaacgaggggactccgtacctggccaacgtggatctccgtggacgatcctacgaggactacgtggtggccactggttttgcccgccatttggccgttccgctggtccgtgagaagaagcccaaggacagggactttaccgccgtagaagcttccgaactggtaaggaatttcgaactctgatggggggactcttcattatttaactaccctaccattttcttatattctagatccgcacatgcatggaggtgctttactaccgcgatactcgtaatatttcccaatacactgtgggcgtgtgcagcgtcaacggatgcggcgtggaggggcccttccaagttaacgaaaactggacattcgccgaaaccataaagggatactagagcctccgattctgaatgaacttagtttaggtctagctcggcggttttgcattaaaaaaaaacacttgtctaaggatatgtggttacatgatttattaaaaataaatgtggctgaaaataatacgtttaaagttatggttattgtgtgatagaaactatcttcgagttattctttcgttaatctctactgatggaatcaaaaagtaggcgtcaaactaagaagcccaagggagtttccaaatctaacttggactcaccattacggtcttacgttccttattttcccaaattataaccatcaattatcattaaaagttttattttagtggatttgttggttattcctcccggcattcaacttattaattaatatgcaaacactcctgacaaacatattttggtttattttaattaacataaaatctggctaaatatacagataatcaatttgatccaaaggggaatttcgcaaaggataactgcttggaatacgtgtcttaagtcgcccatgcgcctcctaatctccgccagctgcaaaccgaaccccttgttagtttagcatggtatgcctgtcgtagatgtggcgtctctgctcgcgcacctgccgcttccacttgtcctgctggtggcccacacgattgaggacattggctctggcactgagctcctggttgttgacggctggcaggggcggcgttggttcatcctggttagaaaagggtggaaaaatgtggaattagtcgaggtgatccaagatctggccgtgttagttactgtcttaatgaagtgacggtgtgggttagaaagtcaacaaaatctataacgcaaaatgaaacaaaggtggttgtggaaattaaaatctattcaaaagagtggtgcttctttattgccaactagttgagccgcttcggcatcaacatcgtcatcttcatcatcttcgccttgggctgtaactaggaggctatactgaatgcccttgtatctagaaagcttgttatgtacatcttcgttggtgtgctcctggtagttcgccttcactcgcttgttcagcaacgggtccaggcacatcaggaagagcatgtatattactaaaatggagatgatccaaatcacaataatgaccacgacctggatgggggagagagctggttaagtacggacggcttttgagcactcgaattgactcacctttatcagcgtcgtatttctcgccacatgggagcacttgcactcggcgcatatgggcagctccttgccattggcatccaaacggggcagcagggcaccggcacagacgctgaaatggtaacgtgtagcaggttgttaagaactccaacctaacagaatcacaaattaagctcattgataccaagatgccttatacatttagtagctgaaaagtgaatacatttgtgcaatacatgaactatgattctttgaagcctacgcaaacaacgtaaattgaatttaaagtagtagaatccagtgggacgaaagggattgcagctttaaaactgctcaaatggactagactttaagtttccagatgcggcaatttctgccagtgcagtgccacttaccactcagttgtgctgctggaattggaagaatttttgcctggagcagcgagcacaggctggccgatgaccttggccggaggggcggcagtgggagctgaaacttgcttggctagtggagctgcagccgctggagctgcaggtgcaggcacaggagcaggttgagcattgctgttgttgttgctgttggtgccgatcgctgggaatgtctgcgccgcagtctcagcctttgttgattgtttgagggggaaatgaaagcggattagtggggcagtcacgggatgtggccagtcatcatacccatgtcacgccaaccaaataacatatcaccagtagcaccgcgtagacgaacaggcgcttgtgtgccattaatttttctttaatttcaattttcctcagttttcttgccttttattggagaaaattcccttgcaatttcgcagagtgaccgtacttgtctggtgcacagaaaataccaacaaattgtcgctcatcgaactagttccttttggtgcaattagtttttaggctaattattaataactaattatttccttcacgatataacgttcatttaattctaaaacaatcaagaaataagtttctaggcgtatcaataaatctgtgacgtcaaattcgtaatctgctctctgaaaagactaattatatttttcctttattcaacatttattatatacattaagctattttccgttaatggaataagttacagcaatatggagtttgttatagtattatgtttatttttttcggtgagtccataatttggattttaccgcagcctggtcacaccagcaccgtcaaaaatagcaattgtttgcgtgtgcaacgctgatttcaaccgtaattgccggtacagattgactgacttaggtccacggactaggatacgataactagaacaggacacgatgcagcacatactacttcttacaggactggcgctggtaggcagcatttccaggggagccggtaagtggcgacctgaaacaaagtcgcgtctatgtggtcttctctgattggccgcccctctttctgaaccttccgtggccatagttaatgcttatcttatattctatcttgaccctgctgaacacagccaccgaatccaacgtggtcacctgcggctccatcctgaagctgctcaactcggactacgccttccgcctgcactcccacgacgtcaagtacggatctggttccgggcagcagtcggtgacgggcgtggagcagaaggaggacgtgaacagccactgggtgatcaaggcgcagaccggcgagctttgtgaaaggggcgagcccatcgcctgcggatccaccgtgcgactggagcacctgtccaccaagaagaacctgcactcgcaccacttttcgtcgccgctctcaggcgagcaggaggtgtccgcgtacggaacggat

SEQ ID NO: 500 - DNA, 755 bp, DROSOPHILA
cgaaattgcaagggaattttctccaataaaaggcaagaaaactgaggaaaattgaaattaaagaaaaattaatggcacacaagcgcctgttcgtctacgcggtgctactggtgatatgttatttggttggcgtgacatgggctgagactgcggcgcagacattcccagcgatcggcaccaacagcaacaacaacagcaatgctcaacctgctcctgtgcctgcacctgcagctccagcggctgcagctccactagccaagcaagtttcagctcccactgccgcccctccggccaaggtcatcggccagcctgtgctcgctgctccaggcaaaaattcttccaattccagcagcacaactgagtgcgtctgtgccggtgccctgctgccccgtttggatgccaatggcaaggagctgcccatatgcgccgagtgcaagtgctcccatgtggcgagaaatacgacgctgataaaggtcgtggtcattattgtgatttggatcatctccattttagtaatatacatgctcttcctgatgtgcctggacccgttgctgaacaagcgagtgaaggcgaactaccaggagcacaccaacgaagatgatgaaccaacgccgcccctgccagccgtcaacaaccaggagctcagtgccagagccaatgtcctcaatcgtgtgggccaccagcaggacaagtggaagcggcaggtgcgcgagcagagacgccacatctacgacaggcataccatgctaaactaa

SEQ ID NO: 501 - protein, 227 aa, DROSOPHILA
MAHKRLFVYAVLLVICYLVGVTWAETAAQTFPAIGTNSNNNSNAQPAPVPAPAAPAAAAPLAKQVSAPTAAPPAKVIGQPVLAAPGKNSSNSSSTTECVCAGALLPRLDANGKELPICAECKCSHVARNTTLIKVVVIIVIWIISILVIYMLFLMCLDPLLNKRVKANYQEHTNEDDEPTPPLPAVNNQELSARANVLNRVGHQQDKWKRQVREQRRHIYDRHTMLN

SEQ ID NO: 502 - DNA, 3755 bp, DROSOPHILA
aatcagaaggataaaggagtattttgttttctactcaaaattctcttcgatttcaaatcaaagaaagaaaaaaatcgttattatttatcaggaaacatagatactgtcacagaaatcacacatcattatttcttaactcgcctggattgatgatttgaaatcgaaagaactttgagaaactgaaaacacataacaggtcctagatacaattatttttcgaacatagtagaaagacagtatgtgtatatctgaatgtattttttcaccaatcatcctagcgtgtagtgcggcaaacaaccaaagtccttataggttagatcagactagtatcgtacgagtatcagtatatagcagtatatagcctcacacacacacactcacatatatttttgacttgatcttggacaagagcgaaacaggtagtagtctatatagtttgtatatgtgcggttttcactcgagtcgagcttaaggcaggaagggagtagggaatgaaggggattggtcggaccacttttatagagccatatatagaaacgaactgcattacgagtatatatttaactaaacattgtactggaatatttagtcaagcataattacacactaaagacccagaattgggttgttatgctgaagccatgtatacaaaaagaaagcacaaaatactcgaagaaaatatctggttaacaatataagcaatcttctgtggaatgacaacccacatgcccgttgttcgagtatttggcaaccctatctagtatacccccctttggatgaattttcggtgaatgccttttagtcgttctctttagtacttagaccaaaacacccacagcctttcaatcacataaaatgcaagtctagttatatataatttacactaattataattaattatgagctaatttaaaataattaataaacgaattatttaaacgtgacacgagtctagtttctcagtcttaatgctctggcgacttacttatacccaataaccttattctctacgcaatcgcagatcgatcagcactggagcatcgggtttatttatcaacagggtcttcacacccatctcatcatcggatccgctccaaatcaattcgtattcacgcagcagctgaaaatgcaaatcggttcaatggaataaacaattggacactattttggagaccgcaaagtgctgatctgtttccgttagctcaccctgagaagcaaaatgtgcatattctgctcggccaaacggcgggcaatgcaggcccgcattccgtgaccgaagggaaggaccagatagggattgagggcactacggtgctggagccatcgatctggttggaagcgcaggggatcctggaagtgctgctccagccgacaggctaccatgttctgggtaaccacggtggtctggcaagggataatactatttagatatataattagaaaatatttgtctatacactgaccccctttggcacaaagtagccactgaagatcgcatcctgattaagaatcctgcccacgcccacggcaatgggattcaagcgtagtgattccttgaggacagccctcgtataggtgatatctgttcgtagggcatccatggatagctcgtccttggcactcggaagcactctcctggcctcctcgtgcagtttttgctgcacctccggatttcgtgctatgtgatagagcagaaatgccgaggcatacgaagtggtatcgatgccagccaagagtaaatctgcagcagtgcccaccacgtcactgcgatcaagctcgggattttttacataagccgagatcagtgaagatcccactgaaccattcctaacattctcctccactagctccagggccacactctccatatatgattgggcctggcttagtttgcgaaagctaggtgtctccagaaatcgccacagctggaggccctgatctgtgggcaggatgcagctattggtggtctcagccgcatccatcaagcgtgtggatcgggatctaggatcttgttcctgggcagtaaaagactgcagacgagctccaaaggtaagcaaacaggttactgaaaacaaagtgattatttcgaaactagatatctaagaacttcaagagcttctattttacggatataaaaagaaattccagaaatggaaatctaccgaaaattgccacattcaccatttccaattcagatctactcacattccaaattcaatctggtgagcttgggcagcatatcaatggcaccaccattgcgagattcttgtagaaatctaatgaactccttggtcactccatccacttggcgaacaaagttccgcacactctttggtgcactcagctccttttgcacctgggcacgtatacgccaccattccggaccattggtgggcagcaagccggtggttttatagacatccggtcggctcttgcgatattgagccagtgccaggtgacttcttcgctgcggacaatcccgctcgttgagcagcaaagctatgtccttgggatcgtacaaccagacaatgtcctgcccaggaactatagtttcccgcacaattgcgccatatttctcatacttatcctggccggcttggtgcaatcttagccaggaataggatccgattccgggcaggtaattgtatagattacccattccaaagggtcctcgtggtcctggtatcgcctgatacggcttggcaaaggtgcactgcctcgaggtgcagctaatctttaacagtttggtcaacatttttcgtcgttactctggtcttttcgcggcaaattctcgaaatgcactggagactacatgggtctgagggttttattgccggctcagcattcgggaaaaaggcattaaacgcacactgggatcgaagttgtgcctacctgtggtgaatctacctacctgagagggtttacttccgatgttttcgctctttaaattaagagagccaaaatgggaatagtatattcttaaaaagaaaggtatacttttcggctttacgtttttattgatctagctaaaaggggtataaaccccaagtatagctttgatttgcattttgattgagttttctccaaatatgatattttgccaaaacgcatcatattattttaaaatgtagctcaaaatacctgaaatggactttgccaaattaatgaattgatgttgccgagatctttacaattatttattcgcagtcttatttggtacatgaaacagtattattcaaacatttagtcttctttcttctcctcgaggggcttttcttcccctttgagcagttcctcctccccctcgagaatttcattatttagatcttcaagtaattcgctggtttctagtttgagtgttacattcactggtgtgaaagtctggggggaactcttttttgacttcttgcgttttttgagtactgctttttccaaagtttgttgacgtttggatcctccagtgtataagacgtagaccaagttggccaaggataccacggcagccaggagaacaatgagaggcacggtcaggacatctagggaattggccacgaagaaattttgggctaacgtctcagtttgtgcgaaatgtttaaatagtcgtggttcggcgataagttgttccgcatgccatacagccaattccagggcggattgcggacgggtccggaacttcaactgggcctggtggagagcacttatgaaacgctcctcatccaggattcgcgtaagggcatccgacagggagctttggt

SEQ ID NO: 503 - DNA, 1470 bp, DROSOPHILA
atgttgaccaaactgttaaagattagctgcacctcgaggcagtgcacctttgccaagccgtatcaggcgataccaggaccacgaggaccctttggaatgggtaatctatacaattacctgcccggaatcggatcctattcctggctaagattgcaccaagccggccaggataagtatgagaaatatggcgcaattgtgcgggaaactatagttcctgggcaggacattgtctggttgtacgatcccaaggacatagctttgctgctcaacgagcgggattgtccgcagcgaagaagtcacctggcactggctcaatatcgcaagagccgaccggatgtctataaaaccaccggcttgctgcccaccaatggtccggaatggtggcgtatacgtgcccaggtgcaaaaggagctgagtgcaccaaagagtgtgcggaactttgttcgccaagtggatggagtgaccaaggagttcattagatttctacaagaatctcgcaatggtggtgccattgatatgctgcccaagctcaccagattgaatttggaattaacctgtttgcttacctttggagctcgtctgcagtcttttactgcccaggaacaagatcctagatcccgatccacacgcttgatggatgcggctgagaccaccaatagctgcatcctgcccacagatcagggcctccagctgtggcgatttctggagacacctagctttcgcaaactaagccaggcccaatcatatatggagagtgtggccctggagctagtggaggagaatgttaggaatggttcagtgggatcttcactgatctcggcttatgtaaaaaatcccgagcttgatcgcagtgacgtggtgggcactgctgcagatttactcttggctggcatcgataccacttcgtatgcctcggcatttctgctctatcacatagcacgaaatccggaggtgcagcaaaaactgcacgaggaggccaggagagtgcttccgagtgccaaggacgagctatccatggatgccctacgaacagatatcacctatacgagggctgtcctcaaggaatcactacgcttgaatcccattgccgtgggcgtgggcaggattcttaatcaggatgcgatcttcagtggctactttgtgccaaaggggaccaccgtggttacccagaacatggtagcctgtcggctggagcagcacttccaggatcccctgcgcttccaaccagatcgatggctccagcaccgtagtgccctcaatccctatctggtccttcccttcggtcacggaatgcgggcctgcattgcccgccgtttggccgagcagaatatgcacattttgcttctcaggctgctgcgtgaatacgaattgatttggagcggatccgatgatgagatgggtgtgaagaccctgttgataaataaacccgatgctccagtgctgatcgatctgcgattgcgtagagaataa

SEQ ID NO: 504 - protein, 489 aa, DROSOPHILA
MLTKLLKISCTSRQCTFAKPYQAIPGPRGPFGMGNLYNYLPGIGSYSWLRLHQAGQDKYEKYGAIVRETIVPGQDIVWLYDPKDIALLLNERDCPQRRSHLALAQYRKSRPDVYKTTGLLPTNGPEWWRIRAQVQKELSAPKSVRNFVRQVDGVTKEFIRFLQESRNGGAIDMLPKLTRLNLELTCLLTFGARLQSFTAQEQDPRSRSTRLMDAAETTNSCILPTDQGLQLWRFLETPSFRKLSQAQSYMESVALELVEENVRNGSVGSSLISAYVKNPELDRSDVVGTAADLLLAGIDTTSYASAFLLYHIARNPEVQQKLHEEARRVLPSAKDELSMDALRTDITYTRAVLKESLRLNPIAVGVGRILNQDAIFSGYFVPKGTTVVTQNMVACRLEQHFQDPLRFQPDRWLQHRSALNPYLVLPFGHGMRACIARRLAEQNMHILLLRLLREYELIWSGSDDEMGVKTLLINKPDAPVLIDLRLRRE

SEQ ID NO: 505 - DNA, 2598 bp, DROSOPHILA
ggagagcactaccacctcgctaggtccagaagcgggcgaagatgctcctccgccggcacaggaagatgaagacgacgacgaggactggctggagagcttgggcgtggatgagcgtgagctgcgacgtatccagtcctcccatgccaggaagcaacaagctgccgaaatgcgagaggactttagcgacaactccttgctgctggtcgatggcgtggagtgccagggattctttagctatctgctaaatgccaagagtgccatcagcacagtgggccgtctggccggagtgcctcccactctgctgtcgccagtggccttccccaaggccaccatgcagcacttggttccgcggtccaagaaagtgcgtctggatggcgtcgactactttagcatagacattaagggcctaatcctacctacattcctgcccagtgtggcggagctgctgtccgagacgcgccagatgtttagctccacgctggccagcagcatcaatacgctggcctttagcaaggccacccaaaagctgcttgaaactccggagacgccacagtcagatgcggaaggagaagatgccgccgggcaggtctttggcgagcagaatctttcggagtgtggtctgctgccggcagtagttggctccatctgccgcacgggccaacatgccgtaggtcttttagagcgcgtttgctatcaaagagatgagggatatgcttggagctagacaccaagtgctcctcacactagagcagctttgttttcctaatctgtacgtctgttatgtgaaataaaatattgtagtagaatagcaagcccgtggtgtcattgtttttcgtactaatcgcatggtagcaagtatctgtggctacttcagattatagcggtattaagagataatattaaagcaaagggattgcttacaagataactatcgtgtagcaattagcgcttgcagttcgtcattacattaagtccccgggaattcagcagccaaattgattgtgcttaatcttaggcggtatgatttattatggataaaggggttgagtactagctagttgtccaccatgatgagctcgtcgatgctccagtcctcgtaggagtgatccggcaggtatcggcggatgatgatgggaattttcttttgtttcagctctttcatggcgatctgcagggggtccgtttccccgtccagctccaccatgatgggtgcgcacatggcgatctgaagcgctcgtgtgcccagaactctggcgcgctcgtatttcgtcatgtactttgtggtaatgcgcttggacttgggcacaccgcctccgcccgcaccaccgggagctatgatctcgatgttgtccgcctcctcctcctggttaatgtcctcgtccacgtcctcgtcgacgtcgtcgaagtcatcgccgccaacgctgcaattgttaagtaggtgattaatgggcacagctattgattgtgttacgcctgcacttactcgtcgttgtcgtagtccgcatcatccatcactgcttttctattgttttaatcgaaattaaatagtaaagtgcggcgtgttttgcacgcgtcgcagtcttcttcttctttcacactgctgcatgcggttttcagcactggagcacagtgcgcagaacttccagtgcttctcaaactttcagggctgcatttctggcaaatggaaaagtgattacttatcgaatagccgtctgtgtcgcgagtatttgaaattggtggaattcgtataaaggttagactatttgaatattttaaagtttaaactactaaaatctgatttatacgtcttcctaaaataatttaatccaattagagtagttgattccataaaatttaaattataaatagttaaataataatcaaatgaaacacttacctattggtttgttatattttagcccttcatctaaacggacatttaacgtaatcgaattcagtattttcttaataaaaaaagggaatattagtcgcctgctcctggataacttggaaaatacaaaccttgtaatcccggatgagttctgtgataatatggacgctggagtgatgcggttggtgggcgagttctgggcaaagatgccgcgggacaaccggctggattaggttcgtacgaaggggggtatgccggagaatatccggatggagctggtggatgtcgatttccgggcggactgcttggagctagatatcccggctcgtagtcgtagtcgacgcaggtgcgaatggagacgtttcttcgtctgccagcggggcctcgatggatggcttccctgtcgaagcgattcagatcgaagttggctagaggatccacttcccgctgacgcgtgcttctgggaggatacggatagtagggatcctggggttcctggcagttttcatttatcgcgtgaacggcgggctgaaacgatcgcgaggagtcgctgcatggaatctcagaatgtgggtccggctgcagcagaattggctcctccaaagccactttccgattctcgcctaacccgatggggtatggatccgaatgatacacccgtgtcctccgcgcagctgctccactatgtccgtttcctgggcaattgg

SEQ ID NO: 506 - DNA, 536 bp, DROSOPHILA
gtgtgaaagaagaagaagactgcgacgcgtgcaaaacacgccgcactttactatttaatttcgattaaaacaatagaaaagcagtgatggatgatgcggactacgacaacgacgacgttggcggcgatgacttcgacgacgtcgacgaggacgtggacgaggacattaaccaggaggaggaggcggacaacatcgagatcatagctcccggtggtgcgggcggaggcggtgtgcccaagtccaagcgcattaccacaaagtacatgacgaaatacgagcgcgccagagttctgggcacacgagcgcttcagatcgccatgtgcgcacccatcatggtggagctggacggggaaacggaccccctgcagatcgccatgaaagagctgaaacaaaagaaaattcccatcatcatccgccgatacctgccggatcactcctacgaggactggagcatcgacgagctcatcatggtggacaactagctagtactcaacccctttatccataataaatcataccgcctaagattaagcaca

SEQ ID NO: 507 - protein, 131 aa, DROSOPHILA
MDDADYDNDDVGGDDFDDVDEDVDEDINQEEEADNIEIIAPGGAGGGGVPKSKRITTKYMTKYERARVLGTRALQIAMCAPIMVELDGETDPLQIAMKELKQKKIPIIIRRYLPDHSYEDWSIDELIMVDN

SEQ ID NO: 508 - DNA, 2472 bp, DROSOPHILA
tatgcaatattaagaacaattaaataaaatagcatattaacttatggcagcactttggttgctatgtttatgtttatgtttatgcacgcagttaggccagggcggatgtaacatgatcacccactcgaaggccacaaagtataagtgcatggtcagcattcacacgccgaccaaatacatattacatacgtacatacatatctcgctctcccgataagcctagatatataagatatacataagaacgccgctccgctgctggcgtacccggcagcgcagctacgcggattagcctaagtccaaatatataaaaaactgtaaaatcggagagactctgtagacgttgagctgacagaaccatttctgcctactctaaaatcaaaagaagaaattgaataaatatatgtcagcccgacggctgccttaaacttaaaacggacttgtgttcttaattggagttcatcattacacaagtgtaaatgttaacgaatcgagagcatagcatagcttagcataaactatgacgactagttatcgtgacaagcagttcatcattacaacagcaattatgctaatcagtttgaaggcgcgtcgaggcctctacctttctcctgcattcaatgaacttcagacacaatccaaacgatgacgaaacgaggtgagcacctggcattcagtctgcacttgatagtgcctaatcagtccaaagctttgtgaaccccatttggctttgggagcctaaaactatgcaacagcagcacctgccagcagcagggttcttttttattctttgagatggagcccaacgatgtgcccgttctgctgataaagttgttttgctcctctatgaaatatttaaatcagcctaccttaattatattgctatctttaagtgtttcaagctaaacggctgataagcaggcaaaaagtgggtgttcggctttccataaatagccaagtcagagggcctagcaagccaaacagttttgtttaaacaaatcaacatgaaggctttctttgctctggtgctcctggccattgccgctcctgccctggcaggtcgcaccctcgaccgctgctcgctggcccgcgagatggccgacttgggagttccccgcgaccagctggacaagtggacctgcattgcccagcacgagagtgactaccgcacctgggtggtgggacctgccaactccgatggctccaacgactacggaatcttccagatcaacgatctgtactggtgccaggccgacggacgcttctcctacaacgagtgcggcttgagctgcaatgccctcttgaccgacgacatcaccaactctgtccgttgcgcccagaaggtcctcagccagcagggatggtccgcctgggccgtctggcattactgcagcggatggttgccgtccatcgatgagtgcttctaaactgacttcgaccacaaataaaatcacaaagagtacggaaacccactttcaagtcgtctaaactgtttttaaacaatctgatgatgcattcgcaaagcaaagctatcatatatttagagtctaatggcatgagatcctttcaatccatgaccctgtccgagttctttaaacaaggttactcggtacaatcgcgggaccaaacacaatcggttggacatctattgccgctaatggagagcactctccgaagccattagcccgggccgccatttcacggcttatcaattccagttttgtggagcagttttcaatttctgtctcacaaattgatttatgcagatttcagagctcgaaccccgcctcctggtttctgttttgagtgatctttcaacacggttcgcagctgccgttcagttttgagtttctcctgtctgcggccaatggctgctgacattgatcgaagtgtttttgtctgagctgctgtgggaacctcatccacatggctagatcccccagtcaatcagtcgtttctgtagcctccgattgggagctgcattgaggggctgcgtgaggggcacatgcgtacctgacgaaagaatcatattggacccactccccggcataactgggcatcggaggtacgtgactgatgggctgattgataccggctgaggtaacccacctgagtggcacgttataaccacccgaacacaatggcatatgcgatttgcatagccacatgtgaaccgttaaccccttattgtggtttaacggtacccatgcctcgagagagggaactgcaagccaagatggtcgcatctgttttagctggctagtgaaagtgtctttatttctagcatattaaaatgctaattttcattttattttgtccacgcatcgaaggcagaaatcgaaaacaaatcagcgattgtcacagatcaaaattcgagtcgatcggatcgcttagtggctaggaaacaggcctgcagcccacttgcgagactgggtgtcgatctgggtgtcgttgacagcggatatctgcaaa

SEQ ID NO: 509 - DNA, 472 bp, DROSOPHILA
caacatgaaggctttctttgctctggtgctcctggccattgccgctcctgccctggcaggtcgcaccctcgaccgctgctcgctggcccgcgagatggccgacttgggagttccccgcgaccagctggacaagtggacctgcattgcccagcacgagagtgactaccgcacctgggtggtgggacctgccaactccgatggctccaacgactacggaatcttccagatcaacgatctgtactggtgccaggccgacggacgcttctcctacaacgagtgcggcttgagctgcaatgccctcttgaccgacgacatcaccaactctgtccgttgcgcccagaaggtcctcagccagcagggatggtccgcctgggccgtctggcattactgcagcggatggttgccgtccatcgatgagtgcttctaaactgacttcgaccacaaataaaatcacaaagagtacggaaaccca

SEQ ID NO: 510 - protein, 140 aa, DROSOPHILA
MKAFFALVLLAIAAPALAGRTLDRCSLAREMADLGVPRDQLDKWTCIAQHESDYRTWVVGPANSDGSNDYGIFQINDLYWCQADGRFSYNECGLSCNALLTDDITNSVRCAQKVLSQQGWSAWAVWHYCSGWLPSIDECF

SEQ ID NO: 511 - DNA, 3005 bp, DROSOPHILA
gctcgaatgggggcggcactatcaaccagggttacgagcatgtgatcgacgaggacggcgacggcaactccctgcggctgaccaccaggaatccccatccccacccgcaccaccaggtctcctggggccagaacaccaacggcggcggcggtaatggcacaggtcgcctgtgaaggacccgcccatcctagacgtagagctaagttagacctaggtaacttgttaacgaattccgcctctttccatcaactgcctaaacttaagactaagccaatacctagaattgtagtcagaaggaaggattgtgttgtatagtatgtatagggacgcgagtgagagccaggacactctggctcagaaggatcaggtcgttcataaggcttcatggcaacagaacgaacattatgcttagctaatcacactgccagtgtcgatgtgtgccaataattgggtggctgatcgcccactgtggcagcaacattcatgcgatgtactatactatcatttgttaggttatctttaagtcaatacccgcgtggatcatccgaaacacgcggccagtgcatgctgacacaaaatactcaacgtggagctgaaccgcagtggcctatttgtacactcgacgacatatcgaggatagttctttttaaatgaataatcattgatgatttgatggattgtaaaactttttaaaacaataaatagaagcatcaaacagatattcgatatttctcactctcatcaaacttgggtcatcccaaggataagctacatccgaacccaccttcggtagtggagaccctaccccaagtttagaccaatacccgcatattttcggcttagagccctggtactatacgaataactttattttcgggaaagggtagaaacattactagacatcgcttgcgggacaacattgataaccagctatgatagataatagtattagacacccatatggaaacgtcgtgtatgctcgcgttatcagcgagttaccttagtggaataaaaggttgcccttcttggcggctatgggcaagcggtcgccctggaggaacgggtttatgaccgcgtcgtccagccgaggatcgggcatcacaggatatccggccttcttagccaggctgttaacgttgttcaggctgttctcctggcccatctgcatgatgtactgctccacggcggagttcaggtcacccttgtcgccgcccacatcagcactatcctgttccgagcagtcgaacatatgctcgttgtcgcaggtacagtcctgagcggcctggaactcccggctgaagatggccgtgttttcgaagtcgacaatgcagctgccgccttgcgtctccatgtcgtagccctcagggcagggattaggagggttgcagtaggcaggcaggccggcgtcgttcttcactatagtgggatacctgttgggaccctctcccattccgccggagatgaactggtgaccccacagcgaactgtgctgcagaaactcgtcatcccgcagcgaaggatgggaggcagctcccgatgccgagcccgattgcaggatgcagtcgcttccgccgtcacacagcctcgcgtactccgaccgggagaccaggtccacgttgtccttggagccagcggctgcctcgttgcccacgtcgtaatagcccacctgcatgtctttgtccatgcgattcagcagatccgtcatcaagacatcggcaagaatatccttggcgctataggactgcacctggtagccactcaaggcgaccacgagcatcgccaccatcatgtacacacctggaaaaacatgggctattctcttacctcacccacctataaatattacttcagcagacttactttgcgaacggaacaacatattgcgattccaagcggtttcaaccgtccacgtcgaagtttggtaaggtattgatttttcggcggcagctgctccgattccgtgtatatactaacgtgacgtagggctctgtgcttcgtgcggcggctaccagttgaatttgcgaaatatacgcagatccaatcgaagctgccttatggcagccacagctgaaaggacgcatgcgccgtactcgaaagctcttttatgttgaagcagtcctgtggggggccgagaattagattagcgccaaactgctggagctgaggttttcaggcctctttaagctttattagtataaaatgctggaagaaaataagaaaacttagtcgctaagaaaactttattttcttgaattgtatgactagaggtttatgttacacggtaatacgctataaatttccattccctccttaatttaaaagtatgaactataaaaaatgacttgaaagtaaaactgaaggaattttattttcaataaattaaaaatacacttataaaaaaataacattgaaccgatactccattgtcgaatattatggtagcgaagtagtaaactgaactactcaattatgatttatttttttgaccttagcatttacttagaaagaaggtggtaataattgagggttaggttgccaattcgatgaaatcgaattcatcctgcatatatttggcaaggcgcttatgcggtgctgtttttgtatgggccaccaagcctcggcgagttataaaatccatgttgcaaggctcacacctaaacgcaaaaaatacgatattaagacatatgactgcgcaagctgacaagcttacctgaactttcggatttgctttgagtgtgtcgaaaagtggttctgcaattcggaaacgctgctgaagatcattccgcattctaggcatggataaggtcgttcgttcttatgggctctaaaatgaaattggaagttgcatatagtgctgcgctagcattcaattcccagcctccttacttgtcgtgccgcaacttagcgcccagagacgcgaaagcctcgtggcagatggtgcactggaacctgcggttaattaaatgaacctgggtgcgatgctgcttgagaagcgccttcttgtt

SEQ ID NO: 512 - DNA, 942 bp, DROSOPHILA
ccgccgcacgaagcacagagccctacgtcacgttagtatatacacggaatcggagcagctgccgccgaaaaatcaataccttaccaaacttcgacgtggacggttgaaaccgcttggaatcgcaatatgttgttccgttcgcaaagtgtgtacatgatggtggcgatgctcgtggtcgccttgagtggctaccaggtgcagtcctatagcgccaaggatattcttgccgatgtcttgatgacggatctgctgaatcgcatggacaaagacatgcaggtgggctattacgacgtgggcaacgaggcagccgctggctccaaggacaacgtggacctggtctcccggtcggagtacgcgaggctgtgtgacggcggaagcgactgcatcctgcaatcgggctcggcatcgggagctgcctcccatccttcgctgcgggatgacgagtttctgcagcacagttcgctgtggggtcaccagttcatctccggcggaatgggagagggtcccaacaggtatcccactatagtgaagaacgacgccggcctgcctgcctactgcaaccctcctaatccctgccctgagggctacgacatggagacgcaaggcggcagctgcattgtcgacttcgaaaacacggccatcttcagccgggagttccaggccgctcaggactgtacctgcgacaacgagcatatgttcgactgctcggaacaggatagtgctgatgtgggcggcgacaagggtgacctgaactccgccgtggagcagtacatcatgcagatgggccaggagaacagcctgaacaacgttaacagcctggctaagaaggccggatatcctgtgatgcccgatcctcggctggacgacgcggtcataaacccgttcctccagggcgaccgcttgcccatagccgccaagaagggcaaccttttattccactaa

SEQ ID NO: 513 - protein, 271 aa, DROSOPHILA
MLFRSQSVYMMVAMLVVALSGYQVQSYSAKDILADVLMTDLLNRMDKDMQVGYYDVGNEAAAGSKDNVDLVSRSEYARLCDGGSDCILQSGSASGAASHPSLRDDEFLQHSSLWGHQFISGGMGEGPNRYPTIVKNDAGLPAYCNPPNPCPEGYDMETQGGSCIVDFENTAIFSREFQAAQDCTCDNEHMFDCSEQDSADVGGDKGDLNSAVEQYIMQMGQENSLNNVNSLAKKAGYPVMPDPRLDDAVINPFLQGDRLPIAAKKGNLLFH

SEQ ID NO: 514 - DNA, 4765 bp, DROSOPHILA
tattatttattatttattatttattatttattatttattatttattatttattatttattatttattatttattatttattatttattatttattatttattatttattatttattatttattatttattatttattatttattatttattatttattatttattatttattatttattatttattatttatcatttattatttattatttattatttattatttattatttataaacgaatcaaatggttttcaagtggcacattaaggtatggaatcaaaattaaaataatcaaaaggctatattccttagttaagatattatttggaaaacacaatctgtcaaatttctccaagtgtaggaacgccattcaacggtctgcgcttatactatgaagtgccattgggaaaccgaagatggggagtgaactctaccattaactgattgaatttaacttgctgccagacatttggtaattagctaggatcctagattcaatgttgttcgctcaagtaaactaattttagaaactctagtgcaagcagactgacttccattgtttatgaaaaacttctgaggggaaaagggtatagagccaattaagttgcggaaaaagtagaagttctccttcgtagttttctcattaaaaaggtgttttctccggactctcttgaaaactgacaatcgacttgagggtctttgagaagtattcatggtattcattgtattcatcccttcttattggattaaagccatttgctcgcaacaggatgtaatcccaggaacctcaagtggtcataaatcgtttattgaccaccagaaactagcaattaatgtaacgcaacacataattttatacggccgactcacgccaaagtgcgcaaactaattacggcactcaattcataataataattattaatttgggaagaaacatggaggcggacaagcccaatggactttggttggtcggctgccaaaaaagttaccacctacatgtcaacgaagtagaaagtgtttttcctcaacgaaagcgaatgtgatatactcgtatccccagttgcgattaatccaagtcatgcgttgaatttcgaaatacggttgaaatatgaatctcgtgcattgattacgcgtttgtcgccatgaaaattgatttgatagcaactcgctcggccattttttcgtttttcgatgtggcaatggctcggacaaaagtttcaccacctcattggcggacaatttgccattccggtcgcatttcttttcgagccaatgaaattggaaaacttttcatattccaaattgttgcgtagaaacgatagcctagcgatggcggccaagtgcatgccgttaaatataaatgaagtgtcgtcgctcaatggtgatattgcttttcaatttctcgtttttttcaacgtcgaatttccttttttttcttgacgccactaccattttgcattgtttcacgccatcgccaccgacattttggccaggagatgtatgtttgcggcagctttccaaaccacctgcgccaggtgaggagcttcggtttgccgggggaccttggcaattgatatgaccgcagcactggccatcgattttccctccggaatggacagaatggcagcaagtaagaaaagaatgcaataaacaaattgttccacttggctttcaggttgattttgtaccccgtggcgacaggcatccaatcccctgaaagtatgtaaagaaaatgaaatacttacattcccacaaatgagatggatttccatttctatcaaaacagataataaaacttaatgaaaaggttcagcctatcgttaggatggggaaacgcaatccattccttatcttgatcatagtacacgtttcaaagctacataataaggaaagaaacactttcttttcgcagtgtatttctaggacaaagcatctttttccacgtggcatataaaaatgtgtgcatttcattaaggattcctctgtggcttccccttactctgcagagttttctaaaagtgctcattggcatttttatcaggcactttggccagaagttgcactcattattctgtggcatttcatttgccggaatctcctgggttaattcaacagacccccaaagtgaaactcctcgcattagaaaagttttggggataattagccacttcgctgaggggttggtacttccaaaaaagttttcaattaggcacatcgtttttgcatgtttttattgcagtaatatttacacaaagggacaccagagctaattcccacttagtacctttttaaaacgccttgggggtttggttctttttgtggtctttgctttgtacacttctcaataaataaataaataaacaatacgccgagagcggtgtgtttcagctacttaacttagaacgaaataaataaggttacagtttggccgaatttcgtaaggggggttttggtctctagacccatgttcacttctgacccgcgtaggccaagtcctgggcatcctgcggctcttgcgaggatcgggcccaggcatgaggatcccaggcgggcgatgggtgctccaggtgctcgatgtgctccacgggcagatccacgtggtgatcgatgtggtgctccagatgatgatcgatgtgatgcggcactatgtgctcgatgtggtggggcaccacgtgctcgatgtggtggggcaccacgtgctcaatgtgatgcggcaccacatgatccacgtgatggggatagtgcaccacctcgtagttgacaatcttgggcttggcaatcttgaaaataaccaaggctccagacagcaccaatgagagcaggcccaaggtcatggccttccaggtctttagggcaatgagtcccaaggccagtggcaccagcacagtggtcttcagtttcaggcccagaaggaagggcagaactgccttgcggatcatgccacgtcctggaaaagtaggaaaaatacagattagatttatcacaagtggtaaaaatccaaatatttgtatgctgatttgcataaaccctaaacatttttgaaatttttgataatgccatttgtcatattcaaattagtttaacgatttctattaaacacaagagtggcatttcaataattagtatcaacacttgtttctgacactgtgttgcgaattgaatgttattttgaaaaaacgtaagctcgttttggatcgtcatcattacttttttatctgacttagatcttgagttcttaccttcgttagcagctgccaggggaactaatcctccctgagtaagcggattcgacatgaggaagtcgggcaccagggagcgggcttccgaggtgcggaagtactccggagcctggatcctcagcgagtggctgcccagatagctgtcgatgtcgtcgaagaggcgctcctccgggttcatggatcgggactcgaccttctccgcggtacggacaatcgacaggcgctcggtgatgcgcacctccggctgccggagggcagagttgaaccactgcagggccttgggacgcacgcaggaaacactgaggtccttaaggcagccatggtacatgtccagggctagttgcgtggcggactggggcgccacctgaccttcggtgggcgccgagtgggcggtggacagcgccgcaagggcgactatcagacaagcggcggtgctcttcatcctttcgacgacggttagtcctcaactctcactctggttcgatggtccggtggtcaggtggtttggtggtgcgcacgcgttggccactcagcgggttatgcaaatgtcgcatgggaaccgcttggtttttatacgacggtactttgctaattgaattgcgtatgccaggtacgcacggagctctttttctgcccaccgctttgggctccagctttagcgaccatttcgctttgttgtcaaagtcatggaaagcgcaagttgaccacctgagtttcacctttgtgcaggtatggccctagctgtgcttctggcctctgattctatttcgatactctagtctattgggtcaggcgaacgttttatgggcacgctgttctctttgtgggaggagtaggaattcctcattgcgacgatttcccgcataatacgcgccataatgggccgcacataattgaaagttatttgatggcttcttctgcatcgacggccggggatccgctcgtaaaatcaagtgcccagcaatccgaggtgcgtgcctggaaacccaattaaaataccactcacccagcagattggatactcgtttgtacccacggggggcagtcaaatgcacttgctgaccacggaagctgaagaaataccatttcatttcattctccattgtgaatcgagtcgctttgattcgttctttaatatgtattaatatttaccttccaattgtaagaacatttgcatagaattgaatgaatgaatgaattgaatgaatgctgagatatgtttgaagttaattgtttaatggatctcctgtgatgtagggcatcaaaaattaaatcaaaactgctgtatgacttctgcgttattacgaaataaattgtatggaagatttaaatagagtgaaaatagatcggtaaccaaaatcacaaaatggaatagccgttaaccaccgattttctgtaattgatttgcaaataactgaaccttgaagttaattgcatcttaatgaaaaaacattatggtctgcggagagtttcatgagactccgtaaatgggactgcggtaagcaattaaaaaaatattactaac

SEQ ID NO: 515 - DNA, 1448 bp, DROSOPHILA
ccaacgcgtgcgcaccaccaaaccacctgaccaccggaccatcgaaccagagtgagagttgaggactaaccgtcgtcgaaaggatgaagagcaccgccgcttgtctgatagtcgcccttgcggcgctgtccaccgcccactcggcgcccaccgaaggtcaggtggcgccccagtccgccacgcaactagccctggacatgtaccatggctgccttaaggacctcagtgtttcctgcgtgcgtcccaaggccctgcagtggttcaactctgccctccggcagccggaggtgcgcatcaccgagcgcctgtcgattgtccgtaccgcggagaaggtcgagtcccgatccatgaacccggaggagcgcctcttcgacgacatcgacagctatctgggcagccactcgctgaggatccaggctccggagtacttccgcacctcggaagcccgctccctggtgcccgacttcctcatgtcgaatccgcttactcagggaggattagttcccctggcagctgctaacgaaggacgtggcatgatccgcaaggcagttctgcccttccttctgggcctgaaactgaagaccactgtgctggtgccactggccttgggactcattgccctaaagacctggaaggccatgaccttgggcctgctctcattggtgctgtctggagccttggttattttcaagattgccaagcccaagattgtcaactacgaggtggtgcactatccccatcacgtggatcatgtggtgccgcatcacattgagcacgtggtgccccaccacatcgagcacgtggtgccccaccacatcgagcacatagtgccgcatcacatcgatcatcatctggagcaccacatcgatcaccacgtggatctgcccgtggagcacatcgagcacctggagcacccatcgcccgcctgggatcctcatgcctgggcccgatcctcgcaagagccgcaggatgcccaggacttggcctacgcgggtcagaagggattggatgcctgtcgccacggggtacaaaatcaacctgaaagccaagtggaacaatttgtttattgcattcttttcttacttgctgccattctgtccattccggagggaaaatcgatggccagtgctgcggtcatatcaattgccaaggtcccccggcaaaccgaagctcctcacctggcgcagaaatgcgaccggaatggcaaattgtccgccaatgaggtggtgaaacttttgtccgagccattgccacatcgaaaaacgaaaaaatggccgagcgagttgctatcaaatcaattttcatggcgacaaacgcgtaatcaatgcacgagattcatatttcaaccgtatttcgaaattcaacgcatgacttggattaatcgcaactggggatacgagtatatcacattcgctttcgttgaggaaaaacactttctacttcgttga

SEQ ID NO: 516 - protein, 454 aa, DROSOPHILA
MKSTAACLIVALAALSTAHSAPTEGQVAPQSATQLALDMYHGCLKDLSVSCVRPKALQWFNSALRQPEVRITERLSIVRTAEKVESRSMNPEERLFDDIDSYLGSHSLRIQAPEYFRTSEARSLVPDFLMSNPLTQGGLVPLAAANEGRGMIRKAVLPFLLGLKLKTTVLVPLALGLIALKTWKAMTLGLLSLVLSGALVIFKIAKPKIVNYEVVHYPHHVDHVVPHHIEHVVPHHIEHVVPHHIEHIVPHHIDHHLEHHIDHHVDLPVEHIEHLEHPSPAWDPHAWARSSQEPQDAQDLAYAGQKGLDACRHGVQNQPESQVEQFVYCILFLLAAILSIPEGKSMASAAVISIAKVPRQTEAPHLAQKCDRNGKLSANEVVKLLSEPLPHRKTKKWPSELLSNQFSWRQTRNQCTRFIFQPYFEIQRMTWINRNWGYEYITFAFVEEKHFLLR

SEQ ID NO: 517 - DNA, 2748 bp, DROSOPHILA
gttaacaggctcccttaaaactaactactgttacccactgaatatgccgtcaaacttcttgaacagcacactcagctcaaattaaagacaagtaaaacttattaggtatctagtaaatttactaaaattccaaattaaatttatgtgaattcaccctaagaagttgaaatttttccattaattgcgtttaatttcaaaacattattgatagcttgagttaaagaggtttgactatgtagatttctattaatgcttaatttatattgagctttatgttgaccaatccctacacttaaactatagatttcgacctactggacatgtaaatttcattttaaactacatttaaagtatataattcgtgttacccattgacaatgtaaatttcgtttatcgtttatttcgaatttggacggatgattgatgtcctatatttctgtatacgcgaatattgcatgtatttattgttcgattaaagtgcaacaatttaatttaactaccaaacgatctcatgaatttgaaaacatttatcgcaaaataagcgataattgctatatatatagaggcgacaaaatctgcttaccagtcagtttttcgaaatgtttcattctctatatctgattggaattctatctctaatttgggtggccgcccaggatatcgtacctgacgatccggaagtgcagatgcaaatgcatgccatgttctatacggctcgtgttgcttgtgcggatgagaatttaataccgtatggtaagtggagtaatgtaccaactctgaataaatacagctacaaagattcatttagtgagaaattatctataattgaacaatcactgaaaagctagattcttttgtgtgaagttcattaaaagtatactttattggtactcaatttccggaaataatatgtcaaattattgtaactgtgcatggcacaatgaaatctattcaatgcatgagaatgtgatctataaaaggtcagtcacagaatcccatccagcactttgtttgttcaagatgtattccgcgttagttagagcttgtgctgtcattgcttttctgatcttgagcccgaattgtgccagggctctacaggatcacgccaaggataatggtgatattttcatcataaactatgatagtttcgatggcgatgtggatgacatatccaccaccacttcagctcctagagaggctgactacgtagattttgacgaggttaatcgtaactgcaatgctagtttcataacgtcgatgagtgagtgcaaaggttaacgaaggcaatatatgactacatttatcgcctctttcagccaatgtcttgcagtttaataacactggggatttgccagatgacaaggataaggtaaccagcatggtaggtgtgctttgcagatccttcgcctcccgatactcaaagattacttgcagtgctattttcactgctttttcgaaaagtccggtttgatgacggactataagttaaatacggatctggtgcgcaaatatgtttggccagccactggcgattccgttgaggcctgcgaagctgaaggcagtgagtgttctaggcagaactttttaattacaaacgaaatctttaatgtgtaatcctcagaggacgagacgaatgcttgcatgcggggctatgccatcgtcaagtgcgtgtttactagagccctcacggatgctagaaacaaacccactgtatgaataacatcaaaggtcacatctcggacttatcagtagaaaattataatgttagcgtcactaaatcaaatacggctacgaccggaacacaaaattggctataaagcacaggcacctgcaagttatttggtattttctgccccggctatcacgtttcctcattgccatcgcaggcggtgtttctaagcagacggctgagccgcttgccaatgggcttggggtactggttgttcttcaatagaaactccttggactggtgctccacggctccgttgtctagttggtacttgcacagcgtgtgcagcggtcgcacgagcgtttgcctcagctctggccgagattccagcactgccaggcattgcgcagcggtctctagtgtgctaaggcatccttcagtaggctgtgtacggatgatgtagtcacttatacccacggcgatgagtttcacctgtcgcaggcggtgtagagccggactgctagcgtaaatggctttagcctgaggccaggtaccatcgatgagcaccagtgtataaggacccgcactgtggtccacctcttccagtgggaccgagtcccgactgggatacagaagcagtgtttgtggagagtccaaaatcctctgcagatcagcatggtttctatggtttggaaaccgcttgcctttgtagacgacacattttcccggttccaaacccaactgcagcatcagtgcagtgcgtagcgatctcttctcctctgcagggtgttgcagtataacaatctgtgaggacaccgcctcaggtggatgcggtaaagccgggcaccagcaaacaaccacgggtcgtctataatagagttcatgaaaatactttaatttttatggcagattcccagcttcaccactcacttgcatttctcgcacttgttgcgtctgttgggcggatcggcgctgatgcccacgaggtccagccacgcgtcatcctccatacttataattgattaaattagaaaaatgctaagtttatattccgcacgataagaaatccgtaagcaaca

SEQ ID NO: 518 - DNA, 580 bp, DROSOPHILA
cagcactttgtttgttcaagatgtattccgcgttagttagagcttgtgctgtcattgcttttctgatcttgagcccgaattgtgccagggctctacaggatcacgccaaggataatggtgatattttcatcataaactatgatagtttcgatggcgatgtggatgacatatccaccaccacttcagctcctagagaggctgactacgtagattttgacgaggttaatcgtaactgcaatgctagtttcataacgtcgatgaccaatgtcttgcagtttaataacactggggatttgccagatgacaaggataaggtaaccagcatgtgctattttcactgctttttcgaaaagtccggtttgatgacggactataagttaaatacggatctggtgcgcaaatatgtttggccagccactggcgattccgttgaggcctgcgaagctgaaggcaaggacgagacgaatgcttgcatgcggggctatgccatcgtcaagtgcgtgtttactagagccctcacggatgctagaaacaaacccactgtatgaataacatcaaaggtcacatctcggacttatca

SEQ ID NO: 519 - protein, 175 aa, DROSOPHILA
MYSALVRACAVIAFLILSPNCARALQDHAKDNGDIFIINYDSFDGDVDDISTTTSAPREADYVDFDEVNRNCNASFITSMTNVLQFNNTGDLPDDKDKVTSMCYFHCFFEKSGLMTDYKLNTDLVRKYVWPATGDSVEACEAEGKDETNACMRGYAIVKCVFTRALTDARNKPTV

SEQ ID NO: 520 - DNA, 2308 bp, DROSOPHILA
cgataaaccagtaacccgaaaccagtaaccgcacaaaacgtgtcaacgagcccaaacgaagtgcatttcttacctgcccaggtgcatggcgcattcaacgaacgaatcgaataaacttcgccactctcaaatagctacgaagaatcttacaactgacaactaacaatgcaaaatgcaaacagaaacacgaaacataggtagatatatacaacagattcacacgaataacttatatatacatatatatttctacatatatttttgtaatattattttgttgatcaacgacaacaattaaggacgaatgttttcatgattattaccaatcgtggctcgcaggccatttgtttttataatgcaataactaagcccagaacgtttgtttcgattaagccaaaacgtaataatgtgttattgtaatttgtattgttatttactactaatatatacgtatacatatattaactgcttacaaaccgattttgttgtaacaaattgagtgcctcgttctcgcgcgtagaaatctaaaacatcaaactctgtattacacccacggcatttttgtactatacccgcagctgccaggcgcgcacaactcacttaacgatacttttgtacatgtccccagtcggatccggatcctatggtttattgttcgccaaatgtattgcaacagttgctttagccgcaatcttgttttaactcttatacactgcttaatttaacgaacttatttaatggtatataaataaatatataattaaatttaaaattaaacatatgcgcaattctaataaacacatggagaatcacaaacgcttccacatagaagattgtttcaatgacgctctcgactggaattgaaaattccgacccaatccaagcaattatagaaagaatccttgctagtgctgtgttaattacttaccagctgtcttcccttcgagctcaatgggtataaaagcgggctgaatcgaagtggaccagcatagaactcagaatgaatcccaagagcgaagtcctcattgcagccgtgctcttcatgctgctggcctgcgtccagtgtcaagtgagtgaattcatatcccgctgcaggatatccctttctgatgtctcattttattttcctctatatagttgaccttctcgccggattggggcaagcgttcggtgggcggagctggtcctggaacctttttcgagacacagcagggcaactgcaagacctccaacgaaatgctgctcgagatcttccgcttcgtgcaatctcaggcacagctctttctggactgcaagcaccgcgagtagatagctgtaggccaaccagatcctggtccggatctcggacgatgtctagcacgcacacacatacactctatatatataattacccgtatatacagcacgttatcaaggtagtcgtagtcggcatttagatttaatggaacactcctttctcaacaataaataagcgcatccgaaattaattctgctagctgcaatctggggaatatgtatgagtaacctcagtgggtgcttcacccatccttcaacttttcaagttcatcccccaaaaaaaaaaaaacgaacaagccgctagtacctgtcgattaaatttaatttgatttcgaaaattgccacaattaaatcattttccattggcgcttaagttccggtgtgtcagtggcccacgggttcagttcgtctttgtagttcataggatcagaatgtgtgcgatctccggcctcgcgaaagctcataaatttctattcatttatatgggtctatccatcttgtcgtccgtcaagtgtaagtggtgtgaatttctatatttagttcaacattcggtttaaaaatacccaaccgatcgtgccaatagatctgcttaagatatatgagatcgtgtcattccatttaatgtgtcaacataaacccatcccccacagagcacatcatctaacacccagctaatgatttcagcagatctcctccacaaacgatttcaatcggatttcaagcgccactggcccagttattttaatttcccccgaattaacgatgcatctcggtgtgaattcgttgaatctgccattaggtgcttgaataatgcactgaattaagtttttagaattgtgcatttcccagtagtcattcaaaacatgttacacagtcaagtgatgtcgttataatatgagtaatgggtcactaaacatttgaaagtatttttatcaaaactacaaaaaggttctttactcatacacatccgtcaaaacattgttaatgaaaattattttttatttatttattt

SEQ ID NO: 521 - DNA, 240 bp, DROSOPHILA
atgaatcccaagagcgaagtcctcattgcagccgtgctcttcatgctgctggcctgcgtccagtgtcaattgaccttctcgccggattggggcaagcgttcggtgggcggagctggtcctggaacctttttcgagacacagcagggcaactgcaagacctccaacgaaatgctgctcgagatcttccgcttcgtgcaatctcaggcacagctctttctggactgcaagcaccgcgagtag

SEQ ID NO: 522 - protein, 79 aa, DROSOPHILA
MNPKSEVLIAAVLFMLLACVQCQLTFSPDWGKRSVGGAGPGTFFETQQGNCKTSNEMLLEIFRFVQSQAQLFLDCKHRE

SEQ ID NO: 523 - DNA, 4235 bp, DROSOPHILA
tatccaaatttatttaaaaaattatacaagaaattcatgtacatcagagataagttattgactccaaacgcaaattaaatcatatacatttataaggtacttgggttaactctccaactccccacctcgcattcactgccctccctcctcacgatgtgttcccttctttcttgttaactacatttgagcaagttattcgcttaacgatctgtgtgttctgtgtgttatgattcgcattctcatagttttgtgcttggcattttgtacagtatcaaaaatggtttgttgcatgctttccattgcggccaaatactacgtttctcgtttatttttacattacatatacatcgggcaaatgatctaacacttgcttacaattagttaatagaggccttctatgttggtttttatgaaaatgtacacacttacagttttcaagacaagtggccaagatctcggttactatttgctatatatctgcttttatatacagttgacatgtatatatcttctgcactgcctaaatcagttgttttatcatgtaattatcatcaaaaaaatatatgtaagtgtatgatttatgtatatcattctcacactcttattcttattcaccatttcgaattccctttctcagcgactcggtttcgatcttttgtttcaaattttatatatagacatattaaacaaagcataacaaggcgagcagccacaacaaaagcaacagcaacaaggcagacagggcaacaatttgcaattgttgcttgttttgataaatgctatgagtatgctgttgctgttgtactcgttgatgctctgctattttctgtacattccccttatggttccttgtgccatgaactgagtatgtgacaatcctcctccgccggatgaagttgcccgctttggccaaaacgtgttgctgctgctgatgctgatcctgcggctgctgctgtggctccttgctgatgctgttgactagtgggagtagactgcgccgctagctggcgtgcgctgtactcgtgctgttgtcgtggttgtagtgctccgtgttgacaatcacctgcaccacatatccctggtgtatgctgcactcgtcgattggcaccttgtcgcccaggagttttccgctgtagaaccatcgctggcagcaggcgtcgacaccctccgcggcctgaaaagttgaagtatattaataatgctgctagttattgcacagtaaaactaaaatgttttgatattttaatcatgctaatccggagcctatagattagatccactcgattagttaatttaacaaaaaatcgttagttctgtaactccatcggttttttcgttacaagctcaatacatcgttgtgctcaacaagtacagaacatttctttattagtggtaatcgataaatggctggactcacctgaagctttttcttgcactgccccacggtgtccttggagtaaacgggtagtttaacatcagtcatggtcgatgatatgcgcagcttcaagaagatatcggtgccgccatccacgggctcagagtattcggcaggcgagtcgcgcccgttctcctcctttacgatatttatgggatatgacagacagtagatgggcactttgtactgggtgcccagctcatcgtagcattctgtaaggtagctgtggaaaagcacaacagtgatcagtaaccaggtgggcctactatcattatcttatcgtaaatccccacccagcccgaaaactattcgctcaatggaacctaatgctaatgatttaatgccaagtgggccaagtctgataagggattagataatggcggaattacgtagggaaccctcttcaaggacactgatgcacgcatgcaatgccgaaagtgttggaaaaggtcagcgctgcatttaaataaatgtggtctccagtccgaggcgagtgccagtgtcagtcaaaaatcgatgtataataaaaacgttagcgcggggaagttcagtcgcagggtcgacgggtcaaatactctatgcaggaagtacttaataattaatccgatttaaataacggaagcatgataaataaatagtccgcagggaatcctttttaatataatcatttaacattcattttgaatcaatataattatcatttgaatagtgcgtacttcgtaattttgttccgtttctgattcccacgacgcatcacttatttatgatacccctgtggtgtccggcaaaggacacttgcaaatcgctgtcatgcattaatggagttatggccatgcgaaatcactgtatacattattgattttctgcccaatggggcaactcgcattagaaactatcgaactcgttgtacaaattcttggtacgcgtatgtcaattaccacagtctatagactaattactacttgattttaagtaacatatatttgtccatgggtcacatttgttaggagcaactcacccattgggaaccgacacgttagccccatccaggatggcctgggccatctgaaagtcaagaccctcggccgcggtggttgccgcccgtagcgcatcccagatctccttgcgaccgtcgaaggccggcgcagtatcccagaactcgtcccgcttggaccgcagctgaccctcggtcagtggcacgtcggaccgccacctgatagtctcgtggcaaagcggtcggttcttgcgcgccgcacccatggcaatgcctgcatgggatgaggggggatgagtataagatattgcctattgctatacagaaagtgtcaatgcatatatcgaaggccactcacctgcactggccggacgcgagatgctcgcagaggagacgctcatcgtctcgttgtcggggttcatgcgacatacacaggcgcccattgtcacgctcagctgcactgcactgctccgcactccaatccactccgctccgttcaggtcagctccggtaagaaggatctacgggcaaaccgacatatatacatgacacatagtgtacatgcactcatcgaagggtcacgttcgtacgccagttccggaaggtcggaatttgggtttctcggtgcctgacattatccgatactcacctccgcccgcacagccgccttgtttgcctgcttgtctatactaggtgcgccttattttgggactcagttatcggtcggtcggctgtttatttctattattgttacttaaattgccctctcctttttattttatgaacacgaccagtgtgaccgcagccacagcaacaaaatacctcgaacaaccggcaaatgacactaaaatacaacatagatgtctgcaatataccggatataataggtttttggtatttgccctcatttggataaaatatgcatatcgatattgttatcgatatatttctgcctcaatgacgttcaaaatttttcatttgaatattacgatcttaaataattacttggcggtctatatttaaagacaccattgtaatgctatagtatattatctagtttattttaaattatattttctcgataagtgtcgatatatagtaatcaaatgattttatggtgtttaaaaaataaatagtttaaatacctcttcagtacaacaaggttgaaaatcaaatacaagacatcagaagaatatgtttttcaagccaaaagcaagtcgtttcagcgaattattaccgttttaaggtcctccgatgttgcgcatgctctaaacggctttccagccaacaacaacggtaaatgcaactgaatgtaatcgtccagtgcttccagttgcagagcgctctgagattcttcgctctttgatcggaatatatataggagtagctttaataaaatacgcctgcagaaagcggctaagaggtaaaacaagacgacctcgagcaaagttgtcgcaaaaataaacgaaataaaggcatgcaaactaaaatccaacagacatgcagtgtgggaaggagtgtataaactgcagaaaaagttgttgataactcgaggaaataacattattgaatcgaaatatttaaaattgtatgtatcatagaaatgttaaatcaaatttataaatatccattttccgtttgagattttgcaataaagcatttaatttctaggaaaactttctcttctgtttaagagaaaggatattcactagcaaatgcgcaattatttcgagaacccgctaccgaaacgggaaaaaacaggcggctttggtgacaaaaacagaataacaagctaaagcgctcata

SEQ ID NO: 524 - DNA, 985 bp, DROSOPHILA
gctgcggtcacactggtcgtgttcataaaataaaaaggagagggcaatttaagtaacaataatagaaataaacagccgaccgaccgataactgagtcccaaaataaggcgcacctagtatagacaagcaggcaaacaaggcggctgtgcgggcggagatccttcttaccggagctgacctgaacggagcggagtggattggagtgcggagcagtgcagtgcagctgagcgtgacaatgggcgcctgtgtatgtcgcatgaaccccgacaacgagacgatgagcgtctcctctgcgagcatctcgcgtccggccagtgcaggcattgccatgggtgcggcgcgcaagaaccgaccgctttgccacgagactatcaggtggcggtccgacgtgccactgaccgagggtcagctgcggtccaagcgggacgagttctgggatactgcgccggccttcgacggtcgcaaggagatctgggatgcgctacgggcggcaaccaccgcggccgagggtcttgactttcagatggcccaggccatcctggatggggctaacgtgtcggttcccaatggctaccttacagaatgctacgatgagctgggcacccagtacaaagtgcccatctactgtctgtcatatcccataaatatcgtaaaggaggagaacgggcgcgactcgcctgccgaatactctgagcccgtggatggcggcaccgatatcttcttgaagctgcgcatatcatcgaccatgactgatgttaaactacccgtttactccaaggacaccgtggggcagtgcaagaaaaagcttcaggccgcggagggtgtcgacgcctgctgccagcgatggttctacagcggaaaactcctgggcgacaaggtgccaatcgacgagtgcagcatacaccagggatatgtggtgcaggtgattgtcaacacggagcactacaaccacgacaacagcacgagtacagcgcacgccagctag

SEQ ID NO: 525 - protein, 249 aa, DROSOPHILA
MGACVCRMNPDNETMSVSSASISRPASAGIAMGAARKNRPLCHETIRWRSDVPLTEGQLRSKRDEFWDTAPAFDGRKEIWDALRAATTAAEGLDFQMAQAILDGANVSVPNGYLTECYDELGTQYKVPIYCLSYPINIVKEENGRDSPAEYSEPVDGGTDIFLKLRISSTMTDVKLPVYSKDTVGQCKKKLQAAEGVDACCQRWFYSGKLLGDKVPIDECSIHQGYVVQVIVNTEHYNHDNSTSTAHAS

SEQ ID NO: 526 - DNA, 5722 bp, DROSOPHILA
aagcgggcgcgtgcctcggacagcatttccagctcgtcctcgtccatgtccttgggatcgggccgcgccggcttggtctctggattggggtcaatctctccgggcttcaacttgcgaggatcatccatcgtgtcctcgccatcctctttgcgttgggcttggtctctgtacggcaggaaagggatcagaaattttctacttagtatgttgtgcgttggactcacagcaagtactcatagcgctccaggcactgggctgccgtccgtccgatgatcggggctatggtgcgccactgcgtcggcatcagcttggccaagtggagcagtttctcgtcctcctcacgggaccactcggtcttcttgatgctgggatccagccactcgtaccacctggccttgcactgcttggcggactttctgtgcaggagggaggcaattcgactccactggttcttgccatatttcataaccgcagctttgaggatttcatcctgggaaaatgaaatcggtagccaatgtaagccatgtgtggttaaccgatagactattgggataattacctccgtgttgcgccacacgccgcccttgatcattattcgcggcattctggggccttatgttgctttctgtcgcgtatacaatggattttcacaattttcactcgagtccacgaaactccgctcttttttttgcagtagccgctagcgatggttagtcttcgataacagcgatatctccagcacgttttggtatatttatagaacctctagttaaactattctagcttagtacaaaaaaatttcattatattgtatttagtcttcgtataccgtttgatttaacttcggtcttaatattggtaacttaaattattcaatttaataaagggcctatacacacgacataacataacgcgacagtgtgaccgaatatagttgtgcaaacaccgctgccacactgtgtacagcaacagctgttcgctatcagttattttgtgatgaaaagttttttttctgcgtaatgccaatttttgtgatgcggaattaagaggcgtgtgcccaggaagcggaaaaccggcaaccggcaaccggaatccggcaccgggaatcaactggaccaaggaaggcacccacgatgagcgatgcgacctatccgggatattacggcggcaaccaggtgagcaaccagcgagtacctctggccagaaaaacacgccgtgtgtcttccagctgctcccgttgtcgcatccgcatcctacacatccgcaccaagacctgtcgctttccacgccggttcactccttggagcaggactccaacttcgggggattctttgacgaagagctggtcatcggatcgggatccggatctgcctccgcgtctgctgcaaacaccaccccttctggaactactttgtggctggccgatggcgggaatcgatcacctactgaggtggcggtggagtcccagcccaatcagggcattccctttgtccagatccacaccaccgacttgcagcaaccagagaaaagctaccgcaatgccttccgcaggcgtacagcggaaattaagtcggaggaactaatcaagtcggaacttgcggaagcggcagccaaggatcgcctgaatgccacgccaacgccaccaactcgaaattccagctgcgccagcgtggagggcaaggcaatcattcaggagggtccgcctcttatcctgcgctgtcctaattgtccattcttaagcctctgccagatgcgtcttcagcaacaccttagtcagggcaactgctatatggagcagcacaggaaacagtgtccaggtgaggcatagtgcgccttcaatatgagtgctctgctggaatgcttcatcatatttgcattcacttttcacgtgtttttcgacaggctgctcaaacattttctacaccagcgatgcgctcagcttgcacctcagcttggaccatcaaatggaggacagtgagacacttgcgcttatgggcagaaaagtcactgaagcacaaactaaaaagcagactcagatgtcgcagagccaaaatcgacccaagagccgcatctttataaaaagcgtagattgcctaagggagccactcccggatttcccgcccttaatgccggatagcgggtccgccgctaacattcttgatctgctggaaggtgtggctgtaggtgcatcgccgaccgaacagacaatgccaacagcacctgctgcgaatttaccagctccgccgccaaagcccatccagaagatctccatcaagagcgtggacgtgctcagggagaccgctttgctgccgttcgacttccagctgcagaaccattcggtcaatacggacaatagtctccctgaagttcctgatgttgtcggggagccggagaagccgcgccagccgaagatttatatccgcaatgtagacatcctcaaggaaccgatggttttgccatctgctctgcccggtctgggattcaatagcaccatgccgtcggcagcagagccaggacaaagtggcctggttgtaggaggagcagatggtgatgtcttccagtcggagacactactaacgcccacgtgtcagcttccaggattcgagcccagcctcgccccgctcgcacagatgtgttccgaggcatttccctttgattctgtgctgaatggcaatggagcacctgccgcccatgtggaaaacacacgttttagtgctttggaccttgattttggtgtggattttgtttcggaagaggcaactccgccacctcctctgaatgatccactgacaatgatggaaccacaacctgtccagctggagcactacatgccacctacggctcccattacgaccaagcaaaagatcttcatcaaaaacgtggacattttgaaagcaccgcagaggggcaccttgcacctgcgcactgtggacgaactaaacctaatgaatcgcaccgaggtggagcacttaatcgtgcccaatctagaaccgatggcaatgaccatgatggagcttccgcccgtgcagcagcagccaatggaagtaacttcacagctcaagggaccaacggaaacgcttggcgaatttcagccgtctattagtgaaagttggcctagcgaggatggctatgacctacctgaggatctggagtgctggccgtggatggaagatgctgtaccagaagctggactcgttctgcctacacccagtgaagtggctaatgctcccccactcgatggtttgtctcacaatgcagtggatctgctagtcaaggatttttcgcatttgtacgccgcaccaccggaggacacacaaaacgcagaagaaggaactgcagcgggaggacgagggacagtgccacctctagtaccggtaacatcttcggaagggacagcctctgttgctcaaagtgcagccttaggtagtttgccggttccgccgctggttcccttggcagccgagatgaatgctgctatcgaaaagccagcccgcatctatgtggccaataatcttcttcccgccgccgtggacccaccgcttcttggaggcggcacctcggtcaggggccgtccctacggagcgaagcactctggtggagcagcttccaaaagaaaactctctctgggcccaaatcaagtgccagagggaggcaagtgccttgtggagggctgtatgttccgtttcaaatcacccgtaactttggagtatcacggcagatgccacaatggatccctcagctcaaaccaacccgttgtgtgcccggaatgcaagtccagcaactttagcaattggaactgtctgcatacgcatctctggcggacccaccaaatcgacatggagctgtactcctgccagctgtgcagctttaagacgcccatctattcgcgtctcgtgaacacccacgctaagatccactcggaggagcgaaactataagtgcgagcagtgtggcaagggatttaagaacaccaagcaattgaagaatcaccgtcgcttgcatcgcactcaaggattgggcatgggaaagcagtcgaacgagcagatttccgtgggaccagaaggtaatcccgttgtaatgcatcgctgcgaagattgcggcgccgccttcaagcagaagaaaaccctaagggagcacctatgcaaagagcgaaacgaacagctggaatgccccgagtgccagcgccgttttggttctaagagcagcctgagacttcatcttcggagccatcaggagcataaacgtttccgctgcgacacctgtgatcatgagaccagcgatcacaatgcctatcgccgccacctagccacgcacaaggagagtaaacgctactcctgcccgcactgcgacttccgagccatccagagcaccgcctttcgggttcgatagatttctattaataattagtcaagtttctaatagtcttgctctccgtggacagatacaccttcagacccgccatcctgaacaggagctgtccacaatcatttacaaatgcaaccagtgcaacttcaccagcatcaatcaaggtctgttgcaggttcaccaggccaagcatgacgccggaaatcacaatcaaactttagcgtcatcccagggtgatgttccggtggagaaacaatcacagatcaaggtggagagcaatttggtgctcgctcattccagtacaaaagtggctacggaggtgatcaaggctcaagagaatatcctgcaggcttcctagggacgagttcctcccttctgtacatattttagaagatagattgcgcgagaacaaagtgccgcttagttttaatcgagttttataccaaaactgtaccaatgttattagtgttaagtacgcaggaagtcacagtaagggggaaaactccaattcagatgcttgattcctttggaaggatgataatgttgatggattggatcttttcaactgaagactgtgcaatccaagacttcggaattctccgaagataattcttttgacttttacgtttttctttttctgtatatgtttgccctacaattttaaggacctgttgctttacataagtatgtatataaaggttaattggggaaggctttattaattgaactccagtttcattcctttctatatacacagcatgctcagaacagaaatacatttacacatacatttaatctcaaacctcttatcaaaatgtggaagtgtgtgggtgcctattgtaaatcaatgctcaaaagatgaatctatcttatgtagcataaacgcgtaagttactacaaattgagctataggttgtaaattagtgaaatcggtctgccaacttagaatttccctaacggctgttgggtgttagagatgcttgttattatcccgtcggtcatcaaatggaaaacgacgttccagtggagcatctgttccagggccaaaccaaagatggggcaatagaagcccagggcgtagatcaaagccttttggcgcgtctctgtcgccatgttgaaaatcgcgttgagctgcagcatcacgttcatcagaaaatgaatgcagcacactagcatccagggaagcatagccaggaaaatcttcgctgaattctgcttccgccaacgcggcgacgtcaccaggctgtgcattaacgccatggcggtcagcacgagtgaaacggccgcgtagagcataacttccaaatagcggtcttttgcggtgctttggtattttttgtccacgtccaagtcaagcg

SEQ ID NO: 527 - DNA, 3576 bp, DROSOPHILA
aaagttttttttctgcgtaatgccaatttttgtgatgcggaattaagaggcgtgtgcccaggaagcggaaaaccggcaaccggcaaccggaatccggcaccgggaatcaactggaccaaggaaggcacccacgatgagcgatgcgacctatccgggatattacggcggcaaccaggtgagcaaccagcgagtacctctggccagaaaaacacgccgtgtgtcttccagctgctcccgttgtcgcatccgcatcctacacatccgcaccaagacctgtcgctttccacgccggttcactccttggagcaggactccaacttcgggggattctttgacgaagagctggtcatcggatcgggatccggatctgcctccgcgtctgctgcaaacaccaccccttctggaactactttgtggctggccgatggcgggaatcgatcacctactgaggtggcggtggagtcccagcccaatcagggcattccctttgtccagatccacaccaccgacttgcagcaaccagagaaaagctaccgcaatgccttccgcaggcgtacagcggaaattaagtcggaggaactaatcaagtcggaacttgcggaagcggcagccaaggatcgcctgaatgccacgccaacgccaccaactcgaaattccagctgcgccagcgtggagggcaaggcaatcattcaggagggtccgcctcttatcctgcgctgtcctaattgtccattcttaagcctctgccagatgcgtcttcagcaacaccttagtcagggcaactgctatatggagcagcacaggaaacagtgtccaggctgctcaaacattttctacaccagcgatgcgctcagcttgcacctcagcttggaccatcaaatggaggacagtgagacacttgcgcttatgggcagaaaagtcactgaagcacaaactaaaaagcagactcagatgtcgcagagccaaaatcgacccaagagccgcatctttataaaaagcgtagattgcctaagggagccactcccggatttcccgcccttaatgccggatagcgggtccgccgctaacattcttgatctgctggaaggtgtggctgtaggtgcatcgccgaccgaacagacaatgccaacagcacctgctgcgaatttaccagctccgccgccaaagcccatccagaagatctccatcaagagcgtggacgtgctcagggagaccgctttgctgccgttcgacttccagctgcagaaccattcggtcaatacggacaatagtctccctgaagttcctgatgttgtcggggagccggagaagccgcgccagccgaagatttatatccgcaatgtagacatcctcaaggaaccgatggttttgccatctgctctgcccggtctgggattcaatagcaccatgccgtcggcagcagagccaggacaaagtggcctggttgtaggaggagcagatggtgatgtcttccagtcggagacactactaacgcccacgtgtcagcttccaggattcgagcccagcctcgccccgctcgcacagatgtgttccgaggcatttccctttgattctgtgctgaatggcaatggagcacctgccgcccatgtggaaaacacacgttttagtgctttggaccttgattttggtgtggattttgtttcggaagaggcaactccgccacctcctctgaatgatccactgacaatgatggaaccacaacctgtccagctggagcactacatgccacctacggctcccattacgaccaagcaaaagatcttcatcaaaaacgtggacattttgaaagcaccgcagaggggcaccttgcacctgcgcactgtggacgaactaaacctaatgaatcgcaccgaggtggagcacttaatcgtgcccaatctagaaccgatggcaatgaccatgatggagcttccgcccgtgcagcagcagccaatggaagtaacttcacagctcaagggaccaacggaaacgcttggcgaatttcagccgtctattagtgaaagttggcctagcgaggatggctatgacctacctgaggatctggagtgctggccgtggatggaagatgctgtaccagaagctggactcgttctgcctacacccagtgaagtggctaatgctcccccactcgatggtttgtctcacaatgcagtggatctgctagtcaaggatttttcgcatttgtacgccgcaccaccggaggacacacaaaacgcagaagaaggaactgcagcgggaggacgagggacagtgccacctctagtaccggtaacatcttcggaagggacagcctctgttgctcaaagtgcagccttaggtagtttgccggttccgccgctggttcccttggcagccgagatgaatgctgctatcgaaaagccagcccgcatctatgtggccaataatcttcttcccgccgccgtggacccaccgcttcttggaggcggcacctcggtcaggggccgtccctacggagcgaagcactctggtggagcagcttccaaaagaaaactctctctgggcccaaatcaagtgccagagggaggcaagtgccttgtggagggctgtatgttccgtttcaaatcacccgtaactttggagtatcacggcagatgccacaatggatccctcagctcaaaccaacccgttgtgtgcccggaatgcaagtccagcaactttagcaattggaactgtctgcatacgcatctctggcggacccaccaaatcgacatggagctgtactcctgccagctgtgcagctttaagacgcccatctattcgcgtctcgtgaacacccacgctaagatccactcggaggagcgaaactataagtgcgagcagtgtggcaagggatttaagaacaccaagcaattgaagaatcaccgtcgcttgcatcgcactcaaggattgggcatgggaaagcagtcgaacgagcagatttccgtgggaccagaaggtaatcccgttgtaatgcatcgctgcgaagattgcggcgccgccttcaagcagaagaaaaccctaagggagcacctatgcaaagagcgaaacgaacagctggaatgccccgagtgccagcgccgttttggttctaagagcagcctgagacttcatcttcggagccatcaggagcataaacgtttccgctgcgacacctgtgatcatgagaccagcgatcacaatgcctatcgccgccacctagccacgcacaaggagagtaaacgctactcctgcccgcactgcgacttccgagccatccagagcaccgcctttcggatacaccttcagacccgccatcctgaacaggagctgtccacaatcatttacaaatgcaaccagtgcaacttcaccagcatcaatcaaggtctgttgcaggttcaccaggccaagcatgacgccggaaatcacaatcaaactttagcgtcatcccagggtgatgttccggtggagaaacaatcacagatcaaggtggagagcaatttggtgctcgctcattccagtacaaaagtggctacggaggtgatcaaggctcaagagaatatcctgcaggcttcctag

SEQ ID NO: 528 - protein, 941 aa, DROSOPHILA
MRLQQHLSQGNCYMEQHRKQCPGCSNIFYTSDALSLHLSLDHQMEDSETLALMGRKVTEAQTKKQTQMSQSQNRPKSRIFIKSVDCLREPLPDFPPLMPDSGSAANILDLLEGVAVGASPTEQTMPTAPAANLPAPPPKPIQKISIKSVDVLRETALLPFDFQLQNHSVNTDNSLPEVPDVVGEPEKPRQPKIYIRNVDILKEPMVLPSALPGLGFNSTMPSAAEPGQSGLVVGGADGDVFQSETLLTPTCQLPGFEPSLAPLAQMCSEAFPFDSVLNGNGAPAAHVENTRFSALDLDFGVDFVSEEATPPPPLNDPLTMMEPQPVQLEHYMPPTAPITTKQKIFIKNVDILKAPQRGTLHLRTVDELNLMNRTEVEHLIVPNLEPMAMTMMELPPVQQQPMEVTSQLKGPTETLGEFQPSISESWPSEDGYDLPEDLECWPWMEDAVPEAGLVLPTPSEVANAPPLDGLSHNAVDLLVKDFSHLYAAPPEDTQNAEEGTAAGGRGTVPPLVPVTSSEGTASVAQSAALGSLPVPPLVPLAAEMNAAIEKPARIYVANNLLPAAVDPPLLGGGTSVRGRPYGAKHSGGAASKRKLSLGPNQVPEGGKCLVEGCMFRFKSPVTLEYHGRCHNGSLSSNQPVVCPECKSSNFSNWNCLHTHLWRTHQIDMELYSCQLCSFKTPIYSRLVNTHAKIHSEERNYKCEQCGKGFKNTKQLKNHRRLHRTQGLGMGKQSNEQISVGPEGNPVVMHRCEDCGAAFKQKKTLREHLCKERNEQLECPECQRRFGSKSSLRLHLRSHQEHKRFRCDTCDHETSDHNAYRRHLATHKESKRYSCPHCDFRAIQSTAFRIHLQTRHPEQELSTIIYKCNQCNFTSINQGLLQVHQAKHDAGNHNQTLASSQGDVPVEKQSQIKVESNLVLAHSSTKVATEVIKAQENILQAS

SEQ ID NO: 529 - DNA, 2452 bp, DROSOPHILA
acctggaacgtggtcatggacacgatggactcacgcaccaagaggtaagacttcatttgttccaattagaagatttcagagtgctatgacactggcttgcaagtattgctaactgaatttattttgttaattcttcaagcagtcgttcggctagagggaattcccctcaaaaagaggggcccgtggatattgaactccagccgcgggttctggatgaggaatgctccattggcatcaccgacttggacgcctcatcgttctgctcccagtactcgtgctgcagctgcagctactgtgatgtggaaaccactgggacccagaccaatgtctacagctcaataggcgacgacttttccctggactccatgttcgaggcgggaaagtcgatggttgacaggtgagcaaagctacagactattcaaaccccttagccacgtagcaggcagcttttgtcagaggttgatgggagacgcattgcatactttcaggccgaacgaagttcttagcaaccatattcaaaaaaaaacgttgcttgaatttaggctgaaagtttatttatcttatatgtatgagccaactagttgtcactaaattttgaaatatgtctatgagaatttaatttcacggtcattctttcatacttatgtgtacctaaaaatagctctgaaatttggatctttctcacagtgaaagtgatggcgtaagtggtgtgcccaccacaaaaactagactgatagtgaatccacttgagtatcggtaaaagtttgtacgcctctgtcaacttgtttagcaattgtgtttgcttgcaaataccctgcattcgaaccctctcgcaactactgccaaatttttaatacctcagctaaatttaaattatcaatcggtgcgccaaaatgaagttcgtattagtacgcgtgtgtgcgataactccctatcagcggaggactcggctataaaatcgcgaagccttccctccatggacatcagtttctgaacactgcaaacatgaaggctttcatcgttctggttgccctggctctggccgctcctgctcttggtcgcaccatggaccgttgctccctggcccgggagatgtccaacctgggcgttcctcgtgaccaattggctcgttgggcctgcattgccgagcacgagtcctcctaccgcaccggagtggttggtcccgagaactacaacggctccaacgactacggaatcttccagatcaacgactactactggtgcgctcctcccagcggtcgcttctcctacaatgagtgcgggttgagctgcaatgccctcttgaccgacgacatcacccactccgtccgttgtgcccagaaggtcctcagccagcagggatggtccgcctggtccacctggcactactgcagcggatggttgccgtccatcgatgactgcttctaaaccgatttcgaccctgaataaaatgattgcataacaccagcatctcctcttcgaattatagatctgttaatagcttacgttaaactggcatactagtttgtccaaattcgattcccttagtactagtaccagtgctattagtttttccacacttaactagaaaatataagccgaagacttgaaatatcgatgactttacgttatagaaatatttaacttctgtgccccgagaacattatcctataatgatggacgctttcaagcactcttcttaactgcgattccgattccttggtagagccactctgaattggcgaaatgaggctcatttctaatggggcatggggcatttccacattcttgtaactaatcacagtttgtggttgtgctctgagaatcgaagattccctcgggcgcctgacagtcttcattaattcggaggtgtgcagttgctaccgttgctcgcgagctcaaaagtcttatacagggggtcttatacaacagacgctcttgttcgcgctctcgctctctgcacgatctctccttcggctagcacttcgggttcaagctcgtcttgggttcaggccaagtttcaacttcggattagttggtgcgtgacatttgttcgaggcggacgtgtagatcgcaagtgcgtacttgaatctcggctttggttggcaattaggcgagcgatggcttagctagatgttccagaggtctagccaagttcaatcgacagatcgacgagcagccacagtgggtcctgcgatcccaagcggtagtgaacttccattcccatctgcaatagctcctgagcgttgagtgtcactgacgattacgcgatatgaattttcctattgtgtattctcggaagaaacgagtttgatttgatagaaaagtgcgcttttggccccggtccccaacccaaccaactgtcttcccccaccccacgcggctcttcttggctaacagcatcgcgagtggagtgcattctgctgctaacggtaaaacgagtactggaccc

SEQ ID NO: 530 - DNA, 452 bp, DROSOPHILA
caaacatgaaggctttcatcgttctggttgccctggctctggccgctcctgctcttggtcgcaccatggaccgttgctccctggcccgggagatgtccaacctgggcgttcctcgtgaccaattggctcgttgggcctgcattgccgagcacgagtcctcctaccgcaccggagtggttggtcccgagaactacaacggctccaacgactacggaatcttccagatcaacgactactactggtgcgctcctcccagcggtcgcttctcctacaatgagtgcgggttgagctgcaatgccctcttgaccgacgacatcacccactccgtccgttgtgcccagaaggtcctcagccagcagggatggtccgcctggtccacctggcactactgcagcggatggttgccgtccatcgatgactgcttctaaaccgatttcgaccctgaataaaat

SEQ ID NO: 531 - protein, 140 aa, DROSOPHILA
MKAFIVLVALALAAPALGRTMDRCSLAREMSNLGVPRDQLARWACIAEHESSYRTGVVGPENYNGSNDYGIFQINDYYWCAPPSGRFSYNECGLSCNALLTDDITHSVRCAQKVLSQQGWSAWSTWHYCSGWLPSIDDCF

SEQ ID NO: 532 - DNA, 3038 bp, DROSOPHILA
tgatcttaaattccagagccagtaccgcttcgtgtgcgagtgcatctgcgccgcctacatgaagatctcacgcagcagtgcggccattaacgacgacgaggattaggggcaggaccatctagctacgcaatcaacaatcttccgctaacacgccccaagtttttcttattctatacgaagcttcgtctaaatctatttaatttttagatcccgtagacatatgtttaaaactgattgtatatcattacaattacaaaacccgtatattgtattatcaactccgttcataaggtatccccaaatacacacttatacattatctctccatcagttgccgaaagtgctgcaaggaacgattctaaatttacaaagccaccacggaatggttaacgacgtgaaccaactacctaatcgaagtatacaaagcgaaacaaatggcaatttatttacacccatccaacgctacgcgccacccataattggcggtcgataacaagacgcaaagagcaaccgagaatgcgaaccttatacactgatagacatgagaagataaaactgttagtattttagcaccaaatcaattcataaatgtatttatgctgaacaaaaatccaataaaatgtgtaattaaaaaacgagtcttttatttcttcagtggggagccttgtgtgttaataattaatttcgtacatttttccaaaatatctgccgaggttggcgccaaaaaattgactttgcctagagatgaaatatttaaaaactataaaatatcgttacacgtttacttgtacgaaaatttatgaacttttggaaaataagtagacttgattgtttattgaattactattattatacgactttttaaatagcataacaaatattatcgagcgaatataagaatctaacgaaagttatttgaaggttgggagtgtttgacgcatgcgtctgatcccttggaccatctttagctttgcattggcttatagattttagtcgcgagatgagttgccccggatcccttagaggtttccacattccgcaccttgcaccgggagagacccccaaaattcgtgtggatagtgcctgtatcgaatctcatccagacgcagaaatttcgaccagtaacaggttggtggcacctggtaagcgaacggacaagaaagataatgggtcaatcaggacgaacatgaaacggaaggctaagtgcatggaggaggattcgttgaaggctaacggcgatttggccttgtttcccggacgcgacgagagctatccggaggagttgaacaggcttattggaccactgaactgtcagctgtgtaaggtgcagatgacctcgaggaagcgcgcccgggatcactacgaatcgaaggcccacgaccgacacatcagcgcctggctggccaagaactacacggaggtgggtctggaggcgcctccagtgaagcggctggccaagcaaggaccaaccggcccaaacgcctttcactgcgagctgtgcaatctggaccttacctcctctatgcacgcccgccagcactatttaggtcggaagcacaagcgtgtggagcagggcgtcgcgaagccctccggagccaggcactgtgatacatctgttggtcgttacggcatagggagtctgttccgcaagccggaaagtttaaccaaagattcccctacggacgtattaatatcagagaacagcgtgatcaagtctgacgataatgagcgcacctgccacctgtgtaaaatagtggtcacctctgctgcacaaatgcaggcccacttggctggagccaggcaccaaaagaactggaggacctcccggcaggatcagaatcattcggaggcgccgatccctgaaacggagaaattagatgccgcggaactggccttgtatcgcactccaatgggtcagtactactgccagccctgcaacatgatgatgaaccatgagagcaccttgcaacagcactttattggcaagaagcacctgaagagggtaaaaaacctttcccaaactgagaagaacgtgtaaagaatttatttgatataccctaagcctaagccatgacttcccgttagcagtaaagcttccttaataataatgacattcgagtttgggaaacagctattttgtttaagaaaggcattataaaaaccgtaatttgttatcatacccattactcatagaggggtatattaaactcgttaaaaggaatacaaatttctatcgatatgccaagataattttgaaatttctctctcaaactcactcccactatctggtatctgatagtcgagaaattcgactataacattctttcttgtttaaaaaaattgtctaaatttagggattcaaaagtggtttaccgatgataagctttcttgagccccacttaatatgatcacaaggtttaatttcttttctgcatttatttttaaaattattcgccgttgttatttcgtagataaatcggtagtggtcaacttttttttattaactgtcaggccaaaaacaaatggaatttaaaatagttcaaatcaaattcgaatacgaaaataagtgttgtattttgaaaaagaaaaaaaattcgtaatttcacaccatggccgaggagatagaggttgaggagacggaggacttccacgacatggacttcaatgacgaagagccatcctgtagtggaggagctgtccaggccaggacggagcgctttgtggtgaagaaatgggttgcgcacgccatgtggggatgggacgtagcagtggacaactgtgccatctgccgtaaccacatcatgaacctgtgcatcgagtgccaggcggacccgaatgcaaaccaagacgagtgcactgtggcttggggcgagtgcaaccacgcattccattaccactgcatcgcgcgctggttgaaaacgcgcctggtctgtccgctggacaacaaggagtgggtctaccagaagtacggccgctagcgaggaatatggatcgggatattaggtggtgatagctgtttgctggcatgtaattactgt

SEQ ID NO: 533 - DNA, 1038 bp, DROSOPHILA
atgagttgccccggatcccttagaggtttccacattccgcaccttgcaccgggagagacccccaaaattcgtgtggatagtgcctgtatcgaatctcatccagacgcagaaatttcgaccagtaacaggttggtggcacctggtaagcgaacggacaagaaagataatgggtcaatcaggacgaacatgaaacggaaggctaagtgcatggaggaggattcgttgaaggctaacggcgatttggccttgtttcccggacgcgacgagagctatccggaggagttgaacaggcttattggaccactgaactgtcagctgtgtaaggtgcagatgacctcgaggaagcgcgcccgggatcactacgaatcgaaggcccacgaccgacacatcagcgcctggctggccaagaactacacggaggtgggtctggaggcgcctccagtgaagcggctggccaagcaaggaccaaccggcccaaacgcctttcactgcgagctgtgcaatctggaccttacctcctctatgcacgcccgccagcactatttaggtcggaagcacaagcgtgtggagcagggcgtcgcgaagccctccggagccaggcactgtgatacatctgttggtcgttacggcatagggagtctgttccgcaagccggaaagtttaaccaaagattcccctacggacgtattaatatcagagaacagcgtgatcaagtctgacgataatgagcgcacctgccacctgtgtaaaatagtggtcacctctgctgcacaaatgcaggcccacttggctggagccaggcaccaaaagaactggaggacctcccggcaggatcagaatcattcggaggcgccgatccctgaaacggagaaattagatgccgcggaactggccttgtatcgcactccaatgggtcagtactactgccagccctgcaacatgatgatgaaccatgagagcaccttgcaacagcactttattggcaagaagcacctgaagagggtaaaaaacctttcccaaactgagaagaacgtgtaa

SEQ ID NO: 534 - protein, 345 aa, DROSOPHILA
MSCPGSLRGFHIPHLAPGETPKIRVDSACIESHPDAEISTSNRLVAPGKRTDKKDNGSIRTNMKRKAKCMEEDSLKANGDLALFPGRDESYPEELNRLIGPLNCQLCKVQMTSRKRARDHYESKAHDRHISAWLAKNYTEVGLEAPPVKRLAKQGPTGPNAFHCELCNLDLTSSMHARQHYLGRKHKRVEQGVAKPSGARHCDTSVGRYGIGSLFRKPESLTKDSPTDVLISENSVIKSDDNERTCHLCKIVVTSAAQMQAHLAGARHQKNWRTSRQDQNHSEAPIPETEKLDAAELALYRTPMGQYYCQPCNMMMNHESTLQQHFIGKKHLKRVKNLSQTEKNV

SEQ ID NO: 535 - DNA, 6411 bp, DROSOPHILA
gaaaataaggttgaaaggtaaaatagttggatagtgcttacaattatatacacatagatacttgggtctgtgtatactagtcgagagcatttaagccaattacacggcacatcaatcattagcagacgatttgagacttggggcaactacactgagacaattgtattatatttcaaaatgtataaatgctacctataaaatgctattttttttacgaattctgataggatgaatttcagaatcactttttataatgattcttatgattcaaaaatatttttctgagtgtaaaaatagaaaacgagcttgtattagtactgtcccctatataatgacagagattaccttatcttcaagtttgacaatggtttttctgggctgtttgcggcccacgagcaagaaaaagctacgcggtgcaatgaatgaggcaaagaaaggcctcaaagacaaattattagtcatccagcaattggcgacttttgtctgcgtcgattgcttgtctgggcagagaaactacgtggaagtatgctccatccaataccgcgggggatatagaaatgagaggcagttaaagcgaagccctcgattgttacgtagtgaattgtgtgttgaccataaaataacaaacaagaaaataaacaactgcagcggaagaggaggcgtgagcgcttttcattgctttcaacaagccgtaagttggtactcatatgtgccccgttctcaaccactcttgtttttcagtcaatcagatatccatccacatgaaaaggagccgagggaggcagccaagttaactggaaacaaaacatccagcaagcatactaagctaagaaatataaacactcttgccaatttatcgaataaacaagaagccgagccaggagaggcagcccgaacaaacagggagctccttttccgccatctgcgccctccaacgtgatacacgaagttttgtaaccctcgaacccgacccgaatcatggagttcatggaactcggtcatgtttgagcgcttccgactgaacaacctgactagaacctttcgcctgcgaggaggcggcccagaactggcgcgcgacaagaagaccccgcaacggcagcaatgcgtcaccgtcctattcctagatgacatcacgcacacctttcggatcgaggtaacacccaacccttatgatttaaagttccacttgcacaacttggtttactcctatgtatatatatatatccgcgcataattatgcggtatgcgaatcgtagtcaaaacaaagaaagtttcgcgatattcgaaatcatcactattcatttattcaattttatctggttacttttggctgctgtgcactcagagctcactttcttctcgactagcatcttcagacacgcacttgttcgcattgttttccaatctccagtcgaggtttcactttctttcacctcgatgatcgagtagtgtgtgtggttgccgcagattaagattatagtagcctaccaaattgcaaccaaatggatgtcgattaattactgtagttgctatgaaggcaatgcgaacaagaaatccaactaaaaatttgtgttttttaattggcaaaaggagtaaatgaaattacatttaataatcttaactagttgctttcgtattatgaaatttaaaaatatccatttgtacaccttatagaaacgtgcgaaaggctctgaactcctggatcaggtctttcagtatctcgagttatccgaaagggactactttggcctactatttccacagaagccaggtgacgtcgtggtgagttatgaagttttccattgctcaaaaatacattaataattacttgacgcgcattttcttctcagagatgggttgatgctcagaagcagtttaagaagcaatgcagcagcgtttccctcgacaacgatgccgtaccattattagagtttagggttaaggtataacaacagtgctttccatttctttctacaaaaaaaacttaaggtctcttttgtttagttttttgtaagcgatcccagccgactgcaggaggagttcacacgctaccagttctatctgcagatcaagcgcaacattctactgggcaagctgccctgctccagcaacacccagtgcctgcttgccagctacactgtgcaatgtaatttaatgaccttcagcaggttaacctaatgagaaatcacaaaaccatccatctttcttacagccgagttgggtgactttaacgcattagaacaccagccgggctatctgagcggaatgcagctgctctgcgaccagacaacggaggcggagcggaaggttggagaactgcacaagttgcaccgtgggcagctaccggcggacgcggagtacaactacctggagcacgctaagcgattggagctatacgggattgacctgcacagggccaccgactccaacggcaaggagctgcagctgggcgtatcggccgtcggactgctcgtcttccagcattcattgcgcgtgaacactttctcgtggagcaagatggtcaaggtgtcgttcaagcgtaaggacttcttcatccagttgcgccgcgagcccagcgagaactacgatactttgctgggctttgggatgagcagccacaagcacgccaaggcgctgtggaagtcctgcgtggagcaccacagcttcttccgcctaaagcgaccacaccgcctctcacgcttcctcaatatcagtttgggtagcaagttttactactctggacgcacagagctacaggctgtgcaggagtccaaacagcgtggtcgcattcacaaggtatttgtgcgctcgccgagcaagcggcttctgggagccgccggcggtgtgggaacgtcaggctcctcgggcggtacgcctatgcagcagcacagcggctccgagagcgccaattcccacaacaacggaaagccagccggcgcaggaaccatactgaccattacaaagacaagccgcccgcacgataacaaggtcacctccaaggaggccgattccatgccgcgcaaggcgtgggagcagcagagcgacgagtatgacattcagctgtaagtaggaaataaatttgaaaactgttccatgagttaaggttatatacgctacttgttttttgattgacagcgacgtcggttttattgaacagtgcacccgacgcttcgagtctgcatccccgtcgcccatgccgcccgcctacagctccggccagcacagtccaattctactgccaacaaccatcgcggacgccgtgggtcatcagcagccggaaagcggcagcgacctcatcaccattcgtttgcaggccgacgagcagggacgctatggtttcaacgtgaagggtggagtggatttgagcctgcccgttcaggtgtcaaaagtggtaccccatacgcccgctgatcgttgcactccgcgagtctgcgagggcgacgaggtactcatgattaatggccgggatgtgcacggcctgcgtcacgagcaggtggtggccatgattcgtgattgccgtcatcaagccagcggcgaattgctactgacggtgcggccccagcgctcggcccctctgctccttgaggaggagccgttgtaccagtacgtcccggagagcgatgagatcggatcacactctaatctgctcgatggggatgctttgtttacccagagcctgctgctgctcagcgatggcttggcgtctggcgccctgttggcgcagtatgagctcatgtacaggaagaacccggatctggccattactgaggctcggaagccggcgaacgcgcccaaaaaccgataccgagacatatcaccatgtatgttaaaagtcactaaattgaggcattttaacatgaaaaacctatttcagatgactgcacccgggtatctctggtcaactcgctcacaggcgactacatcaacgccaactacgtaaacatggagattcccggcggagcggtaaaccgatatattgccacccagggacctctggccagcaccacgacggacttttggcgcatggtacagcaagagagcagtcatctcctggtgatgctaacgaccgtaatggagtctggtcgccagaaatgccatcagtattggccggtgacgggtgaggagcttcagctggcggagggattctcggtgcgatgccttagcgagaaaccggacgagacaggtagttttgtcttccgcgagtttgttctgaaggacaagcacgagcagcgacacatccaccacatgcagtacttggcctggccagatcactgtgtgccctccgatcctaatcttttcctagagtttacggagcgggtgcgtgccgctcgaaaccgcacgctccttcaggagatcgaggagagtctgaagcaggtgcgcctgatggatgccgatgcggatgccgacgagaacggcggactgatgcgcgagcgcaagtgtgcggccagcaacggagccactcctgaggacgagacgccggtctcgacaagcgtgcatcagtgagtacaagggctatgaattcgaatgggtgatggatatcatcaatcgagtacttcatcttattaatcttcaggtgcatcagtgcagccaatccacctgtgattgtccactgctcggcgggaataggacgtactggagtgctcatactgatggacactgcgctggctttgatggaggctcgagaaccggtgtatccgttggacattgtgcgcaccatgcgcgatcagcgtgcctgcatggtgcagaatgtggtgagtactgctggataggatttacgtgtgggtttcctataatcgtgatcttaaattccagagccagtaccgcttcgtgtgcgagtgcatctgcgccgcctacatgaagatctcacgcagcagtgcggccattaacgacgacgaggattaggggcaggaccatctagctacgcaatcaacaatcttccgctaacacgccccaagtttttcttattctatacgaagcttcgtctaaatctatttaatttttagatcccgtagacatatgtttaaaactgattgtatatcattacaattacaaaacccgtatattgtattatcaactccgttcataaggtatccccaaatacacacttatacattatctctccatcagttgccgaaagtgctgcaaggaacgattctaaatttacaaagccaccacggaatggttaacgacgtgaaccaactacctaatcgaagtatacaaagcgaaacaaatggcaatttatttacacccatccaacgctacgcgccacccataattggcggtcgataacaagacgcaaagagcaaccgagaatgcgaaccttatacactgatagacatgagaagataaaactgttagtattttagcaccaaatcaattcataaatgtatttatgctgaacaaaaatccaataaaatgtgtaattaaaaaacgagtcttttatttcttcagtggggagccttgtgtgttaataattaatttcgtacatttttccaaaatatctgccgaggttggcgccaaaaaattgactttgcctagagatgaaatatttaaaaactataaaatatcgttacacgtttacttgtacgaaaatttatgaacttttggaaaataagtagacttgattgtttattgaattactattattatacgactttttaaatagcataacaaatattatcgagcgaatataagaatctaacgaaagttatttgaaggttgggagtgtttgacgcatgcgtctgatcccttggaccatctttagctttgcattggcttatagattttagtcgcgagatgagttgccccggatcccttagaggtttccacattccgcaccttgcaccgggagagacccccaaaattcgtgtggatagtgcctgtatcgaatctcatccagacgcagaaatttcgaccagtaacaggttggtggcacctggtaagcgaacggacaagaaagataatgggtcaatcaggacgaacatgaaacggaaggctaagtgcatggaggaggattcgttgaaggctaacggcgatttggccttgtttcccggacgcgacgagagctatccggaggagttgaacaggcttattggaccactgaactgtcagctgtgtaaggtgcagatgacctcgaggaagcgcgcccgggatcactacgaatcgaaggcccacgaccgacacatcagcgcctggctggccaagaactacacggaggtgggtctggaggcgcctccagtgaagcggctggccaagcaaggaccaaccggcccaaacgcctttcactgcgagctgtgcaatctggaccttacctcctctatgcacgcccgccagcactatttaggtcggaagcacaagcgtgtggagcagggcgtcgcgaagccctccggagccaggcactgtgatacatct

SEQ ID NO: 536 - DNA, 3260 bp, DROSOPHILA
atgtttgagcgcttccgactgaacaacctgactagaacctttcgcctgcgaggaggcggcccagaactggcgcgcgacaagaagaccccgcaacggcagcaatgcgtcaccgtcctattcctagatgacatcacgcacacctttcggatcgagagatgggttgatgctcagaagcagtttaagaagcaatgcagcagcgtttccctcgacaacgatgccgtaccattattagagtttagggttaagttttttgtaagcgatcccagccgactgcaggaggagttcacacgctaccagttctatctgcagatcaagcgcaacattctactgggcaagctgccctgctccagcaacacccagtgcctgcttgccagctacactgtgcaatccgagttgggtgactttaacgcattagaacaccagccgggctatctgagcggaatgcagctgctctgcgaccagacaacggaggcggagcggaaggttggagaactgcacaagttgcaccgtgggcagctaccggcggacgcggagtacaactacctggagcacgctaagcgattggagctatacgggattgacctgcacagggccaccgactccaacggcaaggagctgcagctgggcgtatcggccgtcggactgctcgtcttccagcattcattgcgcttgcgccgcgagcccagcgagaactacgatactttgctgggctttgggatgagcagccacaagcacgccaaggcgctgtggaagtcctgcgtggagcaccacagcttcttccgcctaaagcgaccacaccgcctctcacgcttcctcaatatcagtttgggtagcaagttttactactctggacgcacagagctacaggctgtgcaggagtccaaacagcgtggtcgcattcacaaggtatttgtgcgctcgccgagcaagcggcttctgggagccgccggcggtgtgggaacgtcaggctcctcgggcggtacgcctatgcagcagcacagcggctccgagagcgccaattcccacaacaacggaaagccagccggcgcaggaaccatactgaccattacaaagacaagccgcccgcacgataacaaggtcacctccaaggaggccgattccatgccgcgcaaggcgtgggagcagcagagcgacgagtatgacattcagctcgacgtcggttttattgaacagtgcacccgacgcttcgagtctgcatccccgtcgcccatgccgcccgcctacagctccggccagcacagtccaattctactgccaacaaccatcgcggacgccgtgggtcatcagcagccggaaagcggcagcgacctcatcaccattcgtttgcaggccgacgagcagggacgctatggtttcaacgtgaagggtggagtggatttgagcctgcccgttcaggtgtcaaaagtggtaccccatacgcccgctgatcgttgcactccgcgagtctgcgagggcgacgaggtactcatgattaatggccgggatgtgcacggcctgcgtcacgagcaggtggtggccatgattcgtgattgccgtcatcaagccagcggcgaattgctactgacggtgcggccccagcgctcggcccctctgctccttgaggaggagccgttgtaccagtacgtcccggagagcgatgagatcggatcacactctaatctgctcgatggggatgctttgtttacccagagcctgctgctgctcagcgatggcttggcgtctggcgccctgttggcgcagtatgagctcatgtacaggaagaacccggatctggccattactgaggctcggaagccggcgaacgcgcccaaaaaccgataccgagacatatcaccatatgactgcacccgggtatctctggtcaactcgctcacaggcgactacatcaacgccaactacgtaaacatggagattcccggcggagcggtaaaccgatatattgccacccagggacctctggccagcaccacgacggacttttggcgcatggtacagcaagagagcagtcatctcctggtgatgctaacgaccgtaatggagtctggtcgccagaaatgccatcagtattggccggtgacgggtgaggagcttcagctggcggagggattctcggtgcgatgccttagcgagaaaccggacgagacaggtagttttgtcttccgcgagtttgttctgaaggacaagcacgagcagcgacacatccaccacatgcagtacttggcctggccagatcactgtgtgccctccgatcctaatcttttcctagagtttacggagcgggtgcgtgccgctcgaaaccgcacgctccttcaggagatcgaggagagtctgaagcaggtgcgcctgatggatgccgatgcggatgccgacgagaacggcggactgatgcgcgagcgcaagtgtgcggccagcaacggagccactcctgaggacgagacgccggtctcgacaagcgtgcatcagtgcatcagtgcagccaatccacctgtgattgtccactgctcggcgggaataggacgtactggagtgctcatactgatggacactgcgctggctttgatggaggctcgagaaccggtgtatccgttggacattgtgcgcaccatgcgcgatcagcgtgcctgcatggtgcagaatgtgagccagtaccgcttcgtgtgcgagtgcatctgcgccgcctacatgaagatctcacgcagcagtgcggccattaacgacgacgaggattaggggcaggaccatctagctacgcaatcaacaatcttccgctaacacgccccaagtttttcttattctatacgaagcttcgtctaaatctatttaatttttagatcccgtagacatatgtttaaaactgattgtatatcattacaattacaaaacccgtatattgtattatcaactccgttcataaggtatccccaaatacacacttatacattatctctccatcagttgccgaaagtgctgcaaggaacgattctaaatttacaaagccaccacggaatggttaacgacgtgaaccaactacctaatcgaagtatacaaagcgaaacaaatggcaatttatttacacccatccaacgctacgcgccacccataattggcggtcgataacaagacgcaaagagcaaccgagaatgcgaaccttatacactgatagacatgagaagataaaactgttagtattttagcaccaaatcaattcataaatgtatttatgctgaacaaaaatccaa

SEQ ID NO: 537 - protein, 916 aa, DROSOPHILA
MFERFRLNNLTRTFRLRGGGPELARDKKTPQRQQCVTVLFLDDITHTFRIERWVDAQKQFKKQCSSVSLDNDAVPLLEFRVKFFVSDPSRLQEEFTRYQFYLQIKRNILLGKLPCSSNTQCLLASYTVQSELGDFNALEHQPGYLSGMQLLCDQTTEAERKVGELHKLHRGQLPADAEYNYLEHAKRLELYGIDLHRATDSNGKELQLGVSAVGLLVFQHSLRLRREPSENYDTLLGFGMSSHKHAKALWKSCVEHHSFFRLKRPHRLSRFLNISLGSKFYYSGRTELQAVQESKQRGRIHKVFVRSPSKRLLGAAGGVGTSGSSGGTPMQQHSGSESANSHNNGKPAGAGTILTITKTSRPHDNKVTSKEADSMPRKAWEQQSDEYDIQLDVGFIEQCTRRFESASPSPMPPAYSSGQHSPILLPTTIADAVGHQQPESGSDLITIRLQADEQGRYGFNVKGGVDLSLPVQVSKVVPHTPADRCTPRVCEGDEVLMINGRDVHGLRHEQVVAMIRDCRHQASGELLLTVRPQRSAPLLLEEEPLYQYVPESDEIGSHSNLLDGDALFTQSLLLLSDGLASGALLAQYELMYRKNPDLAITEARKPANAPKNRYRDISPYDCTRVSLVNSLTGDYINANYVNMEIPGGAVNRYIATQGPLASTTTDFWRMVQQESSHLLVMLTTVMESGRQKCHQYWPVTGEELQLAEGFSVRCLSEKPDETGSFVFREFVLKDKHEQRHIHHMQYLAWPDHCVPSDPNLFLEFTERVRAARNRTLLQEIEESLKQVRLMDADADADENGGLMRERKCAASNGATPEDETPVSTSVHQCISAANPPVIVHCSAGIGRTGVLILMDTALALMEAREPVYPLDIVRTMRDQRACMVQNVSQYRFVCECICAAYMKISRSSAAINDDED

SEQ ID NO: 538 - DNA, 2464 bp, DROSOPHILA
gggttaccagtgggcctaaaaccaggcgcgtctggtgggggcaggttgggagcccagatttccactgatttgtgcaatgccaagaaagttgttaacctttcgcgtgtggctaacagcaaagacaaatgacaaaaggcttctgtggaggcattcgaaagacgccagttgcgagatttttgtggaggaaagggaggccccaagacaaagtcgtttcaggtggttggagctctccagcttgccagcgtgaccttcttagagtcccatgaattatagatgaattcataaatgaatgctggttggtgagcgagtggggcgctcatcggcgagatgagttgtagattcttttgtcggcggagaatgctgcttatcacttttactttttgctgatttattgaatcgccgctgtataactaatagcttttctatccccgaagtgtgtcagctaacagttctgaccaagaagaattttctgacgaccagaccagacctcattgcatatgcatgagttctctttggaactttgtgcctgtggaactgacaatcgacccaggccaattaaatctcatttccataaattttgtcgctaattgtcagccgaactttgagaacttttgggaactgttaggataatggccacgaatctttaaagatggtacaagaagccgccatagctgttcttgccctcttaaaacggctttccatcccatttagtaagtaatcacagtcagtcgaactaaaaatggccaacgttaaagaaatctgtaaacaaacttcgctgataaggtcgcgtaacgtatctgatttggaaccattcgctacacctaagtccttatcgctgaattttcatggctaatgaaggggcgattgacagccgcaatatggtgatcaccttatcacggttgagtacttatacgttcttcttaataaggtgatggttcagggtatataagggcccattgcgaggacctctccatcagtttactgtggtattcaaatcaaaatgaaggccttcatcgttctggttgccctggctatggccgctcctgctcttggtcgcaccttggaccgttgctccctggcccgcgagatgtccaacctgggcgttcctcgtgaccaattggctcgttgggcctgtattgccgagcacgagtcctcctaccgcaccggagtggtgggtcctgagaactacaacggctccaacgactacggaatcttccagatcaacaactactactggtgcgctcctcccagcggtcgcttctcctacaacgagtgcggattgagctgcaacgccctcttgaccgacgacatcacccactccgttcgttgcgcccagaaggtccttagccagcagggatggtccgcctggtccacctggcactactgcagcggatggttgccgtccatcgatggctgcttctaaaccgatttcgaccctgaataaaaatttagctcaaaaaaatattcatccttagactttctatatctttgctttttcaaaattcaaaaattatttcaatttcaccgtgtgttcctttacatcaaaagatacacagaaatgaacttaactattgatgaatgtgtgacatattttgcatgagccgatcactttctaagtttgtgaatagaattttattggaattcgctaatcaacttgaaagcgtctcttcggcaaaaaaaagtcattaatatatgcgacaaaaataaacatttttaaaacaaacaaagataaaagcatcggttgtccataaaattagctagttgctgttcgcaactctttcccaaaagaaagtaaactcgaagcgccgactgtcagcgggtcaaagtcaaaaataacctcacctaagcatattcattataattccattgagcttggacttgtcttctcaactatgtacgtccaaaaccagtaaaactggtgtttcttgagtgcagaacgcggctatgacactttgaaatttaaatgtaaggagtcccaaagccaaacttccgtcttgtgtacttcaaaagtcaactaaaaagcttcaaaaccaataatgttgtatcgcttatacaaattactaatagcccgaggtgtccatggaacaaacattgtggacacgttttgcaattatttatcgattggaatctcactgccttggggtgtaattcggattttcagctgagagaaagtgaaaagagtaagattcattcatccttaattcatcttcatttcaaatcagatacaaccaaacagaaactgagacctttggattgaaatagcattaaaaacgaatgtccaactcaaaacttaaagtctctcgttacaagaagaacctttttaaaccttcgatagcacaccaattataaccattaaatatatcaaagaaaaagatctgtaaaaaaatacccgaacatcttatcaaattatgaagtggatgccaattgtttagaagtttgaatatggtatatattaaaagatata

SEQ ID NO: 539 - DNA, 464 bp, DROSOPHILA
atgaaggccttcatcgttctggttgccctggctatggccgctcctgctcttggtcgcaccttggaccgttgctccctggcccgcgagatgtccaacctgggcgttcctcgtgaccaattggctcgttgggcctgtattgccgagcacgagtcctcctaccgcaccggagtggtgggtcctgagaactacaacggctccaacgactacggaatcttccagatcaacaactactactggtgcgctcctcccagcggtcgcttctcctacaacgagtgcggattgagctgcaacgccctcttgaccgacgacatcacccactccgttcgttgcgcccagaaggtccttagccagcagggatggtccgcctggtccacctggcactactgcagcggatggttgccgtccatcgatggctgcttctaaaccgatttcgaccctgaataaaaatttagctcaaaaaaata

SEQ ID NO: 540 - protein, 140 aa, DROSOPHILA
MKAFIVLVALAMAAPALGRTLDRCSLAREMSNLGVPRDQLARWACIAEHESSYRTGVVGPENYNGSNDYGIFQINNYYWCAPPSGRFSYNECGLSCNALLTDDITHSVRCAQKVLSQQGWSAWSTWHYCSGWLPSIDGCF

SEQ ID NO: 541 - DNA, 2693 bp, DROSOPHILA
ttgggcctgggttcagtcggttagtgaggttgcatttgtaggttattgtgcctgccctggcatctggaggttatgtaatgtctccgccgctgccattgtaatgttcgccgtagcttttggttttcctcagctccagggtgaggtggccttatcagttgcggagcgtcaaacagtgggggcatttacaatgtacaactctgattgtataactgagcatttgcagttggcttttaattgattttggccagctgattgaaagcattttgcggaaatcgaatctatttgccatacttgccgacgaagttctgcaatttgacttcctgaagtcaaacaaaatgcacgataatacgactataatcctcccgtgttgagaaattagtaagtagtaagtgcccgtttatgtaacggttactacgtcttcccctttttagtgtccatataatcaaattaaagcctcaatttccctagcatgcatgggcgcacagtcgactgcatcatgtataacacttcctgactaatgaacttccaggcccggcagtttggcacggattcggttccagtttttgggggagacatcttcattaggcactgagtgatacccacagtccgaaggttcggatgagggccaggggagttagggactagctgcccgaggtgtgaaaataggaaaatgcgctaaagagtcttccattcgactcctcttggctgccttgcatttcgctgaggccgcccatttaagtgtccaataattcaatcacatcaaacgtcatgttgattgccgttaaagagtttcaattacaccaatttccaaagacgttgggaaagttgggcttatcacgagaaatgcagggaagacaacaaagatggaaaagtaaagacggttatccaagcaagtaggcgaggtatttacagtccagttcaattatacatatacatatatacatataaatacatattattttattctacaccgtcggttgagcagcacgcaccgtttggaattcaaaatttccgtataaaaacacaaagtatacaaatttagtttaagatttggcacattaaaattttttgctaatggatatttccaaggccgagagtcaaacgcccgccggagatcgtcgatctgcgagtcctgattatctgagaactctgctgcaggacatcctgtgtttcctggtcctgctctcggtggccttgctaattgtggctggcattttgtttgtggtggaggacgtaagccggctccagcagcagcaccaacaccagccgtaccaccaccaccatcatcgccacatgcgtccggatcagatagccaatgaactaaaaggatcgccgatcgaggaggcaccgagggagcaaggtcaagtcttccgaccgcacacatggattcgattctttaactgcaggaacaaggtgccacagcaacagcaggaaaaagttgaaagggaggcggttcagtttggcccaccaacgcaagacgatcaggcgcagcagatcccattagatgccgttcaaacttatcgccctgccatagaacctatatcgctgcgctctggcggagattacatagatgaaacgatcaacaaaaacccgaatccggaacttcgccattttctgcccagtaagatccgaatattttttttatcaatcttaaccataattccttgcttttccagataatattatgatctaaaagaatatgtctaaaatgctgtttgaatgtccaaattgaccgcttggcagcttccaactatcgggtctctcctggtagatttgtcatttgatgtttagcatagcatttgcaccttttgaacagtgggccatcaagagactagaacattccccaacctaatgttttcgcagatagcaaacatgctgaattgtgcaattaataaaagaatagctatgctaatttgtttgttgctcatagagggtaatattctctcatacgaagagaattatttcccatttaactgaaatgtttaatagatcccaaccaattaaagtaatcccatttaaagagttcaaattgttatacaatctatttcaatagatacttccttatataaaaacctatggtaatgatggcacttcaagcttgttaatggtttcaagtatgccagagtcgcggaaccttttaattatttgcaagaactttaactgatccacgactcttcaatggcacaccgaattctggacccgagtcataacgagccaccgacaactatctgggatctcacaagttgtagatcggcgtagaagtgttggctcgataggcatctcggagatgcaaagtcaaaacaaagcccaaaccaaacaaacgcaaaacagagccgcagacagaagctgcgcatgcccatgatgggttaattgaggtattgaaagccgcgcagacgcgacggcagaccaaaccaaatgaaatgaagtgtctaatgcttgcattatcgcgttccaagcgaacaattgcagtgacttctcgaagggcaagtccgtggacggggtgtggattgggctggaatccatgcccggggtcgttggagatcggttctagccaacatggctgataagtgcagctgtataattgccgggaagataagtttcgaacatttgcatagaacagcagctggttaggaaaacaattgcactaacagcggtataaaaaaatatattttcgggcatttgttttgccattg

SEQ ID NO: 542 - DNA, 638 bp, DROSOPHILA
attcaaaatttccgtataaaaacacaaagtatacaaatttagtttaagatttggcacattaaaattttttgctaatggatatttccaaggccgagagtcaaacgcccgccggagatcgtcgatctgcgagtcctgattatctgagaactctgctgcaggacatcctgtgtttcctggtcctgctctcggtggccttgctaattgtggctggcattttgtttgtggtggaggacgtaagccggctccagcagcagcaccaacaccagccgtaccaccaccaccatcatcgccacatgcgtccggatcagatagccaatgaactaaaaggatcgccgatcgaggaggcaccgagggagcaaggtcaagtcttccgaccgcacacatggattcgattctttaactgcaggaacaaggtgccacagcaacagcaggaaaaagttgaaagggaggcggttcagtttggcccaccaacgcaagacgatcaggcgcagcagatcccattagatgccgttcaaacttatcgccctgccatagaacctatatcgctgcgctctggcggagattacatagatgaaacgatcaacaaaaacccgaatccggaacttcgccattttctgcccaataatattatgatctaa

SEQ ID NO: 543 - protein, 187 aa, DROSOPHILA
MDISKAESQTPAGDRRSASPDYLRTLLQDILCFLVLLSVALLIVAGILFVVEDVSRLQQQHQHQPYHHHHHRHMRPDQIANELKGSPIEEAPREQGQVFRPHTWIRFFNCRNKVPQQQQEKVEREAVQFGPPTQDDQAQQIPLDAVQTYRPAIEPISLRSGGDYIDETINKNPNPELRHFLPNNIMI

SEQ ID NO: 544 - DNA, 4364 bp, DROSOPHILA
cattcttttatacccggggaaataaaaaaaatctgattaaagataagaactatattctatacaaagaagaaaccagcggttcttattattgagggtattcaactaaatctgggctttctgggcacacctcacagactggatgatgtcgtctttgagcatgtcgttgcagctcgtgtggcaaccgttgtgtgagaactttgaacattggaccggatcacctgagttagtggtaagaaaatttcttaggaaaattataggtacctttagattgtctgatttgactaggcaacagaaaaatgcatatcttgtaggtaagttatggcagactgacgatttccatttccccatttacatttatcagttggggtggcgattacatctcctatcgtatcttataatataaaataatataatataatataatatattataatataatatattataatataatatattataatataatataatataattgctgttttagatagataatgaccaaccttattcataattttataattttctaaattaattgatagatagtttttgtacttttaaaattaattaaataattttcgaaattgcattttgtgaaatgaagactgattcgttcgtacacatttactataaaaatatatgcccgataagaaatccccagccgggggaaatccccattttctagatccgcccctggctgttcgtgccaaagcgcaacagcattgcaattcgcaagtcaccaccattggaaacggggagcggaagtgactcactgcgcaggcgcgcttcctgtcaacccccaggacagagtgaatgccgctgaccccccaacctttgccctgccagcggtaaacaaaaacaagtttggcttaccagcgagagagagagagagaaataaagagagagcttgcggatgacagctgaaagtcccgaatttccctggcttgggcctccactatttctgatttggcaccactcacatctggaattcagacgggggcacgccagcaacgtcaaggaaattatcgattttcgcatgtgaagtgaaaaaagtgactccgttggcaaaaaactgtagcgcgagcaggactccagtgaaaatctaaccaaaagcagttcacacggactaactaaaagccccagctagcctgtagtggagggcgtggcagctggtcggaccctggtccccaaacgacatggccgacagcgaattcgaggagttccacaggcccatatttgagccacatacgattgctggattcggatcaggagcaggcagcaagaagaataatccacatgcattttactcgtaagttgaaaggtgaaaggctgtggtaagaagcaatctggcgaagcttgctgtagccaagacgtgtgcacgtgtcctgaagagcaccccttgaaactggttgggtatccttgaagggaactgttcgcaacagaaatcacaaaagtcactgatggaactgtttaaaagtatgcaacgaattgtgtgcatgcctttggacattcttatgaattattccaaactcgctgtgatttctgtgcgatggcatgagttcagtttcatcagtaaagcccttttcacagcttaattcccaacgatgacctggaggactcgcactcctcgaagagcgatggcgacggttcggatcaggaggatggcattggtcttgtggatcacgagcccaagatgcgtcaagtggaggacgatgagctgggcgacgggctgaaagtcactctgtcctcggacggctcgctggacaccaacgactcgtttaattcgcaccgacatcatccgttgaaccaccaggatgcgattggtggcttcctgggcatggacaccagtggattgggtggcaatagtgcacctgtgaccattggagccagcacagatctgctggcacccaatacagctgccacgcgacgtcgtcgcaagttgccggaaataccgaaaaacaagaaatgtaagtttattgaaaacttagttcctggctagagtatcctgcatgcaagtagtttcaggggctatgccggttttcaaaactagtatttggttttccacaacacatctattcgtcatatcctattttgggagccggatagtccttcttaacatcccttcgtagtttcgggctaacccactcatggcctcgttgcagcttccattctgcatcttctaggtggctccaactttggctccctggcggatgagttccgcaacggtggtggtggaggaatccctccagcagttcgcagtggacaacagcgctcatttctgtccctcaaatgcggctacttgatggacgaggactccagtccggattcggaaaggatgcagagtctgggcgacgtggacagtggtcacagcacggcgcattcgcccaacgactttaagagcatgtcgccgcagatcacgtctcccgtttcgcagtccccctttccgcctccctttgggggcgtgccctttggccagctggagatgctggaggccactcaccgtggtctgcacaagtttgtgccgcggcaccacgacgagatcgagctggagatcggcgacgccatctacgtgcaaaaggaggccgaggacctgtggtgcgagggtgtgaatctccgcaccggaaggcagggcatcttcccctcggcctacgccgtggacctggactacaacgagttcgatcccacagtgcagctggtgaagaaggagcgctatctgctgggctacctcggatccgtggagacgctggcgcacaagggcaccggagtcgtttgccaggcggtgcgcaagattgtcggggagtacggcaactcaccgaccggacagacgtgcatcctggaggtttccgaccagggacttcgcatggtggatcgatcgggcccgaatgtgagtaggatacatacatatatacatcttcattaataaccgatataaaaaccgatttcgtgaaacagcaaaacaaaaaggacaagaaaccttgcatcgactacttctactccctgaagaacgtctccttctgcgcatttcaccctcgcgatcaccgcttcattggcttcatcaccaaacatcccacggttcagcggttcgcctgccacgtcttcaagggctcggagtcgaccagaccggtggccgaggcagtggggtgagtcctcaagcagtcatccccccaaaacaaacgctcgaataacatgttaacactccttctttcagccgtgctttccagcgattctatcagaaattcattgaaaccgcttatcccatcgaggacatctacattgagtaggcttgcaaggcggtttgtgcattaatcaatacgatatattttttgtgcggttattacgaataaaagcaaagataagtctcaagaatatttgctcttcttcaaagagaatctcaaagcaaaatcaataagctcgcaatagaaaccctagctatagattattatcatttatccgttttgaacaaatgtgcaagatcttagacatgtaaatagttagttaactttcgttcaaaatccccacttcacactcacactcacactgagcttcaagcaatcagcaatagttgccccctctataggaaccgcctttaaactcgagttcactggatatatggacagaagcaaaagaacaccttgaacaccttgaattttgtatcgggagtcagttgggtcagttgggtctattgtaaatcggagataagcaatttggattggttatagatatccagaccctcctgtaaccacatccttaacctggcaatgcacaaaatagagtgaggccaaagtaatttagcgatcttcgtgtaaccttagtttagttatgccaatctttcagttaccagagactcaacaatatcgaacaccagctgctacgttttgaagtattctcaattaaagcccagtataagatgtgtaaacctttaaagttgtgtacacgcaggcgaatatatactgtatatgtatacaaaagaaatatataaagaacctataaatcaaactatattggattattgggtgctcaaggaagaaaggtgagttttattagtaagagaatgtaagccctttcatcttatattgtagaacttacccaaaagtatgcacttaagctcaatttatagcaagttgatagaatcccgaaatgatggtagataatatttagcagcctaaaagataacttataatttgtaaagtaaattattttacacataaaacatgtgagtttatctctcgcgggaaatgaattggtgatttgcataaaattacacgacaagacaagataatactaatcggctatatgaaggcaatggccaattgcagtttagttttaagattaacttgtgatgacttgttttgagcgggcca

SEQ ID NO: 545 - DNA, 1731 bp, DROSOPHILA
gggcacgccagcaacgtcaaggaaattatcgattttcgcatgtgaagtgaaaaaagtgactccgttggcaaaaaactgtagcgcgagcaggactccagtgaaaatctaaccaaaagcagttcacacggactaactaaaagccccagctagcctgtagtggagggcgtggcagctggtcggaccctggtccccaaacgacatggccgacagcgaattcgaggagttccacaggcccatatttgagccacatacgattgctggattcggatcaggagcaggcagcaagaagaataatccacatgcattttactccttaattcccaacgatgacctggaggactcgcactcctcgaagagcgatggcgacggttcggatcaggaggatggcattggtcttgtggatcacgagcccaagatgcgtcaagtggaggacgatgagctgggcgacgggctgaaagtcactctgtcctcggacggctcgctggacaccaacgactcgtttaattcgcaccgacatcatccgttgaaccaccaggatgcgattggtggcttcctgggcatggacaccagtggattgggtggcaatagtgcacctgtgaccattggagccagcacagatctgctggcacccaatacagctgccacgcgacgtcgtcgcaagttgccggaaataccgaaaaacaagaaatgtggctccaactttggctccctggcggatgagttccgcaacggtggtggtggaggaatccctccagcagttcgcagtggacaacagcgctcatttctgtccctcaaatgcggctacttgatggacgaggactccagtccggattcggaaaggatgcagagtctgggcgacgtggacagtggtcacagcacggcgcattcgcccaacgactttaagagcatgtcgccgcagatcacgtctcccgtttcgcagtccccctttccgcctccctttgggggcgtgccctttggccagctggagatgctggaggccactcaccgtggtctgcacaagtttgtgccgcggcaccacgacgagatcgagctggagatcggcgacgccatctacgtgcaaaaggaggccgaggacctgtggtgcgagggtgtgaatctccgcaccggaaggcagggcatcttcccctcggcctacgccgtggacctggactacaacgagttcgatcccacagtgcagctggtgaagaaggagcgctatctgctgggctacctcggatccgtggagacgctggcgcacaagggcaccggagtcgtttgccaggcggtgcgcaagattgtcggggagtacggcaactcaccgaccggacagacgtgcatcctggaggtttccgaccagggacttcgcatggtggatcgatcgggcccgaatcaaaacaaaaaggacaagaaaccttgcatcgactacttctactccctgaagaacgtctccttctgcgcatttcaccctcgcgatcaccgcttcattggcttcatcaccaaacatcccacggttcagcggttcgcctgccacgtcttcaagggctcggagtcgaccagaccggtggccgaggcagtgggccgtgctttccagcgattctatcagaaattcattgaaaccgcttatcccatcgaggacatctacattgagtaggcttgcaaggcggtttgtgcattaatcaatacgatatattttttgtgcggttattacgaataaaagcaaagataagtctc

SEQ ID NO: 546 - protein, 483 aa, DROSOPHILA
MADSEFEEFHRPIFEPHTIAGFGSGAGSKKNNPHAFYSLIPNDDLEDSHSSKSDGDGSDQEDGIGLVDHEPKMRQVEDDELGDGLKVTLSSDGSLDTNDSFNSHRHHPLNHQDAIGGFLGMDTSGLGGNSAPVTIGASTDLLAPNTAATRRRRKLPEIPKNKKCGSNFGSLADEFRNGGGGGIPPAVRSGQQRSFLSLKCGYLMDEDSSPDSERMQSLGDVDSGHSTAHSPNDFKSMSPQITSPVSQSPFPPPFGGVPFGQLEMLEATHRGLHKFVPRHHDEIELEIGDAIYVQKEAEDLWCEGVNLRTGRQGIFPSAYAVDLDYNEFDPTVQLVKKERYLLGYLGSVETLAHKGTGVVCQAVRKIVGEYGNSPTGQTCILEVSDQGLRMVDRSGPNQNKKDKKPCIDYFYSLKNVSFCAFHPRDHRFIGFITKHPTVQRFACHVFKGSESTRPVAEAVGRAFQRFYQKFIETAYPIEDIYIE

SEQ ID NO: 547 - DNA, 7737 bp, DROSOPHILA
agcagcgacaacagcagcaccagcaccaacagcagcagcaacagcagcagcagcagcagcagcaacaccagcaacaacatcagcaacaataccagcagcaacactatcagcaacattatcagcagcagcacttgtaccagcatcatcccagcctggcgctgcctggcttgccacccgctgtcgacgtggtagagttgcaactgcagcagcagcatcaacagcagcaacatctgcagcacaacaacagtagcagcagcagccccaagctggcgacccccggcgacaacagcggcaacacctcctcctatcagcaacagtacgcatctcaattggtctccggatcgggaggcggctatctcaacggtagcagcagcaactcctacggctacagctggcacagcagtcaggtgagtgacggggtgttgcatttgcaacatctgtgattggtagtctacacgcctctcactgaatttacaaaaattgcaattatacatatcttgacaacaaactttttaaacttttagtgaatttacaatacttcaaaattaaaatttttgcctttctaacccacagtccttccacaccaaataccaaatacacccgccatcagccgctgcttcagccaccgcctccgccactgccacgcccacagctcaactcggtgctcaacagcagcaacagcaacagcagcagcaacagctgcagcaactgtgcccccctgcggcgcccagcactccctcgacctcctcctcgtccatttcctcttcctccgcctcctctgccagtcgccatatgttcgtgccacctttgaccccgccaagttcggatcccggaagccctggcagctcgatggtggcagcagcagctgctgcagccgcccaacgacgcaccaccccaccaccgccctaccagcaaggtcatgtgatgggcctaattaacccaccgccaacgctgcaacttctgggtggtgcagccacaggcagcaacaacagttgcaccaccaccctaaccaccttaacacccgccagtgccattcagcagcagcagcaacaaccacagcagcaacaggtgccacagcaacagccaccgcccaccccccgctcttcggggggcgggaggcgtggtcggcactcgcaccaccaaccgggaacggcggcccacatcgccagtttgatgagcgtacgaacggtgcgttacaaccgccgaaataatcccgagctggaaaagcgacgcatccaccactgtgatttcgtcggtgagtagagaaactaaatgatgaactataatcaacttggcaataggatttcatatgatgagcctcatataggaatactaaaatacctccaccttagaagacccatctttagagatctctagagatgcgcttcctcatatctcgttattagtcgcagcatgcctccgtatcgtttatcatttggcgcgctttgcgacacttttcgtaacaaactcacctgccgccccccgttttccgcccactttgtggctacctaactccactccacgtgcgatcctcattgcgcatgcgtgctgcgtttttccaatcggcatttatttattctctatttatctatacatttatttattatcttttgggtttctgttttcttgctgtgtgactgccaggtttctggtgtcgcagtcgctgttgtggcgcttttcaattgccttctttgtaattctaattagccaattgccatatttatgtaagagcttcgagccacctttcctgggcttttgttacagttgcatgctgtttcgcttcagcctggtcaaatgcgttttcaatgtcagaggtgggcgagatatcgttgagtcagcaatgatcaatggcaaagatacgacacagtgtggcgtaggaactaagttaattgaagtcgaagttgaaagaatatgaaaagcaaaaagtttaaagtattttttagatacagaatccaaatttagttttgcttggaatcactttaatatctataatagcttgcttagtgcttcgattactcgcaggtacctaatctcgtcgagatcggcgataagcaaagatgagatcacgacatcacccgcagtctcccaagaacgaccgcttcaaatactatccattagctatcgatcactattacgagccaaaaagcttttaaggcgacgctgtctgactcaatctaaaaatccaaactccaagccagacgcattccgtccgtgtcccaatgtcgcttgtacgaaactgactacgtgcgttgccactaataaataattgacaattgtctgacacgttggccatggccattttgaggcaactccggccgaaacgctgtccaaatgaagttattatgccataagcgcacgcatcagacagtgagatatgtctgggctggaggagttcctccgattcggcagtgcttttgcagtatctctaactgtctaactgtcgacgatcgctgcaagttgcaggttgcatgttgctgctgcaacttggtggttgtcagcaacattcttcgctggcagcgaggcattgtgtttcgtggcacgttgcttgggcagctttcaattagagccgtacgtgcggggatccacgggaaatccttttttgggaaaggggcactaataacgctgccggtaaatgcctcataaatgtcactcgctaccagcttgttgcaggttccaagtgaatctcgtgcaactttcacccgctaattaaaagcccacgcccactgacccactttgtgggaatggcttctctatcggaatttgatactcgaggctcctcctccaatgtactgctcatctgatacggttttggtgaacgccatagacagccaagtgcactcaaaaaacgttatagtcttcggatgctcgaagctataaataattacaggcaataaattctatttaagaaggtataattttaacgaaggtgtcaattataaaatttcaaaacccctacacattacttttcaaagactaggtttcaatgcgccaaatttgtaattatattgtttacgaaatcttgcaactttaaatgctaaaaatttgttgcaattttgagtttggtaaatagtttctaaaactgatttgcttctctccttcttacctaatttcaggctgctccaaggtgtacacaaaaagctctcatctgaaggcccatcaaaggatacacacgggtgagtttcccttaactagatatcctactaaaaacccaacccaacccaaccgcccacttgatgacccctcaattgacctcctgcctcagattggtccactgccatccttcagctcgcatgtgggctgtgcaccactgagcaaaaagctgacccaactgcaccactgaaccaccgatgagccaccggcgaacagctgcgccgcttggttttttggacgttgggcaacagtcgccttttgattaattcgcgcgctcatatttgtagttgccagcacataatttgccacggcccagagagcttcgagcgcctttttttgagtgctatgcacttagaaaaatatagataaaaataattttgtatgtgagcttaaatagaaaagagtaaaaaaaaacaggacaaaccatttaaatatttgtagttttgtaacgctcttcattattaggaaccaaaatttttccctgtgtgctgttcattttcaatttttgcgccacggaggcaaccgcagcgaaaatcgtgatttgtacggtttgtttttgcggctttggcttcgcttttttccgttttttctgcttttgtggtcagttgcagttgcaagttggcagttgcaacatcagcaatcgccaatcgccaacgccatcagctgggcgcacgtttggcctgcatttcctccttgctcggattacacttgacgatccgttgccgttgcccaccgatcaccgagatcacctgtcttcattttatgggccgcacgtttaatgcctccacaaaagcagagggaaaaataatacttaaataaggaggaacaaaatggcagaatcccatctctccgacgttttattaatcgcacatgaccagctgatttatgcgcaacttaaagcgctggcttaaaaacatttttattattatgattttgtgcgcagcgctgattttcacttggctgataaagttaacgccccatcaacgagaggtcggcagctttgggttaaccccggactcaagtgggttcccttgaaaatgctaatagttctcgttccgatttggttcagatcgtaaccacccagcttcgggccaacacgaattccggaccaggcttattggatttgagctgacttttgcaactcctcgagtggcagttcgagatgcagaaacgctttgctaccgtctgatggctgtcggtttgtttggctttcgagttagttagctgtgttccgtcgaagcccagcccattccattcatagatttcgtttattttcccctcggcacacatttttcatgccatttttgaggcgccaccaggctgttgtctctgctgattagcaacgccgggctgagaattcgagagttttcgatgttaaagggggaagaaaggtgacgagatcgacagatttccactgcaaatatttaccagtcatcgagctctccgcggcagttcgtttcctaagtctttcgtttgcgcaaagtgaagaggtccattagcaagaggaaaactattggtcaactctgtcaagggtctcaaatctcttggcgatcggaatgagcaacttctatcattcttatttataagttgaaaaatatacttaattaatatcctatgccttaaaatcggttattctttgttcctgtccaaaactctttacttctaccatccccacttctctctcatcttctcataaaatctcatagctcgtaaatttgtcatttttatttgggctttttgtttttatcgggctgcgtcgattagaaaatcacttggtaactaatctttatgcaggaggcgaacgcataaatttcccatatctcacaaccagtctctagtctgcggaccagtatccgcagcctggccctaggattcggtctcggatacagattcgtggtgggattcgggctggaactggcttgttttgtactgatttgtttgctaatacgttcgcgctgccataaattagtttgattttatgcccagagactggaggaggtcttttatggtccagagcccggggctttggttcgtagttcgaagtttcaatccccgatgtagcctgaatttatttatattgccgcgttggccttatcgcggctgtaagtaaaattatgaagtaattccgctgcgcttatcgcattgcgttcatcgcacattacaaaacaacatttacataacttttgtttgttcgccagtcggttttgtttggtttgcggctgaatggctgccgtgatcattgccaaattaaattcccacggacggggaggtctttaatgtcccattctgggccaggtgactcacccgtacccgtctggccattttcgaataacaaattccccacgtgtccatctaagcccgcgatcgccgcgattatgttcgcatctcggggcacttaagttcattataagagatctaaataaaccaataagtcacgccacgagtcgaggggcattgggtttctatcccaaaatccccagcaaagtgtcagctgagtgccactcgagatctcttggtctcaaggggcccccaaacttaacaaaatttgtgcgtttcttcgatgtaaaaaaataataataaacaagtctacgctctttgatgttggctgagatctcgatattgagatgattaagaaagctgcatgaatggcggaaagttcgaaaagaacaatctactcccgattaagtttcaaaaaattttcaaacgcaggaatggtaaagaagtcacataagtaattcaactttactacccaacttaaatcttcgagcatatttccccataccttttctttaagaccccttcaaatcgctgtctttcggcgccgaaatcccaattctgcacaccccaaccaatccaattggattatgcccatggataagccattcggttcgctccacaaattacaagtccacagcttggcaaccaaaaatgtcaagttcgcgcagaaatctccggccgcaataattatttcattcgatttcagtctctgtttgaacaggaatgttttgaggggttttcggagggtatgaattagtcatacaaaactgccaataacaaagagtttcgctcaccggccggtggaattttttttttcgaatgtctgtggcttgtaacacaaatggtaatatatttcacagggtacaaaacagacaacatgcaaacttgtgtatcaaactactgcagctgccgttctgttgttgtcattctgcaatggccaaaacaatcaagtatcaattgtatttcaattacttcgtagatcgatttcaatagggcaatatgtcggtgtagggaatttaatttgccctaagcctagttaatctttaaaatcgtagaaaattaaataatttataaaaaaaagttgaccttactaattcaggatccactatttccgtattctaggtgagaagccatacacctgccagtggccggaatgcgagtggagattcgccaggtcggacgagctaacgaggcactaccggaagcacacgggggccaaacccttcaaatgcatcgtgtgcgagaggagctttgcgaggagtgatcacctggcgctccacatgaagcgccacttgcccaagaataaatgaggaaggcgcagggtcgggggcccagctgcaaatttgcaaattgaactataccacaatccaaaggactttagcgtagataaaatgtattcgtttagttaaaaggttaactactagatggtacgcactctactgtaggaacagctaaccaattggggctggggagtacactgtttattgcccactcgattaactcaaacgcgaagtagactaagtaaatgaaattaccacctgcttgacgaacatcttactataccaactaacccgcgctaataaggcaattataccctcggcaccacaatcacaaattaaactagaataaactaggattacgttactgtgtataaacatacttctttgcatatagaacattagatctacatagacgtttaatcagagttcgcatcctaggcgggttaagtagcagtagtcccatatattctatttgtatatcactattgtatgtatcttagtgtcgtaaaccgtttaaaaaccaccaaaaagtgctggcacaaaaacatccaataaatttatttgaagaatatattcaattagatttcattcttcacttggcatattttttggtccattcgcgtgcattcttgtcgtggagggcacggtttcccttgaaaacatctgctacggatacctccataggatcgtgtggattcgggtctgccagcaatgacattatggatataagtaccttggaaaccgacaaagctggcgaccacttcgagccgagaatatccaggcaaatgcgcccagataaagcgatgttgcagtggtaagtcttggttaaaaacgcaagataggggggataaaatggatagttcctgggaaagactatctccactctaaaacgcccaccttcgtaaactgtttccgagggacctgggatcgtggctacccagtggaacagattgtcgcccaccatctccgccttacacccttccgtttgatcggttgagaactctgagatctctcgacggagcctagtgat

SEQ ID NO: 548 - DNA, 503 bp, DROSOPHILA
ccaccctaaccaccttaacacccgccagtgccattcagcagcagcagcaacaaccacagcagcaacaggtgccacagcaacagccaccgcccaccccccgctcttcggggggcgggaggcgtggtcggcactcgcaccaccaaccgggaacggcggcccacatcgccagtttgatgagcgtacgaacggtgcgttacaaccgccgaaataatcccgagctggaaaagcgacgcatccaccactgtgatttcgtcggctgctccaaggtgtacacaaaaagctctcatctgaaggcccatcaaaggatacacacgggtgagaagccatacacctgccagtggccggaatgcgagtggagattcgccaggtcggacgagctaacgaggcactaccggaagcacacgggggccaaacccttcaaatgcatcgtgtgcgagaggagctttgcgaggagtgatcacctggcgctccacatgaagcgccacttgcccaagaataaatga

SEQ ID NO: 549 - protein, 109 aa, DROSOPHILA
MSVRTVRYNRRNNPELEKRRIHHCDFVGCSKVYTKSSHLKAHQRIHTGEKPYTCQWPECEWRFARSDELTRHYRKHTGAKPFKCIVCERSFARSDHLALHMKRHLPKNK

SEQ ID NO: 550 - DNA, 7734 bp, DROSOPHILA
attatgcacctacaaaagattctatctcagcataatgattcttccgcttctcaaacgacaacattactttgacgttgcgagattttggggccaaacagacgaacacggcaaccactgagtgtgcgagtggctaaaaatagacccatttctagcgctcccaccagccagacagctatgtggggcctcctctgatatcttgaaattcgggtaggaattgtactgggactgggaccctgatggtatatggagttactacttttctacttgcctgcggacttccagtggacattcttcttggggcgaccgccttgtggatgcgtgtgcagctttcccggctgatttcccatttcgagatatttagatatttaacctatttgcaatattgtgcttgcctatacagaggatctatatatagacagtcgaaattaacttaacttaacccgtcgttttcgaatcgccaataacaacactttgcactccaactatttcaacttcaggtcggttagtttctagtaatgtaactttcgtagcgttcgcaggcttttgtttgcaagcgttgccatttttgcggcgcgttaaataatccgttccgttcggttcgtcagcccagcatcctcctcctcatccaccgatccacgaaagctttctgctctctttcaaatttgaattctgatgggctcgacagcagttatcgacatcgataggagctgcaatcggttagcaagtgacctaccttctttctggctacttttcaggaacttcgtttgacagataacccttaattaaccacaacaaggctgatcacattgtaaaataagtctcatttacaatgcatttagataccatcaacgatagcatcgattcattcgataagctttagcatcattcaaagtcaattaactatctctgtgatttgtggaatttagctatttctagctagttagctacttgtcgcaaagttccatcactagacccctccaccgcattcgatagttggcagcattagcgaagtgtcatcaccggcacaaattatgctttttttccaacagtccagtcttcccaaaaatatttcgctaattttttagagtgctgccttgtagtgttccttgttgcttagtttgttaaagccaatttaatccgcgaagtgctctccaacgtattttagtgttgttacaaactgtgatcttgcgacttgcctgcatgtgcaatgtgaaaatgccccgtccttggcataaatttcgggaggctgttgttggactttacttcttgaaaaaatagaaactatctcgcccagcatcacagtttggaggagccgcagctgttcctttgcgacaggtgcagcggcacaaactcacacactcatacatacctgcacttacctattccgcccgtccgtccaataacaataacaacacaaacaatggctggcactgcgaccgcgacgccaatggaaattgatgagtttgttaattcgtccataatttcttgggtgagtagagtactgcgggcgttatggataaacatgatcgacatttgcatcgccagtgggcctatgtgcttggcataaataattcaagtgttcgattgccaagcgctcgcaaatggaaaaggcgaaaacaacaacaaagtcgtgagaacaacctgcttacacacacacagctgaggtcaacgaaatagaatcatacgttacagggaaactccaaaaaacgaataattttatatatccaaagccttagcttcgttaaattaattccgttacgacgaaagcaggtgtatcgtattaatttataatcatatcaatcatatgtatcatactccacttcgagctcttatttttttgacccaaactgtttgtcgccaaagaaccaaggtcattgtaacttgctcaagactgctagcggtacaataagaatggaggaggagcgtaatgagctcttgtccagctaataaacatattcgcgctcgctttgttggattccgtatctaaaactggtattttcttcctttacagctggaatcatgtctgccacgtgccgagcttctcgccggatacacctccctgctggatggccacataattcacagcgtctggctgcaaatcgaccccgagccgcaaaataatcccagcgagctgaacgatcttaacgggaaatctctcagcattgcgagggccaagaacttcgagtgcgtcgtgaggaatctaaagtctttctttgaggaggagcttggtcaaaccatactggtcctacccgatgccttcaccctgggtcatcatccggagagtaagaacgggctcgaacagatgaagaccttgctgaccctgttgctcggcgcagctgtgcaatgtcccaacaaggagctatttattgctcgcatcaaggagctggacttagaaacgcaacacgctattgttggactgatcaaacaagtgaccgacagccatagtttggtgctcaccgaggactccttggagcgacttacgccgcagagcatgtacacgcacattttgcgcctgaccaaggagcgggacgtcatgtatctcaagtggatcgatttggcgtgcgtagagaccgaaatgacagccagcgataatttggtggaatgtggccaaggtgtcagcgttacacgttccccttcgaacggaactgccacctcgacaccttcatcttcttccaattcggaaagcaatcaccttgccgtagaatgtgccgatctgcgttcgaagaaccgcaagctgcgtcaggaactgtaagacaagctattatttacttatccaataattattcatacaccttttcctttctttaagcgaggaaaagtccgagaatcttttggagctacgtgaggagttggatgacaagaaggctcgctttgacaagctgcgccaggaaagccaagaatggtttacggaggccaagcgggcatctgcatatcgtgacgaggtggacatcctccgggaacgggctgaaagagctgatcgcctggaggtggaagttcagaagtaccgcgagaaactcggagactccgacttttacaaatcccgcgttgaggaactgcgggaggataaccgtgtgctgcttgaatccaagtatatgagccaaacaaaataccattgaatgttttctaacctataatacccttccaccttctcagggaaatgctggaggagcagttgcagcgttaccgaaaaaggtctgagcatgccatctctctggaatccgagattattaaatacaaacagaagataaacgacatggctctcgaacgggacgtggatcgctccaagctagaagagttgctggaggagaactcgcaactgcaactggtagccaggaatctcaactccacgatggatttggataaatccttttccgaaaacgaagacgattgcaactcaggcgacaatagtctttcggaacagctaacgaacaatgctcagacccgtgcactcaagctcgagctggagaaccgtcgtttgaccgccgctctggaacaattaaaagagagtagcttccacgaatccaccagcaagatgctagaactggaaaaggagaagaaaaagctgtctctaaaaatcgaacagatgcaagaaaacatcaatcgtctgactcagcagaatgtcgaactggaaggggtctttaaaaatgccctggaggagaacaaaaagttacaggatgccgtggataatcgccaaaaaagctacgatcgacagagcctggaacgcgaagctgaccgtcaaaagctttctgatgccgagcagcatgtcgaaaccttaaacaaagaaaagcaacgtatccaaaccctgaacgaaagcattcagcgaagagccgacgatcttgaacggttggcggagagcaagacaaaggaactagagcaatacctggaaaaatcaaggcaatacgagcttactaaacagaagctctatgagatcgaagcaagggtctccacgtacgaacgcgaaaacgccagcctgctcaaggaagtgtccaaactcaaggagggcagcgagcaaaagtctgtgcagctggatgacagtattaatcggctcgatgtccagagcaaagaactacaaaagctgggcaaagcacttgaggattcggagcaagtgcatcaaaagcttgtggaactggagaagcaaaaccaagagctagcttcacagcgcatcattgatcaagagatgataagtactcttcgaaacgacttggtgactggtactctcgtaacgaagaaagtgcgaaacaacttggagaaactaggattggcggacgaagagcccggtgagctcaatgtggagcatgtggtggagaagttggtgcgcaacccggagacttttaaaacggttcgcgagataatgctaaacgtgacccgagagcagctggaggaggaggaacgagaaggtggcgtcaagtccgacatgtgtgtgctatgccaccgtcaggagatctttacggtggaaaagaacattgaactcgcggctactccagctcctgcaccagcgcaaccatcttcgcaggaacttcgcttcgaacacaaggtacgtctaagtccagcacgagaatcagcagagctgacccgtattaaggattccaacactcagcttcagactgagaatgctcggctcagcgtggacgtggctgcgctgggctcgcaaataacttcgctgaacacccagcatgtagccctacagctggcaaactcccagttggctgccgaaaaagattcgctgctcaaagagatcgattcactgcagcaggagcacaagcatgctttgcaggatcaggttacgttgcaatgcctgcatgatcaactctccgcggagtacgagtctctgaacaaggacaaggagcagctaaaggctgcagtgcgggacttgcgtcaggagctgcgagatacccgtgaacagcagtcggcattggagcaacgcattgaggagttgactattcagaacagcaacatgaaaacatgcagcgaggatctgtcaatcctgcgtacggagcactccaaactgacagacgacttccgcaatctgttcgccaccagcgatcgcttcaagaacgaatacaaaaacatccaggagcagtacaagatggtacgcatggagcactccagccttaagctacaaaacacagaactctccggcgagctaaatgctaagagcgatcaggtccgttgcctacagatggagtatagcaaggttcagcagcgttgtgaggtgagttaaaaagtgtcaagatataatattctattaatattctttttgcatacagatgttgatacaaaacaatgctgaactggactcggagcgcaaggctctgatggacaacgtgtcccaattgctctctcaatatcaggaactattggccatatccctggaggacaaaaagcacttccatgaggaggagaagaactacaccgaacgggtgcacagcctcaagcggcagaaggaaaaactggaggagaaaattatggagcattacaagaagtcagaaaccacagtgcacaagaagtaaataatataaccatacaaaaatatatttgttattaagccaatcactgtaaatttcagaaaaccatttgccagcatgctggttagaagagtgaagaaggctagctcggatctaatgaacaaggtgcccagtcgagtaagtttactcacaactagatgtaaagaaacttaacataaaaatattttttttttttcagaaccgtcgatcttgggtagatgacgcccgtaccaattcccagttcgtgatcggttccgagtcaggcggcaatgagtcggataatagcaatgaggagccactgtccattgcctccgacacgcacctgctccagaggaatgtcccgctccgccagagtctgcagcggtaagccattcagttgggttggaaattgatgttttttttagatttttgggttcacggtatttgttctttttacatgtattatacacaactcgacattcgcaccaaacaaacactgtacattatgtcggagtagggatttgctggataactcgatccaacgcggcggtgccgtgcgcagtagcctgcaggctcagaaacgtacggatttgaataactcacgtagaaatagcgtgcacgggtatgcgcttttgatgtttaacattcattctaccccattaaaacttgccaattgaaacagatcgaagtctgtttcgaggcttcaattgaccactattaatccttattccatctttccccttgcacaatgcgtatttcccttcgttgtcgctccccacctgtgtttaaaaaagtgcattcatctagttactgataaatcatttgcttcgcagcagtcttgaagcgccagacgtgacgggcagcagtctgactctcggaacggccggttccagacgcaccgtttatcttatcgatgagcaccaaaagcttcccgatggctctactcccggcgccacacagtcacagtctgttggcggcagtggctccgtcaacgccgcacctcctacacccgcagaacctcagacgcctcagaagagtaccgaaaacaatgccccggtgggcccagctacgtttctcatgtacaaccgaataaacaccacgatcggaggagcctcgaacagcggggaccagagccctctgctgcaggccagcggcagcgtctcgggaacgaccatgcaggatgacaagtcggcaaggaagcggaccgaagacaagagcaatagcatctggtatgagtacggctgcgtctagatcattcgaacagtatacgtccacaacgtgaactcgaacataatgcatttgctgacgaagtattatttcgttttagaaattaacgaatttatttttaaacgcattagaacatcgatgttgccttaagcaagttacatatgtaagtgtgaagtgctgcttaaaccgctatgatttgccttaagaaatattttacaattagactagtacatagtacatactatagtttgtacctatttatgcaatctaaaaactccacaagactacgcgacaactatgcgaacatataactatccagtatacacccctatatacacaaaactataaaaaaatatgttaaatattagctgtaccggcctcaatgtacgtcctaagcgaaaggctttctttttcgcagataagacaagatatttaaaaatagtatttatatccgttcatttggtgttttgttaactcgactcgactctatgtattcctagatatgttgtaaaccacactcgtactctgctatcagctaacgaacgcgccttcaatttgtgaatatatttttataaattacttgtagccttgtactatttattgacgcaaagcctaacaccgcaataaaactaagcaaacatacagaaaatatctcactttttcggcaagtctctaaagataaccaaagatacatataaggtgatccgtttgtccccagtattttagattgaaaggcgactggagacaaaaaagatgtggctaaaggcgcttgttctactggtaactactacaaactgtgcgcacttcgggctaataatcactttttaataaacttaagctttcgattcgatatttggcggccacgtgcaatgtgtgtcaaagtgatagcaatgtcgcttgtcacagtgaaaccactttttccatctgctatgacggtctgtaaattttctttaaaaacaaggggattgtgtgacaacgttttaatttccaggagttccatcgtatgatctcttgccatgtccaa

SEQ ID NO: 551 - DNA, 4566 bp, DROSOPHILA
cattagcgaagtgtcatcaccggcacaaattatgctttttttccaacagtccagtcttcccaaaaatatttcgctaattttttagagtgctgccttgtagtgttccttgttgcttagtttgttaaagccaatttaatccgcgaagtgctctccaacgtattttagtgttgttacaaactgtgatcttgcgacttgcctgcatgtgcaatgtgaaaatgccccgtccttggcataaatttcgggaggctgttgttggactttacttcttgaaaaaatagaaactatctcgcccagcatcacagtttggaggagccgcagctgttcctttgcgacaggtgcagcggcacaaactcacacactcatacatacctgcacttacctattccgcccgtccgtccaataacaataacaacacaaacaatggctggcactgcgaccgcgacgccaatggaaattgatgagtttgttaattcgtccataatttcttggctggaatcatgtctgccacgtgccgagcttctcgccggatacacctccctgctggatggccacataattcacagcgtctggctgcaaatcgaccccgagccgcaaaataatcccagcgagctgaacgatcttaacgggaaatctctcagcattgcgagggccaagaacttcgagtgcgtcgtgaggaatctaaagtctttctttgaggaggagcttggtcaaaccatactggtcctacccgatgccttcaccctgggtcatcatccggagagtaagaacgggctcgaacagatgaagaccttgctgaccctgttgctcggcgcagctgtgcaatgtcccaacaaggagctatttattgctcgcatcaaggagctggacttagaaacgcaacacgctattgttggactgatcaaacaagtgaccgacagccatagtttggtgctcaccgaggactccttggagcgacttacgccgcagagcatgtacacgcacattttgcgcctgaccaaggagcgggacgtcatgtatctcaagtggatcgatttggcgtgcgtagagaccgaaatgacagccagcgataatttggtggaatgtggccaaggtgtcagcgttacacgttccccttcgaacggaactgccacctcgacaccttcatcttcttccaattcggaaagcaatcaccttgccgtagaatgtgccgatctgcgttcgaagaaccgcaagctgcgtcaggaactcgaggaaaagtccgagaatcttttggagctacgtgaggagttggatgacaagaaggctcgctttgacaagctgcgccaggaaagccaagaatggtttacggaggccaagcgggcatctgcatatcgtgacgaggtggacatcctccgggaacgggctgaaagagctgatcgcctggaggtggaagttcagaagtaccgcgagaaactcggagactccgacttttacaaatcccgcgttgaggaactgcgggaggataaccgtgtgctgcttgaatccaaggaaatgctggaggagcagttgcagcgttaccgaaaaaggtctgagcatgccatctctctggaatccgagattattaaatacaaacagaagataaacgacatggctctcgaacgggacgtggatcgctccaagctagaagagttgctggaggagaactcgcaactgcaactggtagccaggaatctcaactccacgatggatttggataaatccttttccgaaaacgaagacgattgcaactcaggcgacaatagtctttcggaacagctaacgaacaatgctcagacccgtgcactcaagctcgagctggagaaccgtcgtttgaccgccgctctggaacaattaaaagagagtagcttccacgaatccaccagcaagatgctagaactggaaaaggagaagaaaaagctgtctctaaaaatcgaacagatgcaagaaaacatcaatcgtctgactcagcagaatgtcgaactggaaggggtctttaaaaatgccctggaggagaacaaaaagttacaggatgccgtggataatcgccaaaaaagctacgatcgacagagcctggaacgcgaagctgaccgtcaaaagctttctgatgccgagcagcatgtcgaaaccttaaacaaagaaaagcaacgtatccaaaccctgaacgaaagcattcagcgaagagccgacgatcttgaacggttggcggagagcaagacaaaggaactagagcaatacctggaaaaatcaaggcaatacgagcttactaaacagaagctctatgagatcgaagcaagggtctccacgtacgaacgcgaaaacgccagcctgctcaaggaagtgtccaaactcaaggagggcagcgagcaaaagtctgtgcagctggatgacagtattaatcggctcgatgtccagagcaaagaactacaaaagctgggcaaagcacttgaggattcggagcaagtgcatcaaaagcttgtggaactggagaagcaaaaccaagagctagcttcacagcgcatcattgatcaagagatgataagtactcttcgaaacgacttggtgactggtactctcgtaacgaagaaagtgcgaaacaacttggagaaactaggattggcggacgaagagcccggtgagctcaatgtggagcatgtggtggagaagttggtgcgcaacccggagacttttaaaacggttcgcgagataatgctaaacgtgacccgagagcagctggaggaggaggaacgagaaggtggcgtcaagtccgacatgtgtgtgctatgccaccgtcaggagatctttacggtggaaaagaacattgaactcgcggctactccagctcctgcaccagcgcaaccatcttcgcaggaacttcgcttcgaacacaaggtacgtctaagtccagcacgagaatcagcagagctgacccgtattaaggattccaacactcagcttcagactgagaatgctcggctcagcgtggacgtggctgcgctgggctcgcaaataacttcgctgaacacccagcatgtagccctacagctggcaaactcccagttggctgccgaaaaagattcgctgctcaaagagatcgattcactgcagcaggagcacaagcatgctttgcaggatcaggttacgttgcaatgcctgcatgatcaactctccgcggagtacgagtctctgaacaaggacaaggagcagctaaaggctgcagtgcgggacttgcgtcaggagctgcgagatacccgtgaacagcagtcggcattggagcaacgcattgaggagttgactattcagaacagcaacatgaaaacatgcagcgaggatctgtcaatcctgcgtacggagcactccaaactgacagacgacttccgcaatctgttcgccaccagcgatcgcttcaagaacgaatacaaaaacatccaggagcagtacaagatggtacgcatggagcactccagccttaagctacaaaacacagaactctccggcgagctaaatgctaagagcgatcaggtccgttgcctacagatggagtatagcaaggttcagcagcgttgtgagatgttgatacaaaacaatgctgaactggactcggagcgcaaggctctgatggacaacgtgtcccaattgctctctcaatatcaggaactattggccatatccctggaggacaaaaagcacttccatgaggaggagaagaactacaccgaacgggtgcacagcctcaagcggcagaaggaaaaactggaggagaaaattatggagcattacaagaagtcagaaaccacagtgcacaagaaaaaaccatttgccagcatgctggttagaagagtgaagaaggctagctcggatctaatgaacaaggtgcccagtcgaaaccgtcgatcttgggtagatgacgcccgtaccaattcccagttcgtgatcggttccgagtcaggcggcaatgagtcggataatagcaatgaggagccactgtccattgcctccgacacgcacctgctccagaggaatgtcccgctccgccagagtctgcagcgggatttgctggataactcgatccaacgcggcggtgccgtgcgcagtagcctgcaggctcagaaacgtacggatttgaataactcacgtagaaatagcgtgcacggcagtcttgaagcgccagacgtgacgggcagcagtctgactctcggaacggccggttccagacgcaccgtttatcttatcgatgagcaccaaaagcttcccgatggctctactcccggcgccacacagtcacagtctgttggcggcagtggctccgtcaacgccgcacctcctacacccgcagaacctcagacgcctcagaagagtaccgaaaacaatgccccggtgggcccagctacgtttctcatgtacaaccgaataaacaccacgatcggaggagcctcgaacagcggggaccagagccctctgctgcaggccagcggcagcgtctcgggaacgaccatgcaggatgacaagtcggcaaggaagcggaccgaagacaagagcaatagcatctggtatgagtacggctgcgtctag

SEQ ID NO: 552 - protein, 1381 aa, DROSOPHILA
MAGTATATPMEIDEFVNSSIISWLESCLPRAELLAGYTSLLDGHIIHSVWLQIDPEPQNNPSELNDLNGKSLSIARAKNFECVVRNLKSFFEEELGQTILVLPDAFTLGHHPESKNGLEQMKTLLTLLLGAAVQCPNKELFIARIKELDLETQHAIVGLIKQVTDSHSLVLTEDSLERLTPQSMYTHILRLTKERDVMYLKWIDLACVETEMTASDNLVECGQGVSVTRSPSNGTATSTPSSSSNSESNHLAVECADLRSKNRKLRQELEEKSENLLELREELDDKKARFDKLRQESQEWFTEAKRASAYRDEVDILRERAERADRLEVEVQKYREKLGDSDFYKSRVEELREDNRVLLESKEMLEEQLQRYRKRSEHAISLESEIIKYKQKINDMALERDVDRSKLEELLEENSQLQLVARNLNSTMDLDKSFSENEDDCNSGDNSLSEQLTNNAQTRALKLELENRRLTAALEQLKESSFHESTSKMLELEKEKKKLSLKIEQMQENINRLTQQNVELEGVFKNALEENKKLQDAVDNRQKSYDRQSLEREADRQKLSDAEQHVETLNKEKQRIQTLNESIQRRADDLERLAESKTKELEQYLEKSRQYELTKQKLYEIEARVSTYERENASLLKEVSKLKEGSEQKSVQLDDSINRLDVQSKELQKLGKALEDSEQVHQKLVELEKQNQELASQRIIDQEMISTLRNDLVTGTLVTKKVRNNLEKLGLADEEPGELNVEHVVEKLVRNPETFKTVREIMLNVTREQLEEEEREGGVKSDMCVLCHRQEIFTVEKNIELAATPAPAPAQPSSQELRFEHKVRLSPARESAELTRIKDSNTQLQTENARLSVDVAALGSQITSLNTQHVALQLANSQLAAEKDSLLKEIDSLQQEHKHALQDQVTLQCLHDQLSAEYESLNKDKEQLKAAVRDLRQELRDTREQQSALEQRIEELTIQNSNMKTCSEDLSILRTEHSKLTDDFRNLFATSDRFKNEYKNIQEQYKMVRMEHSSLKLQNTELSGELNAKSDQVRCLQMEYSKVQQRCEMLIQNNAELDSERKALMDNVSQLLSQYQELLAISLEDKKHFHEEEKNYTERVHSLKRQKEKLEEKIMEHYKKSETTVHKKKPFASMLVRRVKKASSDLMNKVPSRNRRSWVDDARTNSQFVIGSESGGNESDNSNEEPLSIASDTHLLQRNVPLRQSLQRDLLDNSIQRGGAVRSSLQAQKRTDLNNSRRNSVHGSLEAPDVTGSSLTLGTAGSRRTVYLIDEHQKLPDGSTPGATQSQSVGGSGSVNAAPPTPAEPQTPQKSTENNAPVGPATFLMYNRINTTIGGASNSGDQSPLLQASGSVSGTTMQDDKSARKRTEDKSNSIWYEYGCV

SEQ ID NO: 553 - DNA, 2906 bp, DROSOPHILA
gagttggattggtatcgcaagaacttcggaaattatccatctatggtggccagtatgacgatgggcattgtggctggcgcctttggagccatgtgtggaaatccagcggaggtggccctgatccggatgatgtccgataaccgcttaatgccggaggacaggcgtaattacaagaatgtgggtgatgcctttgtaagaattgtgaaggatgagggcgtggtggcgctctggagaggatgcttgccgacagtgggtcgtgccatggtcgtgaatatggtgcagcttgcctcctattcactgatgaagaaccaattgcatgggtatctcagtgaaggaatacctcttcacctgaccgccgccctggtgtctggtttgctgacctccgtgacctcaatgccactggacatggccaaaacacgcatacagcagatgaaggtgatcgatggcaagccggaatacagtggtaccatcgatgtactgaaaaaggtgctgaaaaatgaaggcgcctttgccgtgtggaagggtttcactccgtatctaatgcgtatgggtccacacacgatattttcatttgtcttcttggagcaaatgaataaggcctacagcaagcatatgctcagtgattcgctatccgattcggtaccttaaaggcatagaaaatatggcattcctcatcccaaacaaatggaaattgatacgatgtctgtgtaaagcgcgcttgttctgtaaagtaattcatatcttatatacaacaaaaaaatagtttattatgcaagaatgaatttaattaatccaaatcatgggaatggtgtggtttgatatataagagaatcgactgatttcctaagaatttttattacgaaaatatggtatctaagaaggcatcaaaacacctctcattcaatcctaacatggatttccattcattcagccttttaaatctagtttcggcttaaataaatttcttaaattcgaatttctaaaccgtttgtgagtggccatggcgtacagcatcgaaaagaaatccatacccggctacatgatgtacattaatggcggtctggccggaatgctgggcacctgcattgtgcagccattggatttggtgaagaccagaatgcagatatcagccacgacgggcgagtacaagagctccttcgattgcctgctaaaggtttttaaaaacgagggcatacttgcgttgtataatggattgagtgcgggattgatgcgacaggctacgtacacgacagcccgaatgggtttctaccaaatggagatcgacgcctatcgcaagcagttcaatgcaccgcccactgtgttggccagcatgggtatgggcattctggccggtgctttcggtgccatgttcggcaatccggcggaggtggccctcatccggatgatgtccgataaccgattgccaccagcggagaggcgaaactacacgggtgtgttgaacgcctttgtgcggatcgtcaaggatgagggtgttatcaccctctggaaaggatgcatgcccactgtgggtcgggccatgatcgtcaacatggttcagctggcctcgtactcgcagttaaaggcagcattttcggaatacttttcgggactttcgcttcacatcgctgccgccatgatgtccggtctattgaccaccattgcctcaatgccactggacatggccaaaacgcgcatccagcagcaaaagacggccgagtacaagggcaccatggatgtcctgatgaaggtctcaaagaatgagggtatcgcctccctgtggaagggcttcacgccctatttgtgtcgcttaggaccgcacacggtgtttgcctttatattcctggaacaactcaccaaggcctacaagcacattgtgctcggcgacgattctgaatcgaacatctaagtttttttttttaggacctatatttgtttactacccaaattaacagtcatctgttagaaataacctttcttgaatcttacgaatttcgtccactttgtgttgccaaaacaatatattactttgatcatacaaattaggtttggagtgtggagctttttaaatagccatgttcaatattcaataaaaaatatagtttactttatagcatgaaatagttgcgttctgcatacaaattttatatggtaatattctgggaggggcattagatcagttggaatttctcacagacatttttctcgcatgctataaatgatacccgcaatggattcatctgtcccgctccagcgatcagctgagctttgtttgctatggggctttgtggcgcttatcagtcgcccgatcagccggtccggtaatctcgccgagtcagttgcgttcctacgttgcgatcgagcggttcgcgagcggtacggttgattcagctacacacagtcggtggttgggtgtgcggatcgcgtttccttcttatatgggatatgagatacatctgctggcagggagctgagcaaagtcaagccgggcggcgtctcacaattgaagccacttaagttcgccgactgagatctgtgaaggaaatctctcacttgggatgaatcaaccgttgagttcatgccgcggaagtgttaatttagcaaccaaatacgacttgtagagatcagctcggtacaagtggcattcgaaagtgctctttgtgtgccgcataaatcgtgcccgaataatcataaagaaaaatatgcaaatgaaattatgtgatagacacataaatcggtaattaagtgataattatttatggtgtgaattgggccggacattggcaaaccacattttctgggcgctgtaaatcgctggtacagccggacggaaccactccactcatgtgggtttgccgataagatccgtaatcggtatctatctcggttttatggcggcacagtgggca

SEQ ID NO: 554 - DNA, 906 bp, DROSOPHILA
atggcgtacagcatcgaaaagaaatccatacccggctacatgatgtacattaatggcggtctggccggaatgctgggcacctgcattgtgcagccattggatttggtgaagaccagaatgcagatatcagccacgacgggcgagtacaagagctccttcgattgcctgctaaaggtttttaaaaacgagggcatacttgcgttgtataatggattgagtgcgggattgatgcgacaggctacgtacacgacagcccgaatgggtttctaccaaatggagatcgacgcctatcgcaagcagttcaatgcaccgcccactgtgttggccagcatgggtatgggcattctggccggtgctttcggtgccatgttcggcaatccggcggaggtggccctcatccggatgatgtccgataaccgattgccaccagcggagaggcgaaactacacgggtgtgttgaacgcctttgtgcggatcgtcaaggatgagggtgttatcaccctctggaaaggatgcatgcccactgtgggtcgggccatgatcgtcaacatggttcagctggcctcgtactcgcagttaaaggcagcattttcggaatacttttcgggactttcgcttcacatcgctgccgccatgatgtccggtctattgaccaccattgcctcaatgccactggacatggccaaaacgcgcatccagcagcaaaagacggccgagtacaagggcaccatggatgtcctgatgaaggtctcaaagaatgagggtatcgcctccctgtggaagggcttcacgccctatttgtgtcgcttaggaccgcacacggtgtttgcctttatattcctggaacaactcaccaaggcctacaagcacattgtgctcggcgacgattctgaatcgaacatctaa

SEQ ID NO: 555 - protein, 301 aa, DROSOPHILA
MAYSIEKKSIPGYMMYINGGLAGMLGTCIVQPLDLVKTRMQISATTGEYKSSFDCLLKVFKNEGILALYNGLSAGLMRQATYTTARMGFYQMEIDAYRKQFNAPPTVLASMGMGILAGAFGAMFGNPAEVALIRMMSDNRLPPAERRNYTGVLNAFVRIVKDEGVITLWKGCMPTVGRAMIVNMVQLASYSQLKAAFSEYFSGLSLHIAAAMMSGLLTTIASMPLDMAKTRIQQQKTAEYKGTMDVLMKVSKNEGIASLWKGFTPYLCRLGPHTVFAFIFLEQLTKAYKHIVLGDDSESNI

SEQ ID NO: 556 - DNA, 8597 bp, DROSOPHILA
atactatacacatgtatatcactcccactttttcatcccctgcgatatttgccatttgtatttgtcttgctgctgattgtcgccaacctgttgagcatgtgggcaaatagccgagcaaatacccaagcaaataggggcttcgatgggcttcctgtaattgcgttaaatatttgcatagaagcgccggcaatcgaacgcagtgggttggctggcacgatttcaatttgcattttgtgcaacgatctggcgattccaattcctattccaattcgactccgatgtcgatcgatcaatcaaccgacgatgaccttcacactgaccatgacgcagggcggtgggtggtggttttgtggttggaatggggaatcgccgagcactggcgccagcagtgggcgtggcctgtcacaatcgcggctgcaatcgccagatagggatccaatttcgcattttaaggggcgtacccgggactgggctatcgcctccaatctgacccgtaaacactgcaggttcctgtacagcttacttttattatcaaatatatatgtacatttgttaaaattagcacacagaagtataaatataggtatttgtctttgcaatcctaaagtacgtgtgtttatacagcaggtggtttatacaaaaggagagcacgtacatatgtaactgggtggaagtggaagtccattgaatcttatatagatatttgggcgtgaccttgagtacttaggaactagttaaactatactacgtatctgaacatcgtggaacaccaataagctaggttggccttgagtccgaaaaaattgtaataaaattaagaataggttacatatcttggctgaagttcaattgtgccagaggtaatttcttgtaaatcgttgaaaatagaaataacatataaaaagtattcaaaagtatcttttcaagggctgcttattcaactacgagttcaatggcattcagctagaataaactatggcatggagtccttctgtgatcctcaacgtccgctcaaccagctctggatttgactggcactcttgcccttcgtctcctgcaaggcgatggcaacgtaggcagtggccacccccatccaggcgctgaagaaccagaacggcacatcagcaccgccagcattgagcacgccgaagagccatgtgaccagggacacgcacacccagttcatcattacgctcagggagacggcgatgcccttcacgtccggcatgaagagctcgcccatcatcatccaaggaatggggccatagcccacggagaagctcacgatgaacagcactatgcagagcaggggcaaccagccaatggactgggacagatcggtgtgccgattgattgtgttgtaagcacccagcatggccaggcagacagtcatgatggtgctgctgaagatcagcaggatcttgcggccggccttctcgatcagcagggaggaggccagggtcatgatcacctgcaccacacccaccactatggtgcagacgttgggattcagcgtgctgctagactcgaagatctcgttcatgaagaagattacggcattgatgccggagaactgctggaagaccatcagcagcactgagatcaccataccgttccgcgaggcgcggttgctgaacaaatccttcacggaggcatccactccagtctggtccaggtcgttttggatggcctggatggcgttgctggtgttgcagtaatctccccacagccattttagtgcgcgattggcctcggagcgcttaccctgcaatttaaaaatgtgtccgtataaataaatattgataatcaaatcattgtctgaactatacaaaacgtaaccgaagcatttagcatttgaaaaatatttggaataaagatttaaaaaatactttagaaaggtttatacaattttgtatagctctcagggacctgagacccttacgtttttaagtagatacactggcgtctcgggcacgataaacaggccgacgagcagcaggatgggtatgattagacagagcaggctcagagttttccatgacaccaaagctcccaccacgtagataaacaggataccaatcgtaaggagcaactggaacaatgtgcctagactgccgcgaatgctagtctccgcgatttccgaaatgtacataggagccaccacgcagaagctgcccgttgcgatacctgaagtgctgcacattcaaatcgaattcaaactggcaagtttacatcacttaccaattaaaaatcggcccaagtaaagccagccgacggaattggcgaaactaagcgtgatccaggccaagatgaagggaatgtccatgaccatagctgtataacgtcgcccgatcctatcggcaatatatccagaggggagggctccaaaaagggcgccgaagggcaacatggaacccaccaatgtttctgcaaagaagcaaacgttgtttagtaagccccagaacttgtcaatctgcccagaaatagtactcaatctataatcaatactatctatactatttatgatcacgcaaatcataatcacttgtaaaaaagagatagcaaaatgagcttaatagtttcggagggccacagtcaacttaatcaattggaagaatagataacaaaaacaagaaagaacgctatactcgagttactcgactatcagataccctttactcatctaaaaacatttcatattgtttatggaatatcgatagaaattgaaagttttgggcaaacacttttagttccgtctgttcatacggacggacagaggaacggacatggctagatcgacttggctattgatcctgatcaattaatgtagtataccattaactccacgagtaacaggaataatcgaaaaatggtatttctaaatagattcctaaagtgtgtaggttttatcaataccaggatagctttacccttaaaataaaagggaatcaaaatgcaaacatgttatcaatgctatgtgttgaacaatttactggcgtataaatgcactctataaccatagtctataatgttgaacaatttactggcgtataaatgcactctataaccatagtctataatcttaaggtccaacgctataagaaaggtactcactttgcgaatcagtcagtcgaatgtcattctcgttggaagtcgagttggaaataccgccagttgtggaattgaaactgctttcgtttccggcagatatctgcggaaaaacaggagacgtccaggataacgcagttccagcggcaaccgcacccaaacaaactgtaacacatcgattgttggtcagtaaagacatcaatcttaaaacaaatttattgttctcacttatcatagccgccacatattgccgggtctttgaagtcttcgactgattttcttgtagaagatcataggttattggattgcgtgagtctccgtcctcttgactgacggtctgcaaaagaagaaggaatctttaggatctgcttaaaagattatatcacacttaaataggctgcattcataatgattacgatggctgccctgctcggtttcctcactggcctggttatgataataggcaaagttctagcgtttctttggactttgacgaaaaccatatacgtcaccctgaaaattgcaaggaccttaaggaaaacaccaacatttagcgatgtgaagactcgatttaaggagttttccctcagaaatgcaaaaactatactaaaagaatagttgaacaagtcttgaacgcattcatgatccaattcagtacccaattaactcttaagaaatgtctaaaatcacttggtttgtacaccgctgaaaatgtgaaaaccttcttacttaaagcactttttcatttaaaaacacacaaaaatatatatatatattgttacatttgtccgacaaactctaaaatgcaatgctgcgatatttacctgccaccaacgagccattgcacggaccactttttccgaatccattcgagattcggccgatttccgggttctttagcaacgccttatataagacgatcgcagacgaaacgcactgcgccaaatttgacgactctttgtggtgtaaaaaacgctgttttatggtttgtatatatcggattatgtatttcacttatttctatcgagtctcattaattatcttagcagtgcgtttctttgtatatgtattgttattatgtattgtgtattattgttttgatttttccgctaattttaatggctgcctctggggcagtggattgtctcgtgcaaacacctcgaaaagactaaaccggaggtctcttcgaaaaaacgtattttcatctcgatgcttggcgaagattcttctattgtgcatagaacttttattttatctgagacttttgtcggcatttcgttgaactgccaacagattacgcgaatcagatgcattcgaatcttttgttttacgtcagaggcaaatggatttattcttgaaataggatgctaacaaataaacaaacaacctgttggaagtattcgtaaaactatcccagtaatcgattacccaccggctaccgaatgacattgtcatattaattggctatcaaatgacttcttatgtgaatccacgcaaatattacgcatacgccaccgcaaccaagtcgagcaaagcccaagcaaacgaatgcttccgacagttaaaattaatttgctaaatgcatttcggtgcgtttgaggtgcactttccaagtgcatcgggaaccaaattcgtcgtctattctcgggccgtagacagaagctggtcatcgattagatgacaaccacgtgagattgcccctttcacagttgattccttgatggctaggcaggcgcccgcttaaaatgttattaaggcggaatttctaattataaagtgaaacacgtatgtacataggtgcatcttaatggcgtcaagtgcatgccaaaagaaacctgtcgccgcattcgcacccaaacaagtcgatcactcgacggcggtgcgagcgagaggtcccagagtgcgacggagacagcgagagggggtcagaacgatacgactgacacacccaccaaacagtgagaaaaaagccttgtaaatatattgcaaaatggaactggtttaagatcaaaaatcaaaaatatttaagaataaaccaacgataataaaccacctaaaagcggtcgagaaatctgctattaaatctgcgcaatacactatccaatttagacgtgaaatttcgcacagtgtacgcacaacacatgctaataagcttgcctcgcttgctgtgctctgtttactctgtttctgcactcgccttttgctgttttctcccactttccgacgtcaagttcagcgagtaccttgtgccatgtgccgatgcacttgggaggcccgttcccaagcacctgcccccatccataccaatggatgatggccttacgctctatgcttccgcccacaagcccacattttacttgtctttatcgtggcccgcgccattgcagctcactcagtcgttagacaatatcttttattgacgcaattcccttaattcgctcaagtcatttgcccatgcggtaattaaagcgatattgtttacccatggaagtcgcttctgttgcaaggtgtgccctggtattcaaatatagatgggtgaaaatggcaaagcttctttctcacggattatagactcctatggtgggtttagtgggtctcgatgggatagcaagtccaaattaaatactttaagggctttaatactaagcgaatttattccataccccgcaaagtttgctatgcttcgatagaggaagttgcacagtatagtcctaaatagttttattaaaatggtggtttggtttgctatatgtgcaaaacattattcataaggagctacaatgaatattttatttatatataaacatttgtgcaagatcggattccttctttagaatagatcctgattttcaccttattataaggaagtaggaaagcaaaacgagacacttcgaagagatgaactgggcggcgaatttacatcgaatccaaacgtttaacgaaacatttcaccggatgcgactggccatgaaacgctacaacttattgatatgtaaatattattatttgtatcccgcagattgcccgacagttcagtgcaggccagataaacgctgagtaaatatgtcagagagcataaacaacaacaattgattggcacgcgactggaattatgatcattatattatattgctgcaatgattgctgtgtgttttactagccgatttgataaaacacgctggcactttgtggcagtggccaaaaacccaaaacacgcctggtcttatcagccaaaaagtgaatcactacttgacggcggcaggctagagcccgaacttttgggaatctgaagccaaagagcacagcgtcacgtccaaaggtggacagctaattggccattatcgaaagcagttagtggctgcgtgaaccgcacgcctatcgcagctgctactccttccgaaatcttgacgatcttcccggctccccgatagcagcctattggccccgtgctcagttacgggtgtacgtcttcccaatgcccaatcgcctggtaagagccacttgagcggtcttctcgagtggccaccgttcgatcggcgcagtctgtcccagtgccaagggcaagatagggtggtgtaccaccccccaagtacaaaactcttgatcctggggctctaagccctctctaatcattggtttatggctaccgataagagctggagatcttggttacctagcaggcgcaaccgtaaacaaaactgttcagggggcaggctttataaatcttcaacttggcgtacacttcttcgcgaggagccttagttcgattagatatttttgctgcccacttcgaaatcgtttcgcaattagtaggtaataaattattatagattgcgacaacaaatgcaaatttaagtggctaattaaaaaggtagcccacatttttagtatggtaattgaggagtactaagtgcctaagaacaaagctcaagaggctcatggtaattaatagaattctatgtactaagtttaataattaagaaagtgtttttttttttctattcatctgaacaaatatgtccagttcttaaaattgtatttaatttggaaacaaattgtgcttatgtgcccttgaaaaggcctttacttgacaatcggatacttaaaactgaagaaaagcaattcatttataatgaatttctaatcttagccatgtgccgcttctcgtttattaatagctatgttcgctccaatattaccaaatttactggtcagcatgtcgtatgcgtaatacatttttttatcgttcatctttgcccttgcgtcttacacttaaaacccagatctagtgctagagcaattcaaaattggttagttcaattaccgttttaagttcctcggtagccaccatgtttcaataacttccaaaacagcactatttagacgattagccgattaacccgcaaatgcgaggttatatgttcgttttattagtgtttattttgctactgccaatttttcgatcgctccagttccctgaaaggcttaactatcgaaacgtgtggatggcgcgacgagcgtccgagctgaactgaatttctccaaggaaatcgcttagcagctaagcgaaatgagcgcccactgcgtcggcgacagcgacagaggctgatactagaagcctgatatcgcggtggcagaggcagtagcagcggcagagacagcggcagaatgacgcagcccgatataattccaaatacgattcatggcctgggcttccactgggtttcctttgggtttcctttgggtttcctatgggtttcctttgggtttcttatgaatttcctattggttgccactgggtttcgttaggtttcctttgggtttcctatgggttacctctgggcggtcgtgaatcaaagttaaccttgctcaggcgattgtatccggaggtattcgactgctggtcctggtagttctgaaacttctccacgagtttgctcaaaccctgttccagcgatggagagctgaccttatggaacacctttagcacatagtccaccagggcctgggccagatgctgttggttacatggggaaagggaaaatttgggaaaagtttgtacttatttaacatgataatcgctaaaatatgggtgtatattataaaataacatgctatgtatcatccacaatattgaatcctatagattataaaatgattaatagtaggcaatgagtaacattgttacttattattatttagatgtttattcagtttctgaaataccatatatattctattgagtttttacccctgcaaagggagaggcaaacctttggaataataatataagtttaaaaggtgataatcattcttaaaaacaatcaaaacgaattgtcgaattgtgtgattacaatcttaattttaaaatttaaagtgaatgtctcataaacaacatatacaatatattttttccttttctacagttgaattggaaaaacaaaatgtgtgagtagcagcttcctgtttttaaataaaatgaagtgacg

SEQ ID NO: 557 - DNA, 1632 bp, DROSOPHILA
ttaagcctttcagggaactggagcgatcgaaaaattggcagtagcaaaataaacactaataaaacgaacatataacctcgcatttgcgggttaatcggctaatcgtctaaatagtgctgttttggaagttattgaaacatggtggctaccgaggaacttaaaacgaccgtcagtcaagaggacggagactcacgcaatccaataacctatgatcttctacaagaaaatcagtcgaagacttcaaagacccggcaatatgtggcggctatgataatttgtttgggtgcggttgccgctggaactgcgttatcctggacgtctcctgtttttccgcagatatctgccggaaacgaaagcagtttcaattccacaactggcggtatttccaactcgacttccaacgagaatgacattcgactgactgattcgcaaaaaacattggtgggttccatgttgcccttcggcgccctttttggagccctcccctctggatatattgccgataggatcgggcgacgttatacagctatggtcatggacattcccttcatcttggcctggatcacgcttagtttcgccaattccgtcggctggctttacttgggccgatttttaattggtagtatcgcaacgggcagcttctgcgtggtggctcctatgtacatttcggaaatcgcggagactagcattcgcggcagtctaggcacattgttccagttgctccttacgattggtatcctgtttatctacgtggtgggagctttggtgtcatggaaaactctgagcctgctctgtctaatcatacccatcctgctgctcgtcggcctgtttatcgtgcccgagacgccagtgtatctacttaaaaacggtaagcgctccgaggccaatcgcgcactaaaatggctgtggggagattactgcaacaccagcaacgccatccaggccatccaaaacgacctggaccagactggagtggatgcctccgtgaaggatttgttcagcaaccgcgcctcgcggaacggtatggtgatctcagtgctgctgatggtcttccagcagttctccggcatcaatgccgtaatcttcttcatgaacgagatcttcgagtctagcagcacgctgaatcccaacgtctgcaccatagtggtgggtgtggtgcaggtgatcatgaccctggcctcctccctgctgatcgagaaggccggccgcaagatcctgctgatcttcagcagcaccatcatgactgtctgcctggccatgctgggtgcttacaacacaatcaatcggcacaccgatctgtcccagtccattggctggttgcccctgctctgcatagtgctgttcatcgtgagcttctccgtgggctatggccccattccttggatgatgatgggcgagctcttcatgccggacgtgaagggcatcgccgtctccctgagcgtaatgatgaactgggtgtgcgtgtccctggtcacatggctcttcggcgtgctcaatgctggcggtgctgatgtgccgttctggttcttcagcgcctggatgggggtggccactgcctacgttgccatcgccttgcaggagacgaagggcaagagtgccagtcaaatccagagctggttgagcggacgttga

SEQ ID NO: 558 - protein, 497 aa, DROSOPHILA
MVATEELKTTVSQEDGDSRNPITYDLLQENQSKTSKTRQYVAAMIICLGAVAAGTALSWTSPVFPQISAGNESSFNSTTGGISNSTSNENDIRLTDSQKTLVGSMLPFGALFGALPSGYIADRIGRRYTAMVMDIPFILAWITLSFANSVGWLYLGRFLIGSIATGSFCVVAPMYISEIAETSIRGSLGTLFQLLLTIGILFIYVVGALVSWKTLSLLCLIIPILLLVGLFIVPETPVYLLKNGKRSEANRALKWLWGDYCNTSNAIQAIQNDLDQTGVDASVKDLFSNRASRNGMVISVLLMVFQQFSGINAVIFFMNEIFESSSTLNPNVCTIVVGVVQVIMTLASSLLIEKAGRKILLIFSSTIMTVCLAMLGAYNTINRHTDLSQSIGWLPLLCIVLFIVSFSVGYGPIPWMMMGELFMPDVKGIAVSLSVMMNWVCVSLVTWLFGVLNAGGADVPFWFFSAWMGVATAYVAIALQETKGKSASQIQSWLSGR

SEQ ID NO: 559 - DNA, 7393 bp, DROSOPHILA
acgaactgcgcgtactcctcgcgccagtccatggatcgtggccatgtccgcgtcttcaactcctgcttctggaccttcaagttgtgcgcatagtggcccgagatcagggcgggatccgtttgcttccggaacgcggtgactgttcgcttcggcttgtcggcggtgtagtccttgtagaacgcttgcgaggtggtgatgtccttgcagcacctcggcagtatgtggtccagaaagatcaaatccatttcggccagcatggcgtcttgtgttttttcagccattgcggaaaatatatttttatgtttttttttgtgtttccgtaaaactcaattacagtgttagcctatgtaaaggtactgtgttctaagtatttttcaatcgtcagattcgaaaaggtatcagtgttgtttgttataacataaaatctcttgacgttggaagaactacttattttttaatataatataatatataaaattaattggtcttgtattataatcatactattattgccaaggcattaaattaacaatgagattcgcaaatctactatgaagtaaataaaattggataaagagttttttaagagattccctaacattaacaatatattaaaaaaatagtagataatacggaattcatattacggatattaacatacagttttgcggcgaattcgatcttaactcagcagtttataacattgcatacttttatgccctatggatttatgcccctattggatttattattatactccttacacataggtcatccgttgatgaccttaaaaatgttcttttaaagtgcaccaaaacttgcacgccatagctttaaagctgaaagactatattgacatatcatattgtatagttattctgatcaataaatcctctgactaaaaatgctaaacccccgaaagggtcttaaaaatgtatattttttaccgtttttgtaagcaattgccataatatttaaatgtctggctcagagaaagaaattgttggtttataataatattattactagacttttattttcattacgacttaacaagaataacatgtaacaattgagtttgacttactacactagccagtaaaatacttgcagagggatccttatcattatggaatcaagggcactatcaactaagggaccagctctctagttacgcttgccattgaggcgatcctggatctgctgcaaactaagcccctttgtctccatcaccacgaagaggacgaagaagaaggccaccaccatgcagacagcgaagagccagaaggcatagtaggagcccaaggcatctaggctgggatagaagaaggtgaccaggaagccgagggtccaacaggtgcttgcaacaaccgaggaggccaccgactttatgttcgccgggaacatctccccgagaacagcccacggcagcggtccgaatcccgtgcagtacacgatgttgtagatgatcagagcaggaactggcatccagaccacactggagatgtctcccttgaccagctgcatgtagaagaatgctcccagggccgcaagcccaatggacatcacactggaggacgtcagcagcatcaccttcctgccaaggcgatcggccaccagaggcgtcagtgccgaggatcccacctggacacatccgattatgatggtggcaatcgccggatccagcccagtgttggcactggcgaagatagactggctgttgaagaggaccacattgatgccggacagctgctggaaggagatcaggccagcgcagatgaacaaggccctgcgattgccggcattcttgaacaaatccatcactgtgcccttgctggccatcgcctcctctacattggcctggatctcggccatctcgtcgtgcacgccctcggcactctggccccgaaggaactgcagcgacttcagtgcctccgactttcgaccttttccggcgaagaagtacggactctcgggcatcatgtagaagaccaagtcgaacactacgggcaccacaatgcaacaccactgtagagcctggtatgaaacatacggtccaatggcatagacgtacagaatgccacctgtagattaagcataaaagattagtcgtttgtcccactctcccttagagggtacctatccaatctacttacccacaatgaagagctgcatcaaggatccggtggctccgcgcacattgtccgtggaaatctcacccacatacatgggctgcacggtcatcacgaagccgacgccaaatccctggatgaggcgggacatgtacagaatccacacctcggaggccaccatatttaggccgaaagccaggacgaagaacagactgctggagaggagcacccactttctgccaatgcgatcagccatcggaccggccacaaatggagccaccagagctccgacggcaatcaatgatgaaatccaggcatcttcatcggaagttatgggccggctcagcggcgagtctgaggtgtcctcggacttgagcttgggcccgatgggggaggtccagcctagggtggttcccaccacaaaggcggacaagttggctacaaagcatgtaatcgattagttaaggagaaaaaaattactttgattgttggacgatgaaacttggttatttaaaaacacaaattaattaaaaatatgacaaattgtcgaaatcggtgtttttcttattggtaatgtaaagtaagtaaatatttaataataatttgttttcttaaaaaacatacatttatgactcaaattactctttagattaatatgtgttaagtcaccccttttggaattcgggatgagttagttatgttatatttgcgataaatgataagaatattgactattgactcacctgccacggcagccataaaaatgcgaccggacttgaccggttcgggtgacatcgttcgagtgtttccttctcttatctggaacgtactgacttccgtgtaggagtactgtactccggtctcctcctcccggcttattgagggcatctggccgacttgggttgtacagaagcagctgcaagagcgcaagagtggaaaagcgaaagtgcctcattagcaatgcggctgactgggattaatgatcttattcgcatttgtaattcaatcggctgcaagttcaaacggtcagaactcgacacgtctccgatttctttgtgggatggaggatgggggatgcgggatgacgcatgccaccatatgggaggggaagccaagtagctaccggaattgtactccaaacagcttgacacattatctgccgattttttaacgcatcacgttatcagaccattagccagtttatctggacttaatagcacagaaaaagttaaacggaggcggaactgcagtcttttcattatttaatgaatgaccaaattattttaattgcactatggacaaattaatgtctgtcgcatttgtactgctaattaatttatttattcgctgccacttatgtaatcacctctggcacttttagcaaatttgtataatgattgcgacaccaagtcattaatggtgtaaagtggaattactattgtattactattcactttgcattcttacagaaaaatatccttggaatcgcagtaaatcccactcgagtaggatctgcaaatgaaattaaaaccgacgcagtccggggaactggagaactgtaatgctgtttgaatagtcgcatcgcgcgaatttaaagattttccaccttatatggcaggctttcgaaatccatacacgtccaataatgctcactgacactcgacttgacgagtgctcctacacgtgcattatcttatcagggaagcgcctcccgattcacggcaaacccatttataggctataccataccataccatagcatatagtactacaagtatattatactattctataatcggagctgccatctctcgatcgaaactctctctgccttggccatcgaatcgaaatctctgtattccgctgttgttcgtttggaatcgcgccatttgtgtgcattttgcacttgaactggcccatatacgtacgagtatgcccacatattaaatgtgataaggaggtgcagcgaaaactatgccccaatctcaatttgtttgcttcgccgactcgccggcaaaagggcgaccggcccacttcggtcctggtcaactaaaaacatacagccctttcgatatacaacaaatcttaacccaaataaataccctatattctgtcgagtgaaggattacaaaaaaagaaaaacgcttttgaacttgatagaagttttccctgaaaagtaagcaaacttcagattcttgctctacaaaggcaaatatttacatacattctggtatttaaattaagttgagtttaaaaatataacgtatattatgcaatgtgtgtttatgtacctctatagggctggaaaacaaacaaaaggcgccaatctacaagtgcctctgacactcacacacccttctgaattcctaaataaaatcaaatgtcgccaagcgcggcgtaaacaagttttgattacgactgctaattattgagtaatttccgatgcattttatagccctgtccttggatctatttagttggttccaaatcgaaggtggggacacaatttctgcgcctggggcgagacacgtgaagagggtgtgagggcactcgaaatggagccgattgtcatatctattggggtagtatctcaacaagttgatggtcgaggaacacctggactgagccaaatagagcacttcagataaatcctccaactactaaacttccatggaaaagtaagtaagtaacagttgaaattcacgcaattagtaattactacgtggatgtgtaacgtcgcatctgacattgaactgttactgtactgcttattattaaataactatatttattgacattcttgaaaaatgcgacctcggggttttgatcataaaccattaagtgattttcccaatctctaagatatttcaagtagtgagctccgataagcatttcgaataaattggacagctaattttattaacatttttacgtttaccaatccgcgcgtccaacggaagtgagttttttatttacggttcactatggcaaaactttccgtagttctatttagcattgggttttgtttccacttgccaaataaatgtgttttttgagagcattgtagttttcgtatggttaatatgtttattttcgatgcctaacagttgaatgggggcgtttatttatgaaattgttatcagtgtgcaaattcaaagctgactgactaattacgcagactagcttcccaagtataaagagtaattaaaaatgtcaaaagtggcattctactgttggaacattctcacagatcgctttttcactaaccagacgacacacattttagaaatgtaattaaagtcaatttgataagaccacgttcctccagagcctccaaaatcaagtggtgtttttttcatcgattttgtaggtaaagatacgattaccttcgcagacatgtctggcattaaaagctgatatgctggagaacacaagtcaaatccaaaaaacacgtgagattggaattcatcttttgggggatttttacttgtttacgaaatgggtattgtggaaagttttcattcactgaaacttttggaaaaatacagacattacattgggacttaatgattgtgtttctttttcatccaccattgatccttttctaaacacacatatgctatgttttttaagtttttgctaactatttgttgttttgaaaagttattaatataaatattagttattaataatttgccacaatggaagatatcattttagatgcagctctaactggttacctatatgtttttataattgactttaactgattaagaaacttacaagacacgtgatcttaggcaaagaatactcgtgcgaaccgatcgccacgaaatcagatgaagactaatggaattggtaacaggctgatttggggaaacattatctcagccactcgattcacgttcacgttcagaacgataatgcgtttaatgtggaccctaatcggagcacctgttattatcatatatgatatttataataattcaaggcgacactcgatgatcaatttatcagcactcggcagcgggacggctgaaaaccaacactcttattaactaggtcgccagacttacccatttcgtagccgaaattatcaattagtgggcaatcagtgaaacagtgaacaccgtttggctgcacaatgcggcgtacacgtaatgtgggaattaattcaactctggactgaacagacagatcaaagctaactgtttggctgggctgtcggaatggaaatgatgtcggatcgcgaatgttttggcgcttttgtgttgggcctgaaaaattatgacagacgcatttatactcgcacttagtcgcaagtgaggctagataatacgaatttcacacaccacagaagcacaggggaagctcactcacacacgtccgattgtagagatccagacttatcacagacatatgtatgtatgtatctatcaccatatcatagcgaattaagcgcgaccgttgaaccaagctcgactgagagagttgagtttaagtgatttgtatctgcccagtcgacaattggccgatgctctcgcagccttttttttgtcattgtaaaatagccgaacggataaaaaacacacatttaggtttggttaaggtgttcacagacctctagttccggaccgaagtgtggaaagctttggggctatttgggcgataccgatcgatgtgaatcaccatccaagaggaagttaattagcattcagcgtgtctggttaggggaactgactgattccgatggcctagctggccaagcgatacagttagtacatactcaattaatttgtttggctagtcggccagtattgtgcgtgcaccgcgcatctgttaattgaaatgtctccggtgtaggcacttaagtgccttatatcgacatggtcgatttctggttaacaccatccggaaccggcaatgcgatatgaaatacatgggaatcgctggccagaagtcgatgcgtttgtttatgacgatctgctaaatttaaatcgggaaagtgaactgcttgctggtggggggttgaatattgataaggagaatgatttacaaactggttatcatgtcttgacaaacttttattattattacttttatcattcaggttttgttgattgtatagagacatggtaagacaggaggctcttgctgatgccaatttagaaacaagttgcgttttttgtaagcttccatttttagaactatacttaattgacaaagaagtaaagcccaatttgccacagataaagagtcca

SEQ ID NO: 560 - DNA, 1856 bp, DROSOPHILA
ccaaaacattcgcgatccgacatcatttccattccgacagcccagccaaacagttagctttgatctgtctgttcagtccagagttgaattaattcccacattacgtgtacgccgcattgtgcagccaaacggtgttcactgtttcactgattgcccactaattgataatttcggctacgaaatggctgcttctgtacaacccaagtcggccagatgccctcaataagccgggaggaggagaccggagtacagtactcctacacggaagtcagtacgttccagataagagaaggaaacactcgaacgatgtcacccgaaccggtcaagtccggtcgcatttttatggctgccgtggcagccaacttgtccgcctttgtggtgggaaccaccctaggctggacctcccccatcgggcccaagctcaagtccgaggacacctcagactcgccgctgagccggcccataacttccgatgaagatgcctggatttcatcattgattgccgtcggagctctggtggctccatttgtggccggtccgatggctgatcgcattggcagaaagtgggtgctcctctccagcagtctgttcttcgtcctggctttcggcctaaatatggtggcctccgaggtgtggattctgtacatgtcccgcctcatccagggatttggcgtcggcttcgtgatgaccgtgcagcccatgtatgtgggtgagatttccacggacaatgtgcgcggagccaccggatccttgatgcagctcttcattgtgggtggcattctgtacgtctatgccattggaccgtatgtttcataccaggctctacagtggtgttgcattgtggtgcccgtagtgttcgacttggtcttctacatgatgcccgagagtccgtacttcttcgccggaaaaggtcgaaagtcggaggcactgaagtcgctgcagttccttcggggccagagtgccgagggcgtgcacgacgagatggccgagatccaggccaatgtagaggaggcgatggccagcaagggcacagtgatggatttgttcaagaatgccggcaatcgcagggccttgttcatctgcgctggcctgatctccttccagcagctgtccggcatcaatgtggtcctcttcaacagccagtctatcttcgccagtgccaacactgggctggatccggcgattgccaccatcataatcggatgtgtccaggtgggatcctcggcactgacgcctctggtggccgatcgccttggcaggaaggtgatgctgctgacgtcctccagtgtgatgtccattgggcttgcggccctgggagcattcttctacatgcagctggtcaagggagacatctccagtgtggtctggatgccagttcctgctctgatcatctacaacatcgtgtactgcacgggattcggaccgctgccgtgggctgttctcggggagatgttcccggcgaacataaagtcggtggcctcctcggttgttgcaagcacctgttggaccctcggcttcctggtcaccttcttctatcccagcctagatgccttgggctcctactatgccttctggctcttcgctgtctgcatggtggtggccttcttcttcgtcctcttcgtggtgatggagacaaaggggcttagtttgcagcagatccaggatcgcctcaatggcaagcgtaactagagagctggtcccttagttgatagtgcccttgattccataatgataaggatccctctgcaagtattttactggctagtgtagtaagtcaaactcaattgttacatgttattcttgttaagtcgtaatgaaaataaaagtctagtaataatattattataaaccaacaa

SEQ ID NO: 561 - protein, 491 aa, DROSOPHILA
MPSISREEETGVQYSYTEVSTFQIREGNTRTMSPEPVKSGRIFMAAVAANLSAFVVGTTLGWTSPIGPKLKSEDTSDSPLSRPITSDEDAWISSLIAVGALVAPFVAGPMADRIGRKWVLLSSSLFFVLAFGLNMVASEVWILYMSRLIQGFGVGFVMTVQPMYVGEISTDNVRGATGSLMQLFIVGGILYVYAIGPYVSYQALQWCCIVVPVVFDLVFYMMPESPYFFAGKGRKSEALKSLQFLRGQSAEGVHDEMAEIQANVEEAMASKGTVMDLFKNAGNRRALFICAGLISFQQLSGINVVLFNSQSIFASANTGLDPAIATIIIGCVQVGSSALTPLVADRLGRKVMLLTSSSVMSIGLAALGAFFYMQLVKGDISSVVWMPVPALIIYNIVYCTGFGPLPWAVLGEMFPANIKSVASSVVASTCWTLGFLVTFFYPSLDALGSYYAFWLFAVCMVVAFFFVLFVVMETKGLSLQQIQDRLNGKRN

SEQ ID NO: 562 - DNA, 7577 bp, DROSOPHILA
accagtgcgagtacaagagctcatcattcttaaagttctttgcccggctgcagacgttcatcttgtggttcgtggatgctgcctcctacatcgacactgatgatccacagtggtgttacttcttgaggtaagttttctacaagaagattggcttattttgttatcaaaatcagtagctggtttcaataacaacgtcctcttctcattctgcattcctttagctacgaaaagtacaagaacaacgatggccagtggcagtatgccacagctggttacaccaccgtatacgagtactacgcctatccgcaaaacaagaggcccaggataagccagatgctgatactgccgcctttccagaaactcggcttggctacccaattggtcgagagcatttacaggttttatcagtcacagaagaatgttgtggacataacagtggaggatccatctgaggatttccagcgtttgaggaattttgtggacgcgcgatcttgcatgaaattgaagtcgtttgcaccaggcgagatagtcaagggcttcaacaaggagatggtgcgggaagctcgcgaggctctgaaactcaatcccctccaggtgcgtaaggtgtacgagcttttgcgtttattctacaccaatgtgaaggatgaaaaggagtaccgaccctatcgtctggaagttaagaaacggcttaacgcggtctattacaagcagttaaaggatttgaagaaaatggagcgcttcaagatggacactgaaatgctgcgtgctcgcctgccaacggttcaacaacgaatggagcagctgcatgaggaataccgcgtggtcgagcaggagtaccagagcaccattgccaagttgagggcctcgtaggttctgtggatccaaaaggtgttgattaatttatttcgtttctctgttttcaaatatgttgattacaaaatacattatgttgctataagcctacagtaggattcctttgaataaatattacaaattaaatatatatatatatattatgtatttataagatatcagattaccgtgtgcacgtacatagaggagcaatgctgggcgtggggcacttgagcaattaagcgtatataaaacaaaacattacggctaacgagtacgatttatacaggttacaaataattgtgatcgggaagtacacatgggatacgatcattatcgagggtgctgggccagcagcccgtacaactagcacgacccgtattcctccatccacttttcgaagcgggcaacgtcatcggcagagacggacttcttggtgcgcagacgggcgtcctggaagtcctgcaaagtaatcggctggtcaacctcctcgcgtcggatttgcttaatctgatcgggagtgcgtccggaaatgaggcgccgcatggccatcatggaggcgtcccggcacacgttgcttatgtccgatcccgagtagccctgcagttcgtcgccgattattccggtgttcagactgggcgacaggcatacgtccttcaggcagagcttgaggagagccgatcgggtgccctctggagcataatattactattatttactgcaggaaaggaagtggctcgcacttaccgtttgggagaggaatatagattcgcttttcaaaacgtctccggaaagcctcatcgatgtcccacgggtgattggtggccgccagcaccatgatcaccttctcctcctgcatgcttgcgttgagtccgtccatttggatgagcagctcggccttgaaccgccgactggcctcgtgctccgagtcactgcccctggaggcgcatagggcgtctatctcgtcgatgaaaatggtgctgggcgcataaaatcgggccatctcgaacaggagacgcaccagcttctcgctctctcctcggtatttcgaggtcagggtcgaggaggacacgttgaagaaggtggttccacattctgtggccaccgccttggccagcatggttttgcctgttcccggcggaccgaccatcaacactccacgccacggccggcggattcccttgaagaactccggcatgattaccggaagcaccactgcttcctatttgggtaaaaaaaagatgtacatacatatgaagttagctacttttaatttaggtcttctgcacgcctctgaggtgcacttttatatttgtggacctcaattttaaacctattctagtcatagatgtcacagatatatatattttactagtatgggtgcatatcggaagttccgattcagaacataaagctcacctggagtattgtcttggcctcattgagcccagccacatcggtccacttgatgcacggatggcgctgcagaatgtccttctccagggtgtccaccagatgaacctcgtagcccaagggcgagaagtgcttggccttggtcttcggtgagcatttgggcgtgttgtggctggtggctagggactgggcgtgcgagttgtcttccagggatgtggtggcgtcttggtcatccgagttggagttttcgtccagcgagttcttcttaaccggcttgtgcttcaagttaagctgggtgtttgtgctgagcttcctggcccgcaggcgctccacggatcggctcttccgcaaggcggcggtcatggcggatgcccttgctggtcgccccaggcgcattgtgcccatgctggcggcgggtgtaggtgctcctgcgcccgccaatcccacgttcccagcacttccgtggtggctctggctgaggctgctgctgttcgcattgctgttgatggagggtaaagtgggctgcagctcgggatcccgccgacgcagggaggacacccaccgattatcctgctgctgcgacggaaatggcatttgggccgtctgactggctcgcggttgtggtgccacttctgcggcggaaactgcattttaatgattatataggaaaccccgccacccggagcaccaaccttgcgtgggtagccgctgcttgctgcgcaacggaacacttccgccaatgcccaatcccccaggtgcattagagcccaggttgttgacgggccggtggcgctctgctgtcgaggagtggccgccttccgagctcttcttcaagctggcgttccgggaaggtcgactggtggccgtgatcttcgtgaagccaaatggggatagcgagtcgaggatcagggagtccatcatccgggccatgtgcgacaggcttgtcggaggtgtggaagagctggagaaggaaagggtattcattgattgctcttacccagtagaagatctaaatattataacaggaaagaggaatcgataataggccttgtcctataataacataatatgatcaatgccattagtgccaaacccaaatattttcgtatttaattaggtattttgagatgtatctttaagatgttattgtcaattctatctttatcttttgggagaaagttttgggaaactatactatacgaatctaatgaagccacttaaggattcccaaactatctcattacaactccttatctgtaaaaaacataacatataactgataaggatataattaagagccaccaaacaacgcaaaaccaaaacccatgggctcatttttaaaactcatagctaactacccataactattaggtggctccatggagctgccattcaacttggccatgtcgcaaaggtcatttgctttatcagccgcggacaagtggctcgcgtgtcctggtgtgtgcacacacatataccggttggaatcctcgtgtctagccgcctaatattagttagcccttgcggaggaccctcccatcctgccctgtcctaccctaccctgccactccgcagacaatgctcgggaatttccgggaaacgaagagttagtggcgcctcccatgggggcgcctattcaaaccgcaggtggggtcaataaactcgttggctcctggccaggttattgacgtgtcggcgacaattgttaacttttgtattcgcatttgaattgtattttcgacgtgttttcgactttgcatgcgtcatctggaggcattaaaggctttgagagcattccggcggcaacaatgtaaatctcgatctgcaaagtgggccgcaatatattttacgcctggctaattaagttggcagcagcacagccataattcccgaccatattgcctgactcctggcacattcgcttggtatttatattgcgggctgtactcgttcgaatttgggttaatgtttccttcatgtgctcgcccacgatttctttgattctcggctcctgattcctgatgggaatgattagtggagcggttaactaggccactgcctatttgttcccattactatgcacaaatcaatgggccataatctaggaattacttgcatttgaactgagcaattgattgattggcaaagtgttacaaggccggattgagcgtggaaaaaccccggcatgggaaagtccagtgatggcggatttccttggactcgtagttatgatgggccacttgaaatcgtgtcaccaaggggtgcttatgctaatcccattggcacaacacaagacatttcgtactatgcaaattacagcaaaatgccaattatgactggcagaaatatactcgcgaaaggaaactggatggggtcaagaaggtacccggtggctttcttgtatgcaacaaaggaaatactttgggttgatagttgaccaaccaacgagctagttaccaactgccaggtcaaggaattcaaatgcggaagtaatccaatttatagtggatttcttgtgcccacagatctctactagctcttaccattggtgcagatcccagagcgagtggtatggagtgtgccggtaggtgggaacgaagggtaccgccacctcgtactcaacctggacgttgggcggcgactggggccgcgtggccaaggcgtttgaacgccccaggacgggattggagctggtcagcgatcgctggcgcatgaaggaatgttgcgccgccgccgcctgctgctgctgctgattgtagagactcgaattgttgttgagcaactgggccactccgccgctcggatccacggctgtctggcccatgccgaaccaattctgtgcactggtgttgaacatggcgctgtgccggcgtcacacagattaggacgagacacagacacttcactattaatttaaaaacacacgcggatatgttcgggcggaaactttgctacctgacagtctgcgcctggagccttcgattggctcgcactcggagttcgaaaacgcgacccgaccagccgactcgagggttgcagtccaactgaaactgaccgcttgactggacgacgcgtccacaacaaaccgaccaccactaccattccggtatggaacggaccggaccgggtagttttcccagttgcctggtgtgcgtccgtgtgaatgcggattgaggttaaaggaagtttcgcttgggcgctactttggggggcggtttcaatcatggtaaattacggggaaagagtatctcgacttgggggaaaataaagaaatcgccgatcggagctaggaaatgccatctttctaaatattgattgaaattcaaatatatggatttcagtttaatgggtttatgtttgttctgcttatatgctccttgtatatagctattgataggtaaaaaaaagaatatatacaatatataaataaatgaaatatataatatttctactaatgtctagttgcttatcgaagtttcctcattgtctaaaggacattcgtgcttctatgtaagcccacagcactctcaactcctcgggttacccaacgcgctggactgtggtcaatgcacgctagcttctggctcaagatttcatcgatttctggggaaagcaaggcgttcactcactcgcgtatgcccgactatttactcaaacggcagtggtttcccaataatctgccggcaatgtaatttaatggcaggcttgcatgcggccaaagaaagccggttcttgagttggcctcccccgaggacccagaaactatagcatacgtttgagagcaccgccattaggaggcttgaagtggttcgtccacatttcaatgtgcatgtaggcagaacccgataatccggaggtgagccacaagcgaaggccgtttcggatgcgcgcacacacatatagtatctgtatatgtatctaaaaatcagctgcagcgcgagataaaaatcgattgcggggcgacagtcatggaacgctcaagtgtctcggcacgccttgcgcctccaactggcacccacccttttggacctttgccgttgcgaagcactcaccccgcaggactcatcacgggcaggtatgtggaagtggagtccacggtgcgtatggtggtgttccctcgcagcacaatcttctcgcgcgtggtgcgcctataggtcgcctcctcgacccgcattttgctccaccagtcgtttattatttaaatttagtgcgagtaatttcgtaattttgaatttttcacaattttttttccttagttttcgtgtttacttcggtccgaaatggtgtgttggaaaattcggcatccgttcttcgcacaggcaatgtacaaatggaaaattaagagagcgggcggagcagggagaaaaggatgctgcggaaaagctttggctctccgccacagctttttctctctctgtctcagcttcctggctctccgtcgccaattgtaaacaattgcgcaatgctcgcctgctgttgctcctccactcgcctcgatgcacaaatggtcactaaaactggattgttgtggccaattcggcctgccagccgcattgcaacggcctgtgggggttgtgttggattgtattgctttgggcgaaggtccttatttggtggtgtttttcaagaaataaagcttgagaacttgtatttgcctctttaaagttatgataaatattgtagatgagcatataaacattaagtgacttaataggtatacttatcaaaatttgttttaaatcaaccgcaataaaatgctatgtttaacccactcagaagaacaaatatatatgcatctttattgatcgatttttaaaaaactacttaaaaattcgaataataaattacgatttaaaaaacatcattacattaaaattcaattctcagtttagtttggcgacatgcctgtcattacacagtattattgacgatcagaaattgaagaactttgctttaacactcaaattgcatttcaatccttatttatagtagtgtgtaaacagtgacagaaggttgtaaatagtttggggcagttctcaaacgttcagcacccggccagacgccttaaagcatggcactgtgcggttcgatgaataaaattcaaaattaacgtactggcaaaaatgaaacggtttcgaaatttgtagaaaagtgaactaattatcaactaggcgaggaagtaaccatccgtggacgcaaacataaactgatgtacgcatattttcatgtgtaaatatatatataaaacgtttctaacaaacacgaggcacgtcgaaatgtaagtgagcaaaaatgaagtgatctctaggttg

SEQ ID NO: 563 - DNA, 2174 bp, DROSOPHILA
aagaacggatgccgaattttccaacacaccatttcggaccgaagtaaacacgaaaactaaggaaaaaaaattgtgaaaaattcaaaattacgaaattactcgcactaaatttaaataataaacgactggtggagcaaaatgcgggtcgaggaggcgacctataggcgcaccacgcgcgagaagattgtgctgcgagggaacaccaccatacgcaccgtggactccacttccacatacctgcccgtgatgagtcctgcgggctcttccacacctccgacaagcctgtcgcacatggcccggatgatggactccctgatcctcgactcgctatccccatttggcttcacgaagatcacggccaccagtcgaccttcccggaacgccagcttgaagaagagctcggaaggcggccactcctcgacagcagagcgccaccggcccgtcaacaacctgggctctaatgcacctgggggattgggcattggcggaagtgttccgttgcgcagcaagcagcggctacccacgcaagaagtggcaccacaaccgcgagccagtcagacggcccaaatgccatttccgtcgcagcagcaggataatcggtgggtgtcctccctgcgtcggcgggatcccgagctgcagcccactttaccctccatcaacagcaatgcgaacagcagcagcctcagccagagccaccacggaagtgctgggaacgtgggattggcgggcgcaggagcacctacacccgccgccagcatgggcacaatgcgcctggggcgaccagcaagggcatccgccatgaccgccgccttgcggaagagccgatccgtggagcgcctgcgggccaggaagctcagcacaaacacccagcttaacttgaagcacaagccggttaagaagaactcgctggacgaaaactccaactcggatgaccaagacgccaccacatccctggaagacaactcgcacgcccagtccctagccaccagccacaacacgcccaaatgctcaccgaagaccaaggccaagcacttctcgcccttgggctacgaggttcatctggtggacaccctggagaaggacattctgcagcgccatccgtgcatcaagtggaccgatgtggctgggctcaatgaggccaagacaatactccaggaagcagtggtgcttccggtaatcatgccggagttcttcaagggaatccgccggccgtggcgtggagtgttgatggtcggtccgccgggaacaggcaaaaccatgctggccaaggcggtggccacagaatgtggaaccaccttcttcaacgtgtcctcctcgaccctgacctcgaaataccgaggagagagcgagaagctggtgcgtctcctgttcgagatggcccgattttatgcgcccagcaccattttcatcgacgagatagacgccctatgcgcctccaggggcagtgactcggagcacgaggccagtcggcggttcaaggccgagctgctcatccaaatggacggactcaacgcaagcatgcaggaggagaaggtgatcatggtgctggcggccaccaatcacccgtgggacatcgatgaggctttccggagacgttttgaaaagcgaatctatattcctctcccaaacgagggcacccgatcggctctcctcaagctctgcctgaaggacgtatgcctgtcgcccagtctgaacaccggaataatcggcgacgaactgcagggctactcgggatcggacataagcaacgtgtgccgggacgcctccatgatggccatgcggcgcctcatttccggacgcactcccgatcagattaagcaaatccgacgcgaggaggttgaccagccgattactttgcaggacttccaggacgcccgtctgcgcaccaagaagtccgtctctgccgatgacgttgcccgcttcgaaaagtggatggaggaatacgggtcgtgctagttgtacgggctgctggcccagcaccctcgataatgatcgtatcccatgtgtacttcccgatcacaattatttgtaacctgtataaatcgtactcgttagccgtaatgttttgttttatatacgcttaattgctcaagtgccccacgcccagcattgctcctctatgtacgtgcacacggtaatctgatatcttataaatacataatatatatatatat

SEQ ID NO: 564 - protein, 554 aa, DROSOPHILA
MARMMDSLILDSLSPFGFTKITATSRPSRNASLKKSSEGGHSSTAERHRPVNNLGSNAPGGLGIGGSVPLRSKQRLPTQEVAPQPRASQTAQMPFPSQQQDNRWVSSLRRRDPELQPTLPSINSNANSSSLSQSHHGSAGNVGLAGAGAPTPAASMGTMRLGRPARASAMTAALRKSRSVERLRARKLSTNTQLNLKHKPVKKNSLDENSNSDDQDATTSLEDNSHAQSLATSHNTPKCSPKTKAKHFSPLGYEVHLVDTLEKDILQRHPCIKWTDVAGLNEAKTILQEAVVLPVIMPEFFKGIRRPWRGVLMVGPPGTGKTMLAKAVATECGTTFFNVSSSTLTSKYRGESEKLVRLLFEMARFYAPSTIFIDEIDALCASRGSDSEHEASRRFKAELLIQMDGLNASMQEEKVIMVLAATNHPWDIDEAFRRRFEKRIYIPLPNEGTRSALLKLCLKDVCLSPSLNTGIIGDELQGYSGSDISNVCRDASMMAMRRLISGRTPDQIKQIRREEVDQPITLQDFQDARLRTKKSVSADDVARFEKWMEEYGSC

SEQ ID NO: 565 - DNA, 6230 bp, DROSOPHILA
accagtgcgagtacaagagctcatcattcttaaagttctttgcccggctgcagacgttcatcttgtggttcgtggatgctgcctcctacatcgacactgatgatccacagtggtgttacttcttgaggtaagttttctacaagaagattggcttattttgttatcaaaatcagtagctggtttcaataacaacgtcctcttctcattctgcattcctttagctacgaaaagtacaagaacaacgatggccagtggcagtatgccacagctggttacaccaccgtatacgagtactacgcctatccgcaaaacaagaggcccaggataagccagatgctgatactgccgcctttccagaaactcggcttggctacccaattggtcgagagcatttacaggttttatcagtcacagaagaatgttgtggacataacagtggaggatccatctgaggatttccagcgtttgaggaattttgtggacgcgcgatcttgcatgaaattgaagtcgtttgcaccaggcgagatagtcaagggcttcaacaaggagatggtgcgggaagctcgcgaggctctgaaactcaatcccctccaggtgcgtaaggtgtacgagcttttgcgtttattctacaccaatgtgaaggatgaaaaggagtaccgaccctatcgtctggaagttaagaaacggcttaacgcggtctattacaagcagttaaaggatttgaagaaaatggagcgcttcaagatggacactgaaatgctgcgtgctcgcctgccaacggttcaacaacgaatggagcagctgcatgaggaataccgcgtggtcgagcaggagtaccagagcaccattgccaagttgagggcctcgtaggttctgtggatccaaaaggtgttgattaatttatttcgtttctctgttttcaaatatgttgattacaaaatacattatgttgctataagcctacagtaggattcctttgaataaatattacaaattaaatatatatatatatattatgtatttataagatatcagattaccgtgtgcacgtacatagaggagcaatgctgggcgtggggcacttgagcaattaagcgtatataaaacaaaacattacggctaacgagtacgatttatacaggttacaaataattgtgatcgggaagtacacatgggatacgatcattatcgagggtgctgggccagcagcccgtacaactagcacgacccgtattcctccatccacttttcgaagcgggcaacgtcatcggcagagacggacttcttggtgcgcagacgggcgtcctggaagtcctgcaaagtaatcggctggtcaacctcctcgcgtcggatttgcttaatctgatcgggagtgcgtccggaaatgaggcgccgcatggccatcatggaggcgtcccggcacacgttgcttatgtccgatcccgagtagccctgcagttcgtcgccgattattccggtgttcagactgggcgacaggcatacgtccttcaggcagagcttgaggagagccgatcgggtgccctctggagcataatattactattatttactgcaggaaaggaagtggctcgcacttaccgtttgggagaggaatatagattcgcttttcaaaacgtctccggaaagcctcatcgatgtcccacgggtgattggtggccgccagcaccatgatcaccttctcctcctgcatgcttgcgttgagtccgtccatttggatgagcagctcggccttgaaccgccgactggcctcgtgctccgagtcactgcccctggaggcgcatagggcgtctatctcgtcgatgaaaatggtgctgggcgcataaaatcgggccatctcgaacaggagacgcaccagcttctcgctctctcctcggtatttcgaggtcagggtcgaggaggacacgttgaagaaggtggttccacattctgtggccaccgccttggccagcatggttttgcctgttcccggcggaccgaccatcaacactccacgccacggccggcggattcccttgaagaactccggcatgattaccggaagcaccactgcttcctatttgggtaaaaaaaagatgtacatacatatgaagttagctacttttaatttaggtcttctgcacgcctctgaggtgcacttttatatttgtggacctcaattttaaacctattctagtcatagatgtcacagatatatatattttactagtatgggtgcatatcggaagttccgattcagaacataaagctcacctggagtattgtcttggcctcattgagcccagccacatcggtccacttgatgcacggatggcgctgcagaatgtccttctccagggtgtccaccagatgaacctcgtagcccaagggcgagaagtgcttggccttggtcttcggtgagcatttgggcgtgttgtggctggtggctagggactgggcgtgcgagttgtcttccagggatgtggtggcgtcttggtcatccgagttggagttttcgtccagcgagttcttcttaaccggcttgtgcttcaagttaagctgggtgtttgtgctgagcttcctggcccgcaggcgctccacggatcggctcttccgcaaggcggcggtcatggcggatgcccttgctggtcgccccaggcgcattgtgcccatgctggcggcgggtgtaggtgctcctgcgcccgccaatcccacgttcccagcacttccgtggtggctctggctgaggctgctgctgttcgcattgctgttgatggagggtaaagtgggctgcagctcgggatcccgccgacgcagggaggacacccaccgattatcctgctgctgcgacggaaatggcatttgggccgtctgactggctcgcggttgtggtgccacttctgcggcggaaactgcattttaatgattatataggaaaccccgccacccggagcaccaaccttgcgtgggtagccgctgcttgctgcgcaacggaacacttccgccaatgcccaatcccccaggtgcattagagcccaggttgttgacgggccggtggcgctctgctgtcgaggagtggccgccttccgagctcttcttcaagctggcgttccgggaaggtcgactggtggccgtgatcttcgtgaagccaaatggggatagcgagtcgaggatcagggagtccatcatccgggccatgtgcgacaggcttgtcggaggtgtggaagagctggagaaggaaagggtattcattgattgctcttacccagtagaagatctaaatattataacaggaaagaggaatcgataataggccttgtcctataataacataatatgatcaatgccattagtgccaaacccaaatattttcgtatttaattaggtattttgagatgtatctttaagatgttattgtcaattctatctttatcttttgggagaaagttttgggaaactatactatacgaatctaatgaagccacttaaggattcccaaactatctcattacaactccttatctgtaaaaaacataacatataactgataaggatataattaagagccaccaaacaacgcaaaaccaaaacccatgggctcatttttaaaactcatagctaactacccataactattaggtggctccatggagctgccattcaacttggccatgtcgcaaaggtcatttgctttatcagccgcggacaagtggctcgcgtgtcctggtgtgtgcacacacatataccggttggaatcctcgtgtctagccgcctaatattagttagcccttgcggaggaccctcccatcctgccctgtcctaccctaccctgccactccgcagacaatgctcgggaatttccgggaaacgaagagttagtggcgcctcccatgggggcgcctattcaaaccgcaggtggggtcaataaactcgttggctcctggccaggttattgacgtgtcggcgacaattgttaacttttgtattcgcatttgaattgtattttcgacgtgttttcgactttgcatgcgtcatctggaggcattaaaggctttgagagcattccggcggcaacaatgtaaatctcgatctgcaaagtgggccgcaatatattttacgcctggctaattaagttggcagcagcacagccataattcccgaccatattgcctgactcctggcacattcgcttggtatttatattgcgggctgtactcgttcgaatttgggttaatgtttccttcatgtgctcgcccacgatttctttgattctcggctcctgattcctgatgggaatgattagtggagcggttaactaggccactgcctatttgttcccattactatgcacaaatcaatgggccataatctaggaattacttgcatttgaactgagcaattgattgattggcaaagtgttacaaggccggattgagcgtggaaaaaccccggcatgggaaagtccagtgatggcggatttccttggactcgtagttatgatgggccacttgaaatcgtgtcaccaaggggtgcttatgctaatcccattggcacaacacaagacatttcgtactatgcaaattacagcaaaatgccaattatgactggcagaaatatactcgcgaaaggaaactggatggggtcaagaaggtacccggtggctttcttgtatgcaacaaaggaaatactttgggttgatagttgaccaaccaacgagctagttaccaactgccaggtcaaggaattcaaatgcggaagtaatccaatttatagtggatttcttgtgcccacagatctctactagctcttaccattggtgcagatcccagagcgagtggtatggagtgtgccggtaggtgggaacgaagggtaccgccacctcgtactcaacctggacgttgggcggcgactggggccgcgtggccaaggcgtttgaacgccccaggacgggattggagctggtcagcgatcgctggcgcatgaaggaatgttgcgccgccgccgcctgctgctgctgctgattgtagagactcgaattgttgttgagcaactgggccactccgccgctcggatccacggctgtctggcccatgccgaaccaattctgtgcactggtgttgaacatggcgctgtgccggcgtcacacagattaggacgagacacagacacttcactattaatttaaaaacacacgcggatatgttcgggcggaaactttgctacctgacagtctgcgcctggagccttcgattggctcgcactcggagttcgaaaacgcgacccgaccagccgactcgagggttgcagtccaactgaaactgaccgcttgactggacgacgcgtccacaacaaaccgaccaccactaccattccggtatggaacggaccggaccgggtagttttcccagttgcctggtgtgcgtccgtgtgaatgcggattgaggttaaaggaagtttcgcttgggcgctactttggggggcggtttcaatcatggtaaattacggggaaagagtatctcgacttgggggaaaataaagaaatcgccgatcggagctaggaaatgccatctttctaaatattgattgaaattcaaatatatggatttcagtttaatgggtttatgtttgttctgcttatatgctccttgtatatagctattgataggtaaaaaaaagaatatatacaatatataaataaatgaaatatataatatttctactaatgtctagttgcttatcgaagtttcctcattgtctaaaggacattcgtgcttctatgtaagcccacagcactctcaactcctcgggttacccaacgcgctggactgtggtcaatgcacgctagcttctggctcaagatttcatcgatttctggggaaagcaaggcgttcactcactcgcgtatgcccgactatttactcaaacggcagtggtttcccaataatctgccggcaatgtaatttaatggcaggcttgcatgcggccaaagaaagccggttcttgagttggcctcccccgaggacccagaaactatagcatacgtttgagagcaccgccattaggaggcttgaagtggttcgtccacatttcaatgtgcatgtaggcagaacccgataatccggaggtgagccacaagcgaaggccgtttcggatgcgcgcacacacatatagtatctgtatatgtatctaaaaatcagctgcagcgcgagataaaaatcgattgcggggcgaca

SEQ ID NO: 566 - DNA, 2336 bp, DROSOPHILA
agactgtcaggtagcaaagtttccgcccgaacatatccgcgtgtgtttttaaattaatagtgaagtgtctgtgtctcgtcctaatctgtgtgacgccggcacagcgccatgttcaacaccagtgcacagaattggttcggcatgggccagacagccgtggatccgagcggcggagtggcccagttgctcaacaacaattcgagtctctacaatcagcagcagcagcaggcggcggcggcgcaacattccttcatgcgccagcgatcgctgaccagctccaatcccgtcctggggcgttcaaacgccttggccacgcggccccagtcgccgcccaacgtccaggttgagtacgaggtggcggtacccttcgttcccacctaccggcacactccataccactcgctctgggatctgcaccaatgctcttccacacctccgacaagcctgtcgcacatggcccggatgatggactccctgatcctcgactcgctatccccatttggcttcacgaagatcacggccaccagtcgaccttcccggaacgccagcttgaagaagagctcggaaggcggccactcctcgacagcagagcgccaccggcccgtcaacaacctgggctctaatgcacctgggggattgggcattggcggaagtgttccgttgcgcagcaagcagcggctacccacgcaagaagtggcaccacaaccgcgagccagtcagacggcccaaatgccatttccgtcgcagcagcaggataatcggtgggtgtcctccctgcgtcggcgggatcccgagctgcagcccactttaccctccatcaacagcaatgcgaacagcagcagcctcagccagagccaccacggaagtgctgggaacgtgggattggcgggcgcaggagcacctacacccgccgccagcatgggcacaatgcgcctggggcgaccagcaagggcatccgccatgaccgccgccttgcggaagagccgatccgtggagcgcctgcgggccaggaagctcagcacaaacacccagcttaacttgaagcacaagccggttaagaagaactcgctggacgaaaactccaactcggatgaccaagacgccaccacatccctggaagacaactcgcacgcccagtccctagccaccagccacaacacgcccaaatgctcaccgaagaccaaggccaagcacttctcgcccttgggctacgaggttcatctggtggacaccctggagaaggacattctgcagcgccatccgtgcatcaagtggaccgatgtggctgggctcaatgaggccaagacaatactccaggaagcagtggtgcttccggtaatcatgccggagttcttcaagggaatccgccggccgtggcgtggagtgttgatggtcggtccgccgggaacaggcaaaaccatgctggccaaggcggtggccacagaatgtggaaccaccttcttcaacgtgtcctcctcgaccctgacctcgaaataccgaggagagagcgagaagctggtgcgtctcctgttcgagatggcccgattttatgcgcccagcaccattttcatcgacgagatagacgccctatgcgcctccaggggcagtgactcggagcacgaggccagtcggcggttcaaggccgagctgctcatccaaatggacggactcaacgcaagcatgcaggaggagaaggtgatcatggtgctggcggccaccaatcacccgtgggacatcgatgaggctttccggagacgttttgaaaagcgaatctatattcctctcccaaacgagggcacccgatcggctctcctcaagctctgcctgaaggacgtatgcctgtcgcccagtctgaacaccggaataatcggcgacgaactgcagggctactcgggatcggacataagcaacgtgtgccgggacgcctccatgatggccatgcggcgcctcatttccggacgcactcccgatcagattaagcaaatccgacgcgaggaggttgaccagccgattactttgcaggacttccaggacgcccgtctgcgcaccaagaagtccgtctctgccgatgacgttgcccgcttcgaaaagtggatggaggaatacgggtcgtgctagttgtacgggctgctggcccagcaccctcgataatgatcgtatcccatgtgtacttcccgatcacaattatttgtaacctgtataaatcgtactcgttagccgtaatgttttgttttatatacgcttaattgctcaagtgccccacgcccagcattgctcctctatgtacgtgcacacggtaatctgatatcttataaatacataatatatatatatat

SEQ ID NO: 567 - protein, 669 aa, DROSOPHILA
MFNTSAQNWFGMGQTAVDPSGGVAQLLNNNSSLYNQQQQQAAAAQHSFMRQRSLTSSNPVLGRSNALATRPQSPPNVQVEYEVAVPFVPTYRHTPYHSLWDLHQCSSTPPTSLSHMARMMDSLILDSLSPFGFTKITATSRPSRNASLKKSSEGGHSSTAERHRPVNNLGSNAPGGLGIGGSVPLRSKQRLPTQEVAPQPRASQTAQMPFPSQQQDNRWVSSLRRRDPELQPTLPSINSNANSSSLSQSHHGSAGNVGLAGAGAPTPAASMGTMRLGRPARASAMTAALRKSRSVERLRARKLSTNTQLNLKHKPVKKNSLDENSNSDDQDATTSLEDNSHAQSLATSHNTPKCSPKTKAKHFSPLGYEVHLVDTLEKDILQRHPCIKWTDVAGLNEAKTILQEAVVLPVIMPEFFKGIRRPWRGVLMVGPPGTGKTMLAKAVATECGTTFFNVSSSTLTSKYRGESEKLVRLLFEMARFYAPSTIFIDEIDALCASRGSDSEHEASRRFKAELLIQMDGLNASMQEEKVIMVLAATNHPWDIDEAFRRRFEKRIYIPLPNEGTRSALLKLCLKDVCLSPSLNTGIIGDELQGYSGSDISNVCRDASMMAMRRLISGRTPDQIKQIRREEVDQPITLQDFQDARLRTKKSVSADDVARFEKWMEEYGSC

SEQ ID NO: 568 - DNA, 4786 bp, DROSOPHILA
cttatcgagtgagctttcccgcattcgagaatcgattcgtttccagatgattatgtagattattatgccgaagcagtattttacggtttgttctaattttgggactcttatgccgcaattttttttagcgataaattgaaatggaattcggaaaccataatcagaaaaacgatttattgactgagatagaactattcaaacaaataacgattatcgacactccaaaaaccataagataaagccggtcaaatgccaatctaggttaaagctccgaagctttcgacccattcatgcattccattcattcagaaccgaaagcaggcgcatttcattgagagactcgtcgctgcgcaaatacattctcaattaagttgtaaacattgtgagatctttttcattgcgtattgagcacatgcacttccgcttatcattaaagatttgaaccgaatttgggtcaccaaaaagctgtccgaactgcggttctagttatttatgacgatgtagttgtacgcattgtactgaagtttgttgttatcaaacgtttgcttttcgagtttaaaattaattttgaatctgctccgtttatcagtcaagtaaaatgtcaacttatctacatgtaaattttacagaagcacatggcagtgatgccagatcatataagattattatcttggggatagaatgcgttacaaaattacattgcattatgaatttggcgttattctcttatcatatgtttaattaattacgatttgtgattttatacgctttataatgaaaactatttttttaccacccctattcgcgtctccagaatgttttcacatttaaacaccgatatgggcgcacttcttgttttaagttgttcatatcgatagacagccaagaaatttatcgagacgaatcccactgtgccaggtagctgaaaaatcggcgaatatggcagcgtcgaacgagccatgtcgcgtggcaacgctaccactttgtttacttttattcggagagcgaagtgaagagcacctggaaattgcattaatgggcatggaatcgggagccaaaggtcagcggcgataaggatgcacttcgaggtgaccccggccgtccgtcgaccaagtcagcctgctgctagcacttgaattaaagtgacaggagagctccgagcccaccaaaccaccgaaactgataagaagtgcgcgttcggagaacggagaacaagttaaataggctccgtggagagccaccagttcagttggccagcgaccgcagatcaaaacagacgtacgacaacacagatgaatgaggaagagtgcaagaaacgggttagcacacgatagcactcaacggtcagcgatctttggcatcttcatctacaccatcatctgcaatctcgtcggagatcagaggcgttgtttttaggcatcggaatccgaggcggaatcgtttcaagggcacgtctcttgcgtctagctaaactcaatctgattcactgagcggggattctctaccataatcacctgtaaacaggtgagttacccgtttttcgccaagcagacggctatttcgcacgcctgccgaacgattttggtgacgtcaataagaactgggcactcgtgtggcctaatttcgtgtgttttcccctttcgccacttaggatggccccacccacggtcctggtcaccggaggagccggctacattggctcccacacggttctggagatgctcaatgcgggctacaacgtcatctgcgtggacaacctgtgcaacgcctacagcagcggggccaaactgccggaggccctcagccgggtgcaggaaatcaccggcaagaaggtcaacttctatagagtggacatcacggacagggagcaggtgcgctccgtcttccaggaggtgagcacacgtagcattacatagctggcacgtcagcagttcggaggttctggggcaaatgtgccaactggataccattcaatcaagcttatctggcatgcgcgctatcagcttttttctcgttcgcgcttgttttgttgtttgctcaagtggcggggcacttccgacgaaccgccgtgctgatcgaccctgaatgaaagacccacttggcgaggtcgcattcgagttggtgcgctggcatccacatccacaacagctcccgggcacgtacactacaatctgggtggtcgggagcccagattgcagtgtttacatccattgataaccaagagaattcgctaattcgagcaggttatcacgcattcttgagatgttcgatcaaaggggttttttttgttaaccaccgtcgtttataaaaaacaaagcgtttatttacatgtaatgaacattataaaaatgcacgttgttgcccaaatagccatgaaatatcttaagctgatactttttcatatttttattcaaccataaatgcacacagctttgtgcttacgcgcactgattactgaatagattgagcagtatttgttgtggtggaattttttacctaatcagcactatcaacagctatttaaagaacacataattgtttgtcaataaatcaccttgaaatcaatgtgatactttcatttaattgctattaaattctgcactttacgtttataagaggcaatatccttgtgcttactgaagagctggttattacagatttggatttcccaaactaataggtacatatatttacatccctttcagcacaaaatcgacatggtggcccactttgccgccctgaaggccgtgggtgagtcctgccgcatacctttgcagtactaccacaacaacatgaccggcaccaatgtcctgctggaggcgatggccgacaacaatgtcttcaagttcgtgtacagctccagcgccaccgtatacggtgagccaaagttcctgcccgtgaccgaggagcatcccacgggcaactgtacatcgccctacggcaagactaaatatttcaccgaggagattctcaaggatctgtgcaagtctgacaaggtaggaggatgtcatttcttgatgtccataagttctgtactaaagaattcgctctttcagcgttgggcagtggtttcgctgcggtacttcaacccggtgggtgcccacatcagtggtcggattggcgaggatccgaacggcgagcccaacaacctgatgccctacatcgcacaggtggccgtgggtcgacgtcccagcctgagtgtctacggcagcgactttcccacgcacgacggcaccggcgtgcgcgattacatccacatcgtggacctggccgagggacacgtaaaggcgttggacaagctgcgcaacatcgcggagacgggctttttcgcctacaatttgggcaccggcgtgggctactcggtgctggacatggtgaaggcgtttgagaaggcctccggcaagaaggtcaactacactctggtggaccgacggtccggagatgtggccacttgctatgcggacgccacgttggcggataagaagctgggctggaaggccgagcgtggcatcgacaagatgtgcgaggacacgtggcgctggcagagccagaacccaaacgggtatgccaacaagtagagctgtatatcgccacgttcctgccgctccgcaagttcctgagttactacgcctgataatggctcaggtagcaatttctatttgcctctagttgtgtatatttctttccaaatttcgtgtagtattcgctcacttcgatgtgtgcaagtgtgcgtatgtaatccaaagtactttgtaattaaaaaggcttttcgctgttgtcatgtaattttgtgaccgtcatttacgcgtttggtgaccgctggcatcattgacgcgtgccaattggcgcaatcacgtaattaaggtcaccgacaaggtggcactgggagattacacttggcattaggtaaaataaacacacaactgcatcaaccatttgtcagatcttaatcaaaaatggcataatcacattaagctgaccaaagttacaagaagacgtctaactcgcacatttatttagcaaacatttattcaaatgcaatataacattaaaaactcaattttaaacttaagtgatgcgccttcttcgcacatatctgcacagttaaagtcatttatcacaagtatgtactatgaatgtatgtttctttcaacaactctgcgttcggctgctgcttctgtttggttttggaatggtctgcacgtataaaagtacaaaattgtttatattcgagcctgttgtttctgggagtgtttgtttgtatcggtatttggcaatctgttttacacttaggagcttggcgattcgttcaacaagtgatggagaggcaaagaaatcgaattcaacaagaagcattactaggtgctacatttacgtctggctacatgtgtgtgcgatatgcatacgtaatgaattaatatgtataatatggtagttctaagtattcgcataggttgcaggaggcaaagagatccgtagcccagaggggcggtggaggggatagtttaaatgccgcttaaatactgctgtagtctgtggagaccctgctccgagcaccacttatgtggaggtcacgcccttgcgggccaccagcatgttgagtatcgggtttttccggatgtagctcacggcctttttgtgggtgaccatggtgaagtcgtagccgttgcactgcaggatcttgtcgtggatccgcagacctgctcgggcggcgggactgccctcgtgcacctcggtcacatagatgccctattttcaaaggggaaaacgtaacattgtaacattg

SEQ ID NO: 569 - DNA, 1786 bp, DROSOPHILA
gagagcgaagtgaagagcacctggaaattgcattaatgggcatggaatcgggagccaaaggtcagcggcgataaggatgcacttcgaggtgaccccggccgtccgtcgaccaagtcagcctgctgctagcacttgaattaaagtgacaggagagctccgagcccaccaaaccaccgaaactgataagaagtgcgcgttcggagaacggagaacaagttaaataggctccgtggagagccaccagttcagttggccagcgaccgcagatcaaaacagacgtacgacaacacagatgaatgaggaagagtgcaagaaacgggttagcacacgatagcactcaacggtcagcgatctttggcatcttcatctacaccatcatctgcaatctcgtcggagatcagaggcgttgtttttaggcatcggaatccgaggcggaatcgtttcaagggcacgtctcttgcgtctagctaaactcaatctgattcactgagcggggattctctaccataatcacctgtaaacaggatggccccacccacggtcctggtcaccggaggagccggctacattggctcccacacggttctggagatgctcaatgcgggctacaacgtcatctgcgtggacaacctgtgcaacgcctacagcagcggggccaaactgccggaggccctcagccgggtgcaggaaatcaccggcaagaaggtcaacttctatagagtggacatcacggacagggagcaggtgcgctccgtcttccaggagcacaaaatcgacatggtggcccactttgccgccctgaaggccgtgggtgagtcctgccgcatacctttgcagtactaccacaacaacatgaccggcaccaatgtcctgctggaggcgatggccgacaacaatgtcttcaagttcgtgtacagctccagcgccaccgtatacggtgagccaaagttcctgcccgtgaccgaggagcatcccacgggcaactgtacatcgccctacggcaagactaaatatttcaccgaggagattctcaaggatctgtgcaagtctgacaagcgttgggcagtggtttcgctgcggtacttcaacccggtgggtgcccacatcagtggtcggattggcgaggatccgaacggcgagcccaacaacctgatgccctacatcgcacaggtggccgtgggtcgacgtcccagcctgagtgtctacggcagcgactttcccacgcacgacggcaccggcgtgcgcgattacatccacatcgtggacctggccgagggacacgtaaaggcgttggacaagctgcgcaacatcgcggagacgggctttttcgcctacaatttgggcaccggcgtgggctactcggtgctggacatggtgaaggcgtttgagaaggcctccggcaagaaggtcaactacactctggtggaccgacggtccggagatgtggccacttgctatgcggacgccacgttggcggataagaagctgggctggaaggccgagcgtggcatcgacaagatgtgcgaggacacgtggcgctggcagagccagaacccaaacgggtatgccaacaagtagagctgtatatcgccacgttcctgccgctccgcaagttcctgagttactacgcctgataatggctcaggtagcaatttctatttgcctctagttgtgtatatttctttccaaatttcgtgtagtattcgctcacttcgatgtgtgcaagtgtgcgtatgtaatccaaagtactttgtaattaaaaaggcttttcgctgttgtcatgtaa

SEQ ID NO: 570 - protein, 350 aa, DROSOPHILA
MAPPTVLVTGGAGYIGSHTVLEMLNAGYNVICVDNLCNAYSSGAKLPEALSRVQEITGKKVNFYRVDITDREQVRSVFQEHKIDMVAHFAALKAVGESCRIPLQYYHNNMTGTNVLLEAMADNNVFKFVYSSSATVYGEPKFLPVTEEHPTGNCTSPYGKTKYFTEEILKDLCKSDKRWAVVSLRYFNPVGAHISGRIGEDPNGEPNNLMPYIAQVAVGRRPSLSVYGSDFPTHDGTGVRDYIHIVDLAEGHVKALDKLRNIAETGFFAYNLGTGVGYSVLDMVKAFEKASGKKVNYTLVDRRSGDVATCYADATLADKKLGWKAERGIDKMCEDTWRWQSQNPNGYANK

SEQ ID NO: 571 - DNA, 17794 bp, DROSOPHILA
cgtaaaaacgagaataaaaccgtgagcgggagcgggagcagcaagtgaattttttcacgctgggtggaaaaggcgcgcgaacgtgacggaacgccggaaagttgtggaacaggcgatgtgaatgaattgtggaacgcgtttgtgtagaaggccttacacttatgctaatgtggaacccagagtgcggatcaacgaacgatccgtgcgcgaagagagcgggaatagtttaaattccagaaaatgcacatttgtacacatacatacatacataattgccttggaagtttacgacagcgacgttgtccacaatttcattttatagatgggggcgtggcactgatgcatgatcttgatggaattatgtacctatgtatgtatgtatgtaaatgtaagcaagattcgttgcagtaacaacaaataagtggatgaaaacaagtgcgtcacttactcattaataaataaataattaatgggcggcgcattcgaaatgtaaaagaaaacgcaaatagcttgcccactcgcggcaataacggaaccgtgacttgcaaatcggtgaaatgaataggatatgcataactgttttttcgaaagacctgcaaataattcaagaaagttccagaaatacccaaatttaatagctatccaacattagggtgacaataacgtgtttcaacagatgcaatatatacgcaaaatcaaagaaaaacaaacaaaacccgttaaaaactaattatttaaaaaagaatacaaaaatataaatttaaagctaacttaataaaaaataacataattttcccattattcatgtgtcgattaaaactcaaatgaaaattcttacacttctccgcactcttttttaccccataactctctatctctcttccagttctccgcgctcacgatttggtaactgtggcccaatgccgccgttcccagtttagcgcgctctccttgccttttctttcgccttttcgactcatttcgaatcggaaatttgacgggttcggtcgtaatcacggatacaaatttgacgccctgttggaaaaaccacaacgtccaattttccttttatcgcgccaaaaagaaatgcgagtaagacccgagtcttcgtgtatacgtataattaccatttgcaatcacaaaggttttgcaactgtcgccgggcggtgaaaactcaagtgaataaatatcgcaaagtgaagcaaataaaaaaatattacaaaaaccggtaaaacgaaatgaaactgaaatgagtgagggcagcaacttcaagtgacgaaagcaatccgtttaccgttgtctttgcctcttcatcctccccgagaacggcggagaacgcgaaaaatatcatgaaatgtaaaagctggtccaacaaaattaacaactacgttgtgcgcaaaataaagtctatcaaggtaaatagtgtcttaaaaaggtgcggtgtttggccctgatacatatatacttatatttatttaaattttgattaagtgaatatatcttatgaggcttatgagacttgttaaggtgttaaaaaataagtttatagcatagatatggggtaatgcgaaagtacaatttgttaaagttgtttttaattaaaataatttagtaaaactttttttacaaactacaagtaatgctttcgagaaaatacctcccatcaattttatcgttaaattacacaaaattgttcttggaaaaaaaaattgaattggttgtacaaatttttgtttacaaaatacaaaagctgcaaaataatttattgacatgaaataatgaaatactcataaagctgtgaaatttaatgtttgagctatatagcaaaaaaaaaaagtatttttactttttgcaattcttgttaccaataaatttaaatatttccgtacatttcatctaaaaaatttccattgacaacacatgctggtataatatataaagatcaaagccataaactcctcactaagtgggcaataaaataagataattcaacgactgtctgtataacaaccactttaaaagctatctagatggagttgattatgaatacattttcagatgcttatattactcgacataaataggcagtggatgtgtataattattttgcaggcacccgacaacgaaaataaaatgcataaaaaagtttaatgaagccgcaggggttgactaaatttatttaacaactgcagttcattgcctcgcaaattgcttgatactttaaaaacaacaacaaaaattcacagcaaaaaaacacaatgattccagctggtttctaaacaacaatttattgtggtttcttttacttttaattgctatctattagcagcaaccaataaatgaattatttattttattttctcttgcaagcagccaaaagtaaaattatgcccctctctctcccgatccgagttcatcactttgtcttcttttagctgtttttattttgcaaataacttgagtagtggatgggaaacaacgcaaaggcctttcacttgcatgtctgttgctcggtttgttgtcattaggtttactgttgttgttgcacacactcatccgcttacatacctcgtttatatacttatttacatttgaagttgccgtcgttggtatgttttactacgtatcagcttgtccgctttgagctgccccttcgcttttcaagcattttgttttgtccgctctgtttttcagctattccaattctcttccttcgttgccctgtgtatgtattcgtaatcgggttcggattcttgtttatttttacaccacttctctttctctttcgcacgaaaattcctcgaattcttttttatccatattttccttttccagcgggaaaaacgagtttttccagcagcgccgcattcttagcctgtcgccttgtctctttcccacttttatagtgtctccgcttcttgcttgtttacagttaggaatgcggtcgtctcccctctctctctctctctctctctctctctcactctctctcttcaaaaagagcgtgcgctctctttggccttatgtagttgtgtggatttcgactgaaacttgttttcgctttgccccgtcgtgtttatttataaaaagtcactggcaaacaattacagtgcaacaattacgctctcaaaagtggcgcgcaacttgttcgccttgtaaaaaaaattgtgacgccagcggcgacacgactgcgctgctttggccccatttaactgagagcgccgagggttagcttggcgggggcggcaacgccaaagagagttctctcgggtggcgctcgtctcccatcggtttcgctgctcgagccaaatgcttggaagtcaaagtctcgcccgaccatagtttcttattggatttcaaaccagtcgcttcgtgcacgcggcgttcgactacgcacacacacacacccatagcgcgctggcattgatatacatacacaggcaaatacacgacgccccaagttcgtgtgatgtagtgctgtagtggtgcgattaaataatactccacaaaaggccaaataaattacataaaatctaaatcggaataaaaataagtgtattctccctccgtgttgtgttcaaagtatttaaccgattgttttcattagtcaaattaatgtagtacaacgtatgagtgtgagccagttcctagaaaaataagagggcataaaaaataacagacacatacagcgtctcgtttcttataaattttcctactgcgtcggaattattgtcttgattattgttgtttctggcgaacttttgtgatttgtttcgagaaacatactgcggcggtttcataattgtgcaaatcaagggaagcacaatacgaatgttaagaatcaaagctaagaattaaataaaattaaagccgcacacatacatatacacaggcacgcgcagagtcgaaaaaatacgcgcgctcgctctgtacagtgtgtgcgtgtacgcggtggctggctcttcttcttcattcgtgtgcccattggaatttgtaccccaaatcgaaattacaacatagacaaacaaagagcgcccgtctgccccagcacctaaacgtaagtgtgtgcgtgcgagagtcgtttcatttgcattcttgtttagcgcactcccgctctctcttcgtgcgtttttcattcataagcacatttttactatttggaactgcaattttttacactaagcttgaggacagacaagaatactgtgaaaatccaatgtagatgaaagcaggccgtgctttttccatcaaagtaatcgcaaaaagtcgagattaacacaagttcaaaattattcgttaaattttagaacagaattttgaaatgaacataattcaggtactgtgtcatccacatataaagaacttttattctaaaaacaaataatcgtccgatcggtgtggtctgtccaataaaaattcacggcaaaggcgttggctaaaaatacaaagacaaacgagtcgggtaaaaaacaaataaatgataaaaaagactaaacaaatttcgcgaattttgtattactgtgaattgtatgcttggtgatgcacactgctatctagcagcattataaacttttcgaccaaaagctgttgaaacgcaacgataaagatattatagcaatcgcataagtatacatacatacgcagttcaacaaaatatttttgtcatatacaatagttcttgaattagtcttagaggctcgtttgccatttaataaatgacaagctagaaaaaacgctaatgatagcttaaccttttttttttttttcttttttgtgtggcctcgacaaaagatttataattttaatgtgtcaaaacaaaaatattttgtgtaaatttatcgtgtacggttttggtgtttctttcgtaataaactttggtcacataccttgagatagacatcgctacccaccgttttctggctatttctaatcaaacgtcctctttgtgctgcattttttgctttcaattggctgcattctgtagacgaaaatcttatttataaatataaattgaacatggacgcaggggcagaggcagtgtcaagacgcgcagaagggggatcggttgggtggctgcaaaacgttcatcggcgttggcctggcaataaaatagattaatttaaatgtcatttttgtctagacgccgcagacgacgccgacaacgagacgtcgagctactctgctctatgtttatagatcggttacatatatccccgacatccccatcccaattcgcatcccccacgtgatatagcggatcttcagttttttttttctctctgcattttctttttccccaatacacgcccactctaggtacactttctcgattcttcgaaatttttccacagcatctttatggacgtggatcttcttcatatcgccatttcaacgctcgtttcgatgcaaatgagcttttcgggttttgggtgacgtggaaatctggttaaacccatgtaatggacaacaatacaattcggaattttgggtatttcctgttttgttatcgctgtcagtgccattcaccaattgcttgactagtttcagccgctgacgcagatcgtcgtcttaattagcgtcgcagacgacaaaaatctcaataaagtgggtaggcaactttttttcaaatgtttcttttttttattttaatacgttaaagcggcagagttcaaatatctgaaaattgtatgtttattttgtttggattgactagtgggtgtatcacagcgcgctgttgaggtcatgttttaacatagaaagaaaagagacggctttttctgattgccaatagtgtcgcgggagctgcgggtataaaaagtaaaccaaccgcattccaatccgagtgacgcacattggacccctcatgacgacaattactattgagggcttcttgttggccgtagataatacacctgttttagggacttggggacggggcttcttggggccttcccagacaaaacgatcaatttttaaatcgatcggattttttcgaaatgaagcttcttttttgtcttttgttcgtctgggttcccacgtcagggtccaaatccccaactccaaagcctagttccattcgtatcttaatctttcgctcgttgttgctctaaaattagccaccagctgaaactttcattgacgcatttgctcaccttgtttttatggttttttgatttttattcacattttgagtttgtgtgtctgagttttatggtttgtccgttgcataattaataatctgggctgaaactgatttctttcttatctgagttgggcttttgccgaataatgtgatgtacaccgtacgctatagttgcgctcacttgatttacttatgtggtcatcactttagcctgtgggctgctgctgattttgtagctaaaggcttccctcgagcttttaattccttaagaaatcacgccacaaaatttatttttcgctaatggtaaactggcgaataaagaaacacaaacgaaccaataaacgagaagcgaacgaaaacaaagccaaagtccagcagcataaacttctaatagaaatgtaaacaggtggcaatgaactttattatatttttatgctccaagtccttgaacccgccaaaatcaaagtcacacaaagtaaaacgcaaagcaaaaacaacacggcaatgaacttgacgtcaatggcggaccattgggccgcctgttgtcgttctgccttttgtggacctgttcttgagttccgctttggagcatcggcttcgaggctttgcggttgttcagcagaaaattagtttatagcatgtcaaatttctcgtttaatataagtctggaaaaatcatgaaaagttagtgagtttcagaggaagttacgaccatttggaattcaagcagtactgagcaaaatatccaaacatttaatcgaaacaagaaggtggaggcaaattatattttatattaaattaaatattgttttaatcgcaaatactttgcatatatttttccagatcaacggtacacagcaacagctccaattgccaggcagcggcgctagcggaatcgcagcggcagccgtaatcacggtagcatcggattgcggcgaaaactgcagcagtaacggcaccgagcatcagcagcacttcaacattgctaccaccacagcaacttcggcgacagaggcaacaatgccggctatggccaaggagaaagcatcagcaacagtgtccttgggcgagtcgaatttcagagatatcaacctaaaagacttggccgtggtcgtcgaagcggcatcgcggctgcaccaccagcaaaacgtatgcggctgcggagcggtatcgtctactgagaacaacaacaacagtcgctacggcagcagcaagtatctgacaaacggtaagcttaattctgagttactcaaatagagtatgtttcaagttgttcttaaaacactgaacattgtccgtttgcaacatgtttttgcttcgacgctaacacaatctctgcttttctctggcaggccacacgtcgcctttggcggcagcggttgctagcaacagttcgtcggtggccacgacaccgcattgcagaatgttgcacaactgcagtctgcagcagtaccagaatgacataaggcagcagacggagatattggacatgttgcggcagcagcatcagcagggctaccagtcgcagcaacagcaacaacagccgcagcagcagcaggaacaacagcagcagcaggagcaatcgcagcagcagcaacagctacagaatcctgcgcccaggaggtctccgaatgatttcattttcggtcgttacataggcgagggcagctatagcatagtttatctggccgtggatatacactctcgccgcgagtatgcaagtaagtcctttttagttttcagtgggtacgataactagttagtaggtcggcgcatcattcgaccgatgcccgcccacggtatttcaacggcacttgtatggcctctgcttggcgccagcgcgagaatgcggtcgcaatgtagacgcggcgcttttgttgccactccgcttagtttgtcacctgcatcgcttattttcaatattgggatgagccccaatacaaacgcgggccgctgcgtcttcggcgtctttccttgggagtgtttgcacgattatctcatattcaaactggtcaacatgggcatacgatttcttgcgctccttgctttcaaacagcattttctacctgctgggcacaaaatgaggaaaaattttggggacgctcacgtgacccttttgttattggtaatttcatcagtcagtctatcaaacttgctcgaaaacgacacgggctgttatcagagtgataagccaaatttcgttctgtagctccttgcttttgttttgcttgtttatcgattaaagccaaagctgacgttggcgactatctggcgtcgggctcgcgcgcaccatcagctgtttagtttttttaatgcaatttaaattaacggcaaataaaccagtctgaaaacgagctgaaaagcagcttttaggtgttcactagatttctagagccattgttttaaaaggctatgcattgccacacaccactagagtgcatttatactgacatatttttccaccttgtgtttatttgtgctaagccaatttgcttaaagattttcagttgtgcttttcagtgggcgtgtacgccgtgagtggcggaataattttgcctcgccagcagctaatcaataccgtcacaagaggagggaggcacgtgttgcataaatgcaaatgcaaacacaatgacgcacacaagcacgcacagaacaatgggagctgagaaggagcacaacggcacgttgtcagcagaacgcatttgcagtgaggggcgaagactttgggggcatttggtaaaactaaataattggaatttcttttgttgaaaaaaaaaattccgatgcgatgcccctgcctaaagctgttattactgctctggccgctttaattgcatgtaaagatgaaggcaataataacaaagtctagttatgtatgtatttaaaaataggaagcgcactcacacaagtcgtaaacagtttccccaaggcgtgtcgctccgttaaattaataaacatattattcatacttttgacattgaatccgatgcagctggtgcactaaatattggcaaactatggttgtgcaatcgggagcagagtcgacgcttgtttgaaggtcagtgttcgtttttcggcaggtttgtgtgtagttgccctcaacctaatgggtttcatagtcagcaacatttcctccaaccacgtacacatcgcagcacccactggtgcagacgcctcccacgcacgagaaatgaacacgcacgcaaattcacgatgaacgcagcagttttcgttttcatgcgccccatctctttcttgcctacccactttaccggcgtcattgttgttgttttccctgttcgatgacgacaacggcgtctatttgacgccatacgaatttcagtttaggcttttcacatttcctgcgcagctatgtatgtatttcaccatctttggcaacaacatatgccacattcttggggttccttcattttccgctcgcttacctgtatttcgaatttttagattcttgcgatggaagattttaacaatgcgtgctcgtgcagataatcctgatttgagcaagggataaggagaggcggagggagagtcaacagcagctgttggtttcctgagttgcttacacttaccatgcagtcgtgtacagttatgtaagctagttttagtcgggaaagctgagaacttccaaaatactggtctgctagtcggatatatgtactatataaacattttcaaagtactccactttctccacctctgtttttgaccattgaacttgtacgcgcaatccttgcctcgaacccgtttgcttccatatcgggcaacgttcggatttaccatcaagtttttcatctcctcgactccatattctttattgggggttgctgtctggtactttcttagcagtcacctatgttccagctccactgcgttatttttaattacacgtttatttttggacagcagctggttctgcgcagccgcagctgcctgaggccgggggtattcaactgaaatagtcacttgcttggctgcctagggggttctgttttggctccgtaacgagatattggatcggagaactgggacgttcaacccatgactcgactcctgtcggtaaaatcctttccagcttactatcaggcttattcataatattctgtcttacaccttgccttatctttcttttttatgtggttgcgacatctgtcgtcgtcggtagaaggtaaaggggtttgtgtggtaaggtgtctcctgcacgtgtcaaggacatttggtgggctattggtccgcccgacgctttagggccaaaattaaatagctttttttattgcactcgcacacactcgcttttcgttgtttctcgtcggtataccgaaaaatcctcccaaagggtcaatacacttttgttagcctggagcaagagaagcatcacacaataataataataaaaaatttgcaagagtacacataataagccaactcgaaaactccgcacccagattactgtgaaagctgctaaattaaaacgcggcgtgggagttttaccatgtcgatcggtgaggtgcacttagggaatgacgagagtattatgctaactgtaggtgagttctttaagaatggcgagtagtagcccagtcatagaacaccaaagcaagagacaaccgtatttgcaggctctaagctctctgtcccactatcgagtcctcgtagtctattttttttttatactttcatccacttctttttaaggactacagaagttgagcttccgcattttggcgggcgctttcccatcctcaaaggtaaaaatcgtgttccgtcttttgaaaagccggattttagacgttgtcttccagtagcaaaaacaacgtgcaaccacgagaaggttgctcaatctttattttgatttatttatagaatatgtattcgtgtcctgctcacgcgcggcactgctttatcgacgagttcacactagctttctggtcggtgtagtcaatctgtgtagctctatctcgctctgtcattctaaaactcgttggattgcattccttgcagcaacaagttgcagtcttggtattttcattgttcgccttgtttttgatttctgcattttatttgtgacttgattaaccagcctatgatacgatttttgtgctatatgtatattagagttgttgtggccaaaataaggcagttgaaaatttggcactgtgaccaaaaacccaaaacaaggaggatgatggtaaaatgttaaaaaacaagtacttctgatttagcgggataaaccgaggtggcaactctaagacctcaagagcaagcttcgggcaaatatttatgcttagacggcgaattgggacgttttttttttttactgctttgcagctgtttgttgggtttttacttatgtgtttactttcggtgatgtttgtgttgttgttgcacatgctacacggcagcggaaaagagaaacggagaacggcagcaagttcaaggctaagattatcaggaggtcaataaacctaaccaatcgggaaaaaacacagaatatcagagtagagccgcaagtgaattaataatgtgactttttttaaattaaggtgaagaaaaaggccaggcatgcgaaagcatccagaaaaaagaaggtgaaataggtaatgtgtttattgcataggatcggaatgataatcatcgtttttttgttacattttgctgcgcaacaaatttttgaaggtcaattctgtttttacgcacccatttgtgctgctctatcgcttgggaaatttaaaacgcgtaaaaaacattttcgttcggttctttttgatttctcgattattgattgttgttgctaccgctgtgctgtgttaatcttttaattgctgtattttgtttttcttctttgtgtttattttgttgctactcgaccgacgacttatcgcccccgatgttttttagacaggattccgattcaatttcgtattctattggatttttccctgttctgtttgccctcttttgccgcgaatagttgttttgatcttgatagagggacctccaaaaaataaatgcaaatttatcttgaactttatttttggcaatagacttataatagtatgaaaagttgacagatatggttggggctaatttattatttttagcattattttcaacagatttgtgattttccgttgcgattgtcagccaaaggctggctattcgtgattggaaaataaaataagggcgggcagaaacaaaagggaaactactgataagcggtcaaaactctctcacaatcattataaccgttaaccccgcacgggagggtgtgggatgcaagtttgaaacaccgtttcatacggcccaactgtgtagttcctcttgcgcctttggatctctcactctccgtctctcccactaactctccctctttactctctctccttccctctctctcttttcgcgaattccagttcaataaccagttttaaatttatttagctctgaacgagatggagttcataagttctgtgcttgctgtggttttctgggggaccggaaagcggaaaaggggcggaagtcaaaaacaagtttctctaagggcgctcgctttcatttgtctcgctgttaattaaacaatttgatctgagttctgacatcaaaattccactctcgtctctttattgtttcaccgtctttctttcataatagaagtctgtccgcactaaaacctttctatttcaacaggtcataaaagggtcgcaagaaatttctgattggaccacaaaaatttagggggaagtccatcagactgaaaatttggtcgcattttgccaaaaaaaaaaaaaaaaatgtgtgctgctagctggtttgtgtgctgttttattattctcacgcgttcactttgtgtgcttatacctacatatatagcatttttaaattcaattatttaatcacttgcattggtatacgtatatctatgcctttgcagttgccaagagctgtttccgcaagcaaaatgtggtttgcccgcaactctgacttaccgatagttgcctgcactaagtaaaaatattgtggatactaggttctagaaacatgaattcttcaattaaatatgtatgtaatttcatctacacttgtagataccatattaactccaatctgaccctatcgttttcgatcttctccttgcagttaaagtatgcgagaagcggctgatcctgcgcgaacggaagcaggactacatcaagcgtgaacgcgaggtgatgcaccagatgaccaacgttcccggcttcgtaaacctgtcgtgcaccttccaggaccagcgttctctttactttgtgatgacgtacgcgcgaaagggcgacatgttgccatacatcaaccgcgtgggtagctttgacgtggcctgcacgcgccactacgctgccgagcttctgctggcctgcgagcacatgcaccgccgtaatgtggtgcaccgcgacctcaagcccgagaacatcctgctcgacgaggacatgcacacgctaatcgccgacttcggttccgccaaggtgatgacagcccacgaaagggctctggccacggagcactgttcggagcagcggcgcagcaactccgatgaagacgatgaagacagcgaccgcctggaaaacgaagacgaagacttctacgatcgcgattcggaggagttggacgacggcgacgacgaacagcagcaggaagagatggactccccacgccatcgtcaaaggcgttacaaccgtcaccgaaaggcaagctttgtgggcactgcccagtacgtttcaccggaagtgctccaaaatggacctataaccccggcggcggacctgtgggcactgggatgtatagtttatcagatgatcgccggcctaccgccattccgtggcagcaacgattatgtcatttttaaagagattcttgactgcgccgtggacttcccgcaaggctttgataaggacgccgaggacctggtgcgcaagctgctccgtgtcgatccgcgagaccgcctgggtgctcaggacgagtttggatattacgaatccattcgggcgcacccattcttcgccggcattgactggcagacgctccgtcaacaaacccctccccccatctacccatacttaccgggcgtaagtcaggatgaggacttcaggtccagctatactgtgcccggggatttggagcctggccttgacgaacggcagatatcgcgactgcttagtgcagaattaggcgttggcagcagcgtggccatgcccgtcaagcgatcgaccgcaaagagtaagtgtccacgtggtgccccagaaaaatacgttggctaatgaatgtattgtttttcttcagactctttcgacctgaacgatgccgagaagctgcagcgtctcgagcaacaaaagactgacaagtggcacgtttttgccgacggcgaagtgatcctcaagaaggggtttgtcaacaagcgcaagggtctgtttgcccgcaagcgaatgctccttctgaccacgggaccgcgactcatctatatcgatcccgtgcagatgatcaaaaaaggagaaattccgtggagcccagatctccgagcggagtacaaaaacttcaaaattttttttgtccatacggtaagtgtttacctatggtgggataaggatgcacgaggcgcaactcggaaaaccgagaaagcataagtttgttgaaccgatgacatcacagcttatagttcgtagccagtcacacgcctactgaaaagcaatttgagcgttagtttatgtcccgggcacgtgttggctatgaaagcaaattaaatgcggcattgaaaactgcacacgcaaggcagataaaaactcaaacttgtttggtgaatgggtttaaaattagcgttgcgctcaactaattttactcttttggtttcattgcagccaaatcgaacctattacctggatgatcccgaaggctatgctatccactggtcggaagctattgagaacatgcgcaagttggcctacggagatccctcctccacatctgcagtgtcctgctccagcggcagcagtaatagcctggctgtcatctcaaattcatccgccgcctcctcaagcaattcgcccacggtgaaacgcagttcccccgtaaacgctcctcaagcttcgacggcgtctgacaaccggacattgggtagcaccagaacggggacgtcacctagcaagaagacggcgtctaagtaaacgtagtcctatttatagcaatgtgaaattaatttagttgaaatttagtgcaaacgaagcgatggcgtagaagagggcgggaatagaagtaagcttagaagtagaagtaagtgatgaaggggaaataatgatcgtgtctctagtgctaattagaaccaaatttctgttttccgatttgtattgtgcttagggcgaaaatataacactagaataaacttatctaaagtaaaatacatctataacgactaagtaaattcaatttaaaatttaaattaaatatttatatacagcatacataaatacaaatatattcgtatttagcgcgtagttagtcgcaattgaaatgaattacacacggaggcaaggtggcattgtaggcttaaattaaaagtaatttcgtgaagcaaactaaaatccgtatttaaatggtataatactaggaaattatctggaaactgtaatatacataatatgtgtatgtacgtcggagaaataatttttgtttctgttatcgtgggaagatcacatatatgttaatataaattttgtaaacagtgtaactatgtacagaactatgtgagctatatgcacacggcaaaaagaccctaagtcgtggggaaggagatgggaatgagccggaaaaccatcgatgtcacaaaatcggtgtttttccagcttcacgctcaactgtttaggtaattctaatatacagtttaacgctaattatcattatttatcattctcattatgcttttcgtttacctatttgccctataatgaaatgtataagacttgagctaccctaataaaagaacgaattttaaattatatttttattttgtaagggctaccactaaaaactcaacagtcgttcaaagattgtcaagattggcggtcgttgtctctccaactgactccaattgaatgtgtgtaaaacaagtcttatacaaagatatatgtaatagatgtaagacagactgcaaagtttcttgaaacaaattagttaaatgttgtaaatgtctaagttgctaccactgctactactagaacgcgcccatcccctcccatatttacctttaagctacagtaattaagtgatgagcagaggtgtagagtaaggagtcgaagttgaaagaaagcaaaaaatacattttgtacatacatatcgccgttggtcgatatacatctaaacataatttaattttttgttacttttaagtaaattatttttggcgacctaagtaaattaaaattaacgcaatatgcaacaacacacataagtatacaattaattaaattaaacgaaaattacgatttattaaacgatgtcatagaacggagagccactgatagtgagagaaatctgtaaaataaatatttaaacaaattatatattatctatatatgagtaccagaacaagaatgtcaaaaaagagaagcatgtaaaaataaaaaatatattacgagtaaaacaaaaaaagataatcgagcgaaaggaacgtatcattaacaggaaaaattaaagaaaaatacaaaaacatttcaaagtaacaaaattacgataaaatttgtttttattttggttcgtttggttattacaattggcaatatctaactgattgggtaataagtgcgcgtatcccagtatccaacgttgcaaaatgatacaacatttcaataggtttcaaaatctacgtaagatacacataaaacgacctgactactttgttctaccctacgcttgtgctgcagtacctaaaatcgaagaaagagtacagtgaacagggctaagatatagaaagacagctctatttctgcaatccaaaaagggcttgccctaattaaaataattgcaaatgcattgcgcttcaaatccagaagccttttttaccttttatagcctacaggaaaaaagaaaaaagaggagataacggaaagacccataaaatcgaaaagtgcataggtaaacctgtaggacgattagtggaatactaaaatcatcatatgttttaatcaataagtattccaattttaccaggggcaagtgtatgcgaattctttcagtacgagtatttaatatatttatttttatcataattgtataaaaacctgaagctccaaaataacttgatcattttgagaaaaatattaataaaaattatttttttgtttattttcttattatttagttacatataattttattttatgtttatgtttttataatttttattttattattcattatattataataaatagattcgttgaatagtattaatattggatttgaatgcagcgatgcgttttacgcatttcaaatccgaaactcgcttagatcacacgacgtaactttataagatatataaatcaaaaataactgttattttgaaagagaaaaaatgatgttgtttgaaataaaggaacaaaaaagcgaaaaacagaaa

SEQ ID NO: 572 - DNA, 4307 bp, DROSOPHILA
ggttcggtcgtaatcacggatacaaatttgacgccctgttggaaaaaccacaacgtccaattttccttttatcgcgccaaaaagaaatgcgagtaagacccgagtcttcgtgtatacgtataattaccatttgcaatcacaaaggttttgcaactgtcgccgggcggtgaaaactcaagtgaataaatatcgcaaagtgaagcaaataaaaaaatattacaaaaaccggtaaaacgaaatgaaactgaaatgagtgagggcagcaacttcaagtgacgaaagcaatccgtttaccgttgtctttgcctcttcatcctccccgagaacggcggagaacgcgaaaaatatcatgaaatgtaaaagctggtccaacaaaattaacaactacgttgtgcgcaaaataaagtctatcaagatcaacggtacacagcaacagctccaattgccaggcagcggcgctagcggaatcgcagcggcagccgtaatcacggtagcatcggattgcggcgaaaactgcagcagtaacggcaccgagcatcagcagcacttcaacattgctaccaccacagcaacttcggcgacagaggcaacaatgccggctatggccaaggagaaagcatcagcaacagtgtccttgggcgagtcgaatttcagagatatcaacctaaaagacttggccgtggtcgtcgaagcggcatcgcggctgcaccaccagcaaaacgtatgcggctgcggagcggtatcgtctactgagaacaacaacaacagtcgctacggcagcagcaagtatctgacaaacggccacacgtcgcctttggcggcagcggttgctagcaacagttcgtcggtggccacgacaccgcattgcagaatgttgcacaactgcagtctgcagcagtaccagaatgacataaggcagcagacggagatattggacatgttgcggcagcagcatcagcagggctaccagtcgcagcaacagcaacaacagccgcagcagcagcaggaacaacagcagcagcaggagcaatcgcagcagcagcaacagctacagaatcctgcgcccaggaggtctccgaatgatttcattttcggtcgttacataggcgagggcagctatagcatagtttatctggccgtggatatacactctcgccgcgagtatgcaattaaagtatgcgagaagcggctgatcctgcgcgaacggaagcaggactacatcaagcgtgaacgcgaggtgatgcaccagatgaccaacgttcccggcttcgtaaacctgtcgtgcaccttccaggaccagcgttctctttactttgtgatgacgtacgcgcgaaagggcgacatgttgccatacatcaaccgcgtgggtagctttgacgtggcctgcacgcgccactacgctgccgagcttctgctggcctgcgagcacatgcaccgccgtaatgtggtgcaccgcgacctcaagcccgagaacatcctgctcgacgaggacatgcacacgctaatcgccgacttcggttccgccaaggtgatgacagcccacgaaagggctctggccacggagcactgttcggagcagcggcgcagcaactccgatgaagacgatgaagacagcgaccgcctggaaaacgaagacgaagacttctacgatcgcgattcggaggagttggacgacggcgacgacgaacagcagcaggaagagatggactccccacgccatcgtcaaaggcgttacaaccgtcaccgaaaggcaagctttgtgggcactgcccagtacgtttcaccggaagtgctccaaaatggacctataaccccggcggcggacctgtgggcactgggatgtatagtttatcagatgatcgccggcctaccgccattccgtggcagcaacgattatgtcatttttaaagagattcttgactgcgccgtggacttcccgcaaggctttgataaggacgccgaggacctggtgcgcaagctgctccgtgtcgatccgcgagaccgcctgggtgctcaggacgagtttggatattacgaatccattcgggcgcacccattcttcgccggcattgactggcagacgctccgtcaacaaacccctccccccatctacccatacttaccgggcgtaagtcaggatgaggacttcaggtccagctatactgtgcccggggatttggagcctggccttgacgaacggcagatatcgcgactgcttagtgcagaattaggcgttggcagcagcgtggccatgcccgtcaagcgatcgaccgcaaagaactctttcgacctgaacgatgccgagaagctgcagcgtctcgagcaacaaaagactgacaagtggcacgtttttgccgacggcgaagtgatcctcaagaaggggtttgtcaacaagcgcaagggtctgtttgcccgcaagcgaatgctccttctgaccacgggaccgcgactcatctatatcgatcccgtgcagatgatcaaaaaaggagaaattccgtggagcccagatctccgagcggagtacaaaaacttcaaaattttttttgtccatacgccaaatcgaacctattacctggatgatcccgaaggctatgctatccactggtcggaagctattgagaacatgcgcaagttggcctacggagatccctcctccacatctgcagtgtcctgctccagcggcagcagtaatagcctggctgtcatctcaaattcatccgccgcctcctcaagcaattcgcccacggtgaaacgcagttcccccgtaaacgctcctcaagcttcgacggcgtctgacaaccggacattgggtagcaccagaacggggacgtcacctagcaagaagacggcgtctaagtaaacgtagtcctatttatagcaatgtgaaattaatttagttgaaatttagtgcaaacgaagcgatggcgtagaagagggcgggaatagaagtaagcttagaagtagaagtaagtgatgaaggggaaataatgatcgtgtctctagtgctaattagaaccaaatttctgttttccgatttgtattgtgcttagggcgaaaatataacactagaataaacttatctaaagtaaaatacatctataacgactaagtaaattcaatttaaaatttaaattaaatatttatatacagcatacataaatacaaatatattcgtatttagcgcgtagttagtcgcaattgaaatgaattacacacggaggcaaggtggcattgtaggcttaaattaaaagtaatttcgtgaagcaaactaaaatccgtatttaaatggtataatactaggaaattatctggaaactgtaatatacataatatgtgtatgtacgtcggagaaataatttttgtttctgttatcgtgggaagatcacatatatgttaatataaattttgtaaacagtgtaactatgtacagaactatgtgagctatatgcacacggcaaaaagaccctaagtcgtggggaaggagatgggaatgagccggaaaaccatcgatgtcacaaaatcggtgtttttccagcttcacgctcaactgtttaggtaattctaatatacagtttaacgctaattatcattatttatcattctcattatgcttttcgtttacctatttgccctataatgaaatgtataagacttgagctaccctaataaaagaacgaattttaaattatatttttattttgtaagggctaccactaaaaactcaacagtcgttcaaagattgtcaagattggcggtcgttgtctctccaactgactccaattgaatgtgtgtaaaacaagtcttatacaaagatatatgtaatagatgtaagacagactgcaaagtttcttgaaacaaattagttaaatgttgtaaatgtctaagttgctaccactgctactactagaacgcgcccatcccctcccatatttacctttaagctacagtaattaagtgatgagcagaggtgtagagtaaggagtcgaagttgaaagaaagcaaaaaatacattttgtacatacatatcgccgttggtcgatatacatctaaacataatttaattttttgttacttttaagtaaattatttttggcgacctaagtaaattaaaattaacgcaatatgcaacaacacacataagtatacaattaattaaattaaacgaaaattacgatttattaaacgatgtcatagaacggagagccactgatagtgagagaaatctgtaaaataaatatttaaacaaattatatattatctatatatgagtaccagaacaagaatgtcaaaaaagagaagcatgtaaa

SEQ ID NO: 573 - protein, 752 aa, DROSOPHILA; identical to SEQ ID NO: 138

SEQ ID NO: 574 - DNA, 3514 bp, DROSOPHILA
ttagttttcgtgtttacttcggtccgaaatggtgtgttggaaaattcggcatccgttcttcgcacaggcaatgtacaaatggaaaattaagagagcgggcggagcagggagaaaaggatgctgcggaaaagctttggctctccgccacagctttttctctctctgtctcagcttcctggctctccgtcgccaattgtaaacaattgcgcaatgctcgcctgctgttgctcctccactcgcctcgatgcacaaatggtcactaaaactggattgttgtggccaattcggcctgccagccgcattgcaacggcctgtgggggttgtgttggattgtattgctttgggcgaaggtccttatttggtggtgtttttcaagaaataaagcttgagaacttgtatttgcctctttaaagttatgataaatattgtagatgagcatataaacattaagtgacttaataggtatacttatcaaaatttgttttaaatcaaccgcaataaaatgctatgtttaacccactcagaagaacaaatatatatgcatctttattgatcgatttttaaaaaactacttaaaaattcgaataataaattacgatttaaaaaacatcattacattaaaattcaattctcagtttagtttggcgacatgcctgtcattacacagtattattgacgatcagaaattgaagaactttgctttaacactcaaattgcatttcaatccttatttatagtagtgtgtaaacagtgacagaaggttgtaaatagtttggggcagttctcaaacgttcagcacccggccagacgccttaaagcatggcactgtgcggttcgatgaataaaattcaaaattaacgtactggcaaaaatgaaacggtttcgaaatttgtagaaaagtgaactaattatcaactaggcgaggaagtaaccatccgtggacgcaaacataaactgatgtacgcatattttcatgtgtaaatatatatataaaacgtttctaacaaacacgaggcacgtcgaaatgtaagtgagcaaaaatgaagtgatctctaggttggttttcagtttttattccgactcggggaaatttggtggcttcagttgcttcttgtctttagttgacctcacaaggctgcgtatgtgtgtatatatgtatgtctatgtgtataggtgtacatgtgtatatggataagagtctatttaatcaatttgaaaacggtatcaactaactttcaactaacaataaccttaccgccgacgcttcgctcagtttcgaccatatgtttcccttcctgtatgactaagtgtgcgataccttaacagctgcataactttagtttaccatagtttcattacgcttttgtgcactagtgttttgagttagtttcaagtttccaaattatttacaactagccctgcattccggcgtttactagtttggcgagtatttagattactggaacttgcgcgtggcagttctggccttccaggccttgaccaggttgtaggcgaagtacagcgtaaatccgtgcacctggaagcccacaaagcagaaggcataccagaagacgccgtacggataaccctgtagaaaaaccgaggtttagtagggcggctcttgagggattaactggcccagccacttacgcgccacacaaagatgtctgtctcgtccagctccaccgacttgtccagcgtggcgaactcccacacgtccgagaagtagtaggcgaagcagtagaagagtggcaggatggcgaatagcagtatggccaccatatacttctgcatttcgcgcaccttgttgcccctggcggccgaaaggcccaggaaggaggtgagcaacgacgcggcccacacgtactcccaccacaggggcggtgggacctccagctcctcgatctccagcacaaagatatccaggtggtccagaatgtccgacgtcagcttggccagcatcacgaagaacagcagggcgtgaaagaagatgcagtacttcaacctggacttgttcagcaggctaaaagagcagagaaagtggtcgttcagtggcggatctgtgtgggtgagccccatattggggcgcacatgctgcccagctggcactttgcccacccgccccctacagcagcaagtgggtgggtgcagcagctccagggtgctccgccgccctggctggacgccacctgcgattcggctgcagtaggtgccgcctgcaggtggatctactgccacaggcgccccagtaattagataatttcgagtgtagctgagagctggcgatagcacgaagtgttattaacctaatttgatatgtgccagctacgcgctgcctgaactcgaagtcgttgccatcggtgcccgcgaccattggtccgccgcgcgttgccatttcgttgccttcgttcgtgggtcgtgtcgttcgctcacgtcgttgcttatttttaataaataattgcacaaaaaatagggctggcactagaatcgatgtgtgtgcgataccatcgctgccaccaaaaaactggcgcacatcgatacgctcctcgctaccatcgattactttcgcttgaaagcatagcaaataaccgttagaaagagaggggaaattccgctaagttttagaatgttcattttcagaaagtctgccatggaaactattaatacatctgcatggaaactgtttacaaaacattaattaaattaaataattagccttttaactgtattagcaacacgtgattagtcatattatttaattattttaacttattctattacagttattaaacagttattagttttaataaagtggcaatgtggtcgtggtgactagctccgcttagggaaattttaattgggaggatgacttcgctaggtgtgtaacctcgctaatgctgtgtagaataaatgtgttatacttacatacgtagaacttcagtttttctctagttagtttcggcagaatgtagatagatattcgaactagtcgcaaatgagaacgattttttaaaggtaatgctgagagtttagcattgctaatctgaaaagtgggctggtgaaaaataaaaccaaacctattcttaatggcattaatggcacttaatactttaattttcatatcttttttgcacgattttagaaaatgagggctggttttaatactccgattgaaatcttccatccatatgagaattatttctactaaaagtacaaacgctagactaaaatgaattgaattgcattccaattccaatatgtcttatagaccaaatggcagaactagtaagatttagtaatgattaatgattaatgaacgggtcgcgatgaaaaatattactcgtagattaaaaaagaagtattctagattcctttttcaacgaatatgtatcaggtgaaaggaagtgtttttcgagccaataaagcatatattggtaaggaacactagccgaatcgaactggccatgtccgtccgtatgcacgtcgagatctcaggaactacatatataagaga

SEQ ID NO: 575 - DNA, 1169 bp, DROSOPHILA
gcagcgatggtatcgcacacacatcgattctagtgccagccctattttttgtgcaattatttattaaaaataagcaacgacgtgagcgaacgacacgacccacgaacgaaggcaacgaaatggcaacgcgcggcggaccaatggtcgcgggcaccgatggcaacgacttcgagttcaggcagcgcgtagctggcacatatcaaattagcctgctgaacaagtccaggttgaagtactgcatcttctttcacgccctgctgttcttcgtgatgctggccaagctgacgtcggacattctggaccacctggatatctttgtgctggagatcgaggagctggaggtcccaccgcccctgtggtgggagtacgtgtgggccgcgtcgttgctcacctccttcctgggcctttcggccgccaggggcaacaaggtgcgcgaaatgcagaagtatatggtggccatactgctattcgccatcctgccactcttctactgcttcgcctactacttctcggacgtgtgggagttcgccacgctggacaagtcggtggagctggacgagacagacatctttgtgtggcgcggttatccgtacggcgtcttctggtatgccttctgctttgtgggcttccaggtgcacggatttacgctgtacttcgcctacaacctggtcaaggcctggaaggccagaactgccacgcgcaagttccagtaatctaaatactcgccaaactagtaaacgccggaatgcagggctagttgtaaataatttggaaacttgaaactaactcaaaacactagtgcacaaaagcgtaatgaaactatggtaaactaaagttatgcagctgttaaggtatcgcacacttagtcatacaggaagggaaacatatggtcgaaactgagcgaagcgtcggcggtaaggttattgttagttgaaagttagttgataccgttttcaaattgattaaatagactcttatccatatacacatgtacacctatacacatagacatacatatatacacacatacgcagccttgtgaggtcaactaaagacaagaagcaactgaagccaccaaatttccccgagtcggaataaaaactgaaaaccaacctagagatcacttcatttttgctcacttacatttcgacgtgcctcgtgtttgttag

SEQ ID NO: 576 - protein, 197 aa, DROSOPHILA
MATRGGPMVAGTDGNDFEFRQRVAGTYQISLLNKSRLKYCIFFHALLFFVMLAKLTSDILDHLDIFVLEIEELEVPPPLWWEYVWAASLLTSFLGLSAARGNKVREMQKYMVAILLFAILPLFYCFAYYFSDVWEFATLDKSVELDETDIFVWRGYPYGVFWYAFCFVGFQVHGFTLYFAYNLVKAWKARTATRKFQ

SEQ ID NO: 577 - DNA, 4330 bp, DROSOPHILA
gttgctggacgtgattatgaatgcgcggcatgacgatcacgatcccacaatgcaggccctgcggaaaagtgtccaggatgcggcgcccgtgacaattccccatcacccggtgaaggtcaaagcaccggcaccaccgcctccgactccgccagcccagcagtttaacggggtcttcttcatgaccggcatgaacacacctcagaagtatcccaagccagacatctcggctgccctgcaggccaggagagtcaccaagaacgtggagcgcctggaggcggccttcgcctcagcgcatccggaagccctcaacgaagcagccatcggaagggagaagtcacgcagcaatcagcagatatacttcaccagtaacctggcgatgaggatgcacgatcactctggcttcgccaattccagcggtgggcagattcagggtccaaccctccgcactcgatcccacacccaggggtccatgtcaaaggtcacggatctgccatccggcctctactaagcgatactccacaagatactcttagagattccagagactctccagctcctgtgcaatagcaacccactcctaggttacaacagcccatcagatcaccgtatttatagaacacttaatggtatttccatgcattataaacacgtttcttatgcaacatctcgagataactgcagcccagactaggttagttacggtggcagcttcaaccgggtatctagccagtaagatttagtatcgtagttcatgtctagcctaattgattattttccattgaataaagttcttaaactaaaatcaaacccttcttttggctaatggcagccgagtacataaatcggcaaatcaaatacttaatagtcaaggtaatacgttttcttgcctgctaatcacttatgagattagtcggatcttatcgctttacgctttaagtatttaaagtgttgaccagttggaagtgcatttggttagtctgcaactgatagcgctgccaaaatgagtggaagttctcccaattccataaggcctctgccgccgggtctgcaaaaagtggccatcgaagagctgaacgaagtgccaagtcgtgtggaatcggacattgctgctctgaaagaatggctacagaagcagccccatctctgcgcctgtctcgaggatcagttcctgcttagttttcttaggggatcgaagtttagtctggagaaggccaagcagaagattgatcgattctatagcctgcaagcggtcattccggaggttttcaacgatcagcgattggttgacaatgcccaggtgttggaaattattcgactggggtatgtaaatccactttgcgttctctaaactccaaatatttctatccctgcagagtgatcttgcgcattcccctcgatgaggaggatactggaccagccgtgactattattcgagctggctcctacgacatcaataaattcaagttccaggacatcatacgtgtgggctccatgttcggtgagatcatgatgctggaggatgacaatgcctccgtcagtggctacctggagatcatggacatgagtggagtgacgggtgcaaatctgtttgccctccaaccccaacttctcagcaaattctcggcctatgcggacgaggctatgccaacgcgtcagaagggaatccatttcatcaatgtgcccaaggcattcgagacgggttttaaatcactgcttggatggtttccgggaaaaatcaaggagagggtaggacagtgcagttctaggaatatgaatatctttacaactccctttcttttaggtttccgttagctccgatccggaagctattttcgagcgagttcctaagcactatcttcctgaggagtacggtggctcaaagggcaccatgaaggatatcaccgaccagatggaggcaaagctctgtagctatcgcagctactttgaggactgtcagcatttcggagcccatgacaagttgcgcgaggaagcctcagtgctgaacccagacgagagtcactttggcgtggatggctcttttcgccagttggtcatcgactgaatcggctaaaatacctgtatacttacttacctgggccataaacctaaaataaatgttttcgataagctcactcttcttggcgactacttcaatgtgtggctatcagctctcagtcgattcagccttatcgatttcgggtcgaatcgcaaaactaactgggtgaaaaatcaacactcgttcatcgaccgccaagaagagaggaacaagatgccggccatccgaccactgagtcccgagctccaaaagactgcgattgagaacctgaatgaggtgcctaataagttggatgacgacatcgccgccctgagggattggattaagcagcaaccccatttgaaagcccgcacagatgaccagttcttggtgaacttcctgcgcggctgcaagttcagtttggaaaggaccaagtcgaagatcgacaggttctacacactacgcaccaagtacccagagttttatttgggtcataatgtcgatgtggacaaagcactggagatattccgattggggtgagctggagagatgcaaatcccagaaatgttttgtctaacccacttcattaatctttctccagcaccatagttattctgccacgtcctctaaacgataatggcccgcgattggctctgctgcgcatggcctgctatgatcccagcaaatacaccctccaggaggtgaatcgagctgctggtctcatgcagcagattatgctcgacgaggacgatgtggccattgtgaatggtttaatatccattctggatctgtccaatgtcaccaccgggcacttcctgcagatgtcaccgtccttcgccaagaagatgaccgtttttcaggaggaggccctgcccctgcgaccgcagggaatccatttcattaatacgcccaacggatttgacaccatcttcaatatgatcaagcccatgatgtctaagaagcagcaaggacgcgtaagtaaccccaactgcaccaagcaaagttggaaggtaattgaagttctcttacaccgccagctctacgttcatggaagcaaatgggaggcactctacaatcagattcccaaacagtatttgccagtggaatacggaggggagaacggatcgattccggagctgctgcagcagtgggagcagcgtattctagcctaccggaattactgggaggaggagaagaactacggaaccgatgaaagcctccgagtgggtcagcctgttgacttcgagagtctttttggtctgcagggctccttccggcaattgaatgtggactgaagtgtcaagccctcctaaccctgctaaattgcttaaaatagtcttagctgcagctcttatctaaggtaacaaaggtaatggttgtacaccagtcgatttgtgataagcatagcgctaagagcataaaaaacaagccgaaaacttagcacagcatgtaataaagatagttaattttatattcaattacacgttaacgagtttatgattttcatttaaaaattgtagattaagtccatgcattgcttatcagttagaccacctgtagcagcagattaattgattccttcaatcagatagacaccataatcaaaacacaaagtgcgacgactgagagagccaaacaatacaaaacaaacgacgaccagagaaaagccgaaaataaaagtttttccaaaactatatatctacggaagacaagagaacttcgcgttagaccaaaaataaacccaatttcccgagcgatccgtggagagtccatctgtagctgcgatccgcagtaagaatttgtggctcgtacggatcggtgcttcttttctctgtacggatcccatcggatatagaatcggaaacggattgttagacggaagacgggagagtgcgggcaaaatatacagcatggaacttaatgtggaaaactgaaaagttttcctcagtgcgaatcagaaggcgatcagcgatcggtaatcatcattaacagcagtccaatgcccaatcccgatgggcccataattcaccagcgctaattgcccacatgaaatcgaagttcataattgctcggacatgttatgtagtccgcatctataagcaagaggaaccagcagagttctcgacaggcgtggcacgagatttgacgatgagatgaatgccccgccgggcggcggcacccaaaatagtctcatggagtcgagtcttccgcacctgatccccttggctcttcggccttgccccagcaacccaaataaataaatatttggacaaataaacatatgtgccgtggagc

SEQ ID NO: 578 - DNA, 2055 bp, DROSOPHILA
atgagtggaagttctcccaattccataaggcctctgccgccgggtctgcaaaaagtggccatcgaagagctgaacgaagtgccaagtcgtgtggaatcggacattgctgctctgaaagaatggctacagaagcagccccatctctgcgcctgtctcgaggatcagttcctgcttagttttcttaggggatcgaagtttagtctggagaaggccaagcagaagattgatcgattctatagcctgcaagcggtcattccggaggttttcaacgatcagcgattggttgacaatgcccaggtgttggaaattattcgactgggagtgatcttgcgcattcccctcgatgaggaggatactggaccagccgtgactattattcgagctggctcctacgacatcaataaattcaagttccaggacatcatacgtgtgggctccatgttcggtgagatcatgatgctggaggatgacaatgcctccgtcagtggctacctggagatcatggacatgagtggagtgacgggtgcaaatctgtttgccctccaaccccaacttctcagcaaattctcggcctatgcggacgaggctatgccaacgcgtcagaagggaatccatttcatcaatgtgcccaaggcattcgagacgggttttaaatcactgcttggatggtttccgggaaaaatcaaggagagggtttccgttagctccgatccggaagctattttcgagcgagttcctaagcactatcttcctgaggagtacggtggctcaaagggcaccatgaaggatatcaccgaccagatggaggcaaagctctgtagctatcgcagctactttgaggactgtcagcatttcggagcccatgacaagttgcgcgaggaagcctcagtgctgaacccagacgagagtcactttggcctcactcttcttggcgactacttcaatgtgtggctatcagctctcagtcgattcagccttatcgatttcgggtcgaatcgcaaaactaactgggtgaaaaatcaacactcgttcatcgaccgccaagaagagaggaacaagatgccggccatccgaccactgagtcccgagctccaaaagactgcgattgagaacctgaatgaggtgcctaataagttggatgacgacatcgccgccctgagggattggattaagcagcaaccccatttgaaagcccgcacagatgaccagttcttggtgaacttcctgcgcggctgcaagttcagtttggaaaggaccaagtcgaagatcgacaggttctacacactacgcaccaagtacccagagttttatttgggtcataatgtcgatgtggacaaagcactggagatattccgattgggcaccatagttattctgccacgtcctctaaacgataatggcccgcgattggctctgctgcgcatggcctgctatgatcccagcaaatacaccctccaggaggtgaatcgagctgctggtctcatgcagcagattatgctcgacgaggacgatgtggccattgtgaatggtttaatatccattctggatctgtccaatgtcaccaccgggcacttcctgcagatgtcaccgtccttcgccaagaagatgaccgtttttcaggaggaggccctgcccctgcgaccgcagggaatccatttcattaatacgcccaacggatttgacaccatcttcaatatgatcaagcccatgatgtctaagaagcagcaaggacgcgtaagtaaccccaactgcaccaagcaaagttggaaggtaattgaagttctcttacaccgccagctctacgttcatggaagcaaatgggaggcactctacaatcagattcccaaacagtatttgccagtggaatacggaggggagaacggatcgattccggagctgctgcagcagtgggagcagcgtattctagcctaccggaattactgggaggaggagaagaactacggaaccgatgaaagcctccgagtgggtcagcctgttgacttcgagagtctttttggtctgcagggctccttccggcaattgaatgtggactga

SEQ ID NO: 579 - protein, 684 aa, DROSOPHILA
MSGSSPNSIRPLPPGLQKVAIEELNEVPSRVESDIAALKEWLQKQPHLCACLEDQFLLSFLRGSKFSLEKAKQKIDRFYSLQAVIPEVFNDQRLVDNAQVLEIIRLGVILRIPLDEEDTGPAVTIIRAGSYDINKFKFQDIIRVGSMFGEIMMLEDDNASVSGYLEIMDMSGVTGANLFALQPQLLSKFSAYADEAMPTRQKGIHFINVPKAFETGFKSLLGWFPGKIKERVSVSSDPEAIFERVPKHYLPEEYGGSKGTMKDITDQMEAKLCSYRSYFEDCQHFGAHDKLREEASVLNPDESHFGLTLLGDYFNVWLSALSRFSLIDFGSNRKTNWVKNQHSFIDRQEERNKMPAIRPLSPELQKTAIENLNEVPNKLDDDIAALRDWIKQQPHLKARTDDQFLVNFLRGCKFSLERTKSKIDRFYTLRTKYPEFYLGHNVDVDKALEIFRLGTIVILPRPLNDNGPRLALLRMACYDPSKYTLQEVNRAAGLMQQIMLDEDDVAIVNGLISILDLSNVTTGHFLQMSPSFAKKMTVFQEEALPLRPQGIHFINTPNGFDTIFNMIKPMMSKKQQGRVSNPNCTKQSWKVIEVLLHRQLYVHGSKWEALYNQIPKQYLPVEYGGENGSIPELLQQWEQRILAYRNYWEEEKNYGTDESLRVGQPVDFESLFGLQGSFRQLNVD

SEQ ID NO: 580 - DNA, 2780 bp, DROSOPHILA
agaggttagctatcttgcagcgaaagagcaaagcaaaaagactttaaaataataactaaattctcccacagaaagttttcaaagtgatcagttagtatctggcacagaacatttcaaaagtattttatttagtccacttttcattacacttaaccccacaccaaagaatgccccagcgacttgcagtcacgtctcaaacgcgttttgtatctcaaattaaacgagatggccgttgaagagggttgtttgcttggccataacaaagatgctgtatcgtatttcagaccccaacctccagctgaagggcccccaagtattcgttctatatcactcacttacaacagagatctcgtccagcaattgacttttgaggcaaacaaattgccgacagggccacacacaccgaacacgacaacttagctactcgctccccacccaatgcatttgtaaatggaagttggcttccggttaaaggatattcgagtaccattggggtcggggaaaggggcagaaaggaagaagggatacagagtgcgtgcgaaaaatccaaacacgtctacgatttgttttccgcgtctggctttttgcacaccacacagactggacgccgccaggccacagaaaaacgggaaattgggcaggaatgaggggggaataatggggtttctggagtaaaaacgggtggaaagggcaaaccaggagctgggggggaattgatggcgacgtctcgtcgctgtctgctggcagtctacgcctttgggggttgttctggccaccccttctcctccgggcaaagctgtctcggctgtgcgggcttgatgattttattgcttccctctgtgcctcggggggaattgggggttcccccaaaagcagtgctcataaagtggttccgaactagttcaggttacaagaaatggttgtttggtatgcgttccttttgctttgctttttcaacttctatataacatataatgaagcatacattttattcttaactatgcaggttctcgtgtttctatgggtgggtgctgatccaccagaggattctcttctggtatatcgacccgaccagcgcctgcagctctggagattccttagctatgccctgctccacgccagttggctccatctgggttacaatgtgctcactcagctcctgttcggtgtgccattggagctggtacatggatcgctgagaacgggagtcatttatatggccggagttttggctggctctttgggaacttcggtggtggactcggaagtttttctggtgggagccagtggaggagtttacgccttgctggccgcccaactggcgagtcttttgctcaactttggtcaaatgagacacggggtaattcagctaatggctgtgattttgttcggtaagtgaactggtataattctaatatgaatttgctgttaggaatcataaaaacattttctatcctttacagttttctgcgatttggggtatgccctctattcaagagaactggcaatgcatcagctgcagacacgaccctctgtctcctatatcgctcacatgaccggtgctctggccgggattagtgtgggtctgctgcttctccggcaactggatggtgggctgcgaccacgcccactccgctggttggccctgggcgtatggtgcatattcagcgcctttggaatcgccttcaacttggtgaatacggtcacagctcaacttctggccgaggaggagggccaggtgatcaggcagcatctgatgaatgacctcggaatgggatgattccccagacggaagccatagactgcatcccgttcacatacactcactcctcttaaatgtctcctcttatgccctagtctagtcactagattataagacttttcccaggacagtgtgctcaaataacatatctatcgtctatcggatatcctggctcccacttcaaacggggattcgctcaaaatactcttagctcgtaagtcccaacatttatcttatgccaatgccaaaggagtggagaggttcctgccgggaactgagcctggctcacatcaaagactaaggatcgggtttggattgctatcgatgctgatcgattgtccattgagttgcctacttaggcttaatgccaaaccagagcttaaagacataataacatacatattataactccagatacaattatttgaaacaagaaatctaactcaataaattaccaaactatagagagtaaacaccaatgtgccttgttttatttgaagccaccaaaatatgtaatgaaatatcggactgggaatgaagccactctatttgaatttcaatctgaggtaaactgcgtcaaaatgcatgctaattccgcaatcagctgaaacagctgcaatctaaaaagccaacattttgagaggccacaccagaaattaataacaaacaaaaaccgaaattagccatcaactctggacgttgttctattttggcattgcctcatcatggtgctggcccctctagccaagtttcaaatgggggggagagttgattatttttggttttggatttcgcattggccgatgatgaaattgtaaacttgcactgaatgtgttggtaattcaatagctgcaagctacgtcgctggctcctctgctaaaaaaaaaaaaaaaaaacacagcaccacccaaaaaccgagtgcattttgatgagacattgatggttcaatcgaacattcgacccacccagccagttgagccaatttagcaaagccatttgcgattcctctcaatcgaat

SEQ ID NO: 581 - DNA, 708 bp, DROSOPHILA
atgcaggttctcgtgtttctatgggtgggtgctgatccaccagaggattctcttctggtatatcgacccgaccagcgcctgcagctctggagattccttagctatgccctgctccacgccagttggctccatctgggttacaatgtgctcactcagctcctgttcggtgtgccattggagctggtacatggatcgctgagaacgggagtcatttatatggccggagttttggctggctctttgggaacttcggtggtggactcggaagtttttctggtgggagccagtggaggagtttacgccttgctggccgcccaactggcgagtcttttgctcaactttggtcaaatgagacacggggtaattcagctaatggctgtgattttgttcgttttctgcgatttggggtatgccctctattcaagagaactggcaatgcatcagctgcagacacgaccctctgtctcctatatcgctcacatgaccggtgctctggccgggattagtgtgggtctgctgcttctccggcaactggatggtgggctgcgaccacgcccactccgctggttggccctgggcgtatggtgcatattcagcgcctttggaatcgccttcaacttggtgaatacggtcacagctcaacttctggccgaggaggagggccaggtgatcaggcagcatctgatgaatgacctcggaatgggatga

SEQ ID NO: 582 - protein, 235 aa, DROSOPHILA
MQVLVFLWVGADPPEDSLLVYRPDQRLQLWRFLSYALLHASWLHLGYNVLTQLLFGVPLELVHGSLRTGVIYMAGVLAGSLGTSVVDSEVFLVGASGGVYALLAAQLASLLLNFGQMRHGVIQLMAVILFVFCDLGYALYSRELAMHQLQTRPSVSYIAHMTGALAGISVGLLLLRQLDGGLRPRPLRWLALGVWCIFSAFGIAFNLVNTVTAQLLAEEEGQVIRQHLMNDLGMG

SEQ ID NO: 583 - DNA, 3444 bp, DROSOPHILA
ctgcaagttatttggtattttctgccccggctatcacgtttcctcattgccatcgcaggcggtgtttctaagcagacggctgagccgcttgccaatgggcttggggtactggttgttcttcaatagaaactccttggactggtgctccacggctccgttgtctagttggtacttgcacagcgtgtgcagcggtcgcacgagcgtttgcctcagctctggccgagattccagcactgccaggcattgcgcagcggtctctagtgtgctaaggcatccttcagtaggctgtgtacggatgatgtagtcacttatacccacggcgatgagtttcacctgtcgcaggcggtgtagagccggactgctagcgtaaatggctttagcctgaggccaggtaccatcgatgagcaccagtgtataaggacccgcactgtggtccacctcttccagtgggaccgagtcccgactgggatacagaagcagtgtttgtggagagtccaaaatcctctgcagatcagcatggtttctatggtttggaaaccgcttgcctttgtagacgacacattttcccggttccaaacccaactgcagcatcagtgcagtgcgtagcgatctcttctcctctgcagggtgttgcagtataacaatctgtgaggacaccgcctcaggtggatgcggtaaagccgggcaccagcaaacaaccacgggtcgtctataatagagttcatgaaaatactttaatttttatggcagattcccagcttcaccactcacttgcatttctcgcacttgttgcgtctgttgggcggatcggcgctgatgcccacgaggtccagccacgcgtcatcctccatacttataattgattaaattagaaaaatgctaagtttatattccgcacgataagaaatccgtaagcaacaattcgcaactaggtggcaacgcacacagccacatggcaaatatgaccgccctgtcttcgaatcagctgtttggagtgcagtgaaattgcgattatgcgatgacagaatcttgaattcctttaatctatacaccaaggaatcaaaataaatattaatttattaatacgtcaagaaactaaaatcgtaaaaataatacgaaagtgcctagtttttaaagttaaagttaatatagaatcttacaaatatggttaaaaatcaccgaacttcataaattcgttccagtataaacattccacttcagctttgtgttttctatttagattttgtatgtgaattgaactagttgttaagcttaaagttgtgaagtacatagcataatttaagaaaaatgcagagtataggatggacgctgatcatgaaacgcggctgcctctttagttgccgcaaggagaccctgaacataaacggatctcgatacacaatccgcgaaaggctggcgacggggtttgtaccacatttttcccactatctcctctgatatatctaatctgagtgtttaaacaggggcttcagtctaatcgaccttggggaaaacgcctccacgcgacgtagctatgcgataaagcgcatcacctgccacagcatcgatgatcagaatatagctctgcgagaaatcgaaaactgtcgaaaaattgactcggaaaacgtgatccgggtagtggattacgagctgaagggccaggcggacatagttataaacacaacgagcaccttgttcattgtgcttccctattacaagcacggatctcttgcggaccaccttcagctgcgatcgcggaaacaggaccacatgcccgaggcccagatcctgcaaatctttctgggcgtctgcgagggattgaaggccatccacgaggcaatgccggtgcctctggcccaccgagatctaaaaacggccaacatctgcctgtcggactcttttgagccaattattgtggatctcgggtcaatgacagaagcccgactgcagattgtgggccagacggatgctcagcgcttgcaggacgaagccgaggagaggagctccattgtctaccgggctccagagttatttaccgtgaaaacatattgcacaattgacgagcgcactgacatatgggtaaagcagatccaagagagcgttattgaagttcttccttaacatttccctctttcagagtcttggctgtgtgctctatgcaatgtgctactttaattcaccctacgatcccatctacgagcgaggtgacagcgtggctttggctgtgctcagtgggaacataaacattccagaggattcaatttacacagaggtaataaaccttttttttatattgtaaaggaaactaattccaaatatttgtctaggacatgcacgaattaattaagtacatgctgcgaacagatccaatggaacggccattcgtgtttagtgttatcgaaaggacccacgatctgatacagaaactggagggtcgcttgtagctcccactaactggattacaactcatttatagacattcctccaaaccagatacaccgcttactgttttttgactacttattgtaaaatattttaaacctgctgattttatgaaattatgtgtaagcaatcaagctagtttttttattttattttattgattggagctagtgttcgtcacgagtgagtcctggacagttggagcccagatcttcggcgtcatcgtaatgggtcccacaccaatagcagaagcaataggctgtgcgcaggtagccagtgaggagttctaattgctccgagggactgtatggttcttgcttaggtggcacctcgacttcaggatcgtcggcgtcgctctgtgattcatcttcatcttttggtttaggtggccaaaagaaatcgagatctggttctgtgatagcggacttaagatccaacgattcgcaggtctgctggcaccgttttatgtcatactgtaattttcgctcctccgctttatgggtcgcgcgcctcctataagcctctgtactgacttcctcgtcgcttttaatgccggccttgtttaggagatgtgccctccgcaacttctgccgcttgagggccaactctgcaacggctgcctcgcgcccaagtcctccacgaccgctctttatagttatccccacgggttcagtacgagcatccgaagttatgcccaacccagaaccggctttgtagcccatcttggccagtagctggaatcctttgttgtcggcggaaattggtttgttgagggactgttgaaggcgaacattgtctacgttcccggaagaagctgctgtctcccgttggcgcttcttcagctcatctttcttggactcgacttcaatctgccgctttctgccgcgattgtgcaccaaactcggtcggacatcttgcagactaatgagggaaggatgagagtttttcataaggtggttggttgttagttaggtgtgagtgtaatctcacccaaccaggaat

SEQ ID NO: 584 - DNA, 1271 bp, DROSOPHILA
tgaaattgcgattatgcgatgacagaatcttgaattcctttaatctatacaccaaggaatcaaaataaatattaatttattaatacgtcaagaaactaaaatcgtaaaaataatacgaaagtgcctagtttttaaagttaaagttaatatagaatcttacaaatatggttaaaaatcaccgaacttcataaattcgttccagtataaacattccacttcagctttgtgttttctatttagattttgtatgtgaattgaactagttgttaagcttaaagttgtgaagtacatagcataatttaagaaaaatgcagagtataggatggacgctgatcatgaaacgcggctgcctctttagttgccgcaaggagaccctgaacataaacggatctcgatacacaatccgcgaaaggctggcgacggggggcttcagtctaatcgaccttggggaaaacgcctccacgcgacgtagctatgcgataaagcgcatcacctgccacagcatcgatgatcagaatatagctctgcgagaaatcgaaaactgtcgaaaaattgactcggaaaacgtgatccgggtagtggattacgagctgaagggccaggcggacatagttataaacacaacgagcaccttgttcattgtgcttccctattacaagcacggatctcttgcggaccaccttcagctgcgatcgcggaaacaggaccacatgcccgaggcccagatcctgcaaatctttctgggcgtctgcgagggattgaaggccatccacgaggcaatgccggtgcctctggcccaccgagatctaaaaacggccaacatctgcctgtcggactcttttgagccaattattgtggatctcgggtcaatgacagaagcccgactgcagattgtgggccagacggatgctcagcgcttgcaggacgaagccgaggagaggagctccattgtctaccgggctccagagttatttaccgtgaaaacatattgcacaattgacgagcgcactgacatatggagtcttggctgtgtgctctatgcaatgtgctactttaattcaccctacgatcccatctacgagcgaggtgacagcgtggctttggctgtgctcagtgggaacataaacattccagaggattcaatttacacagaggacatgcacgaattaattaagtacatgctgcgaacagatccaatggaacggccattcgtgtttagtgttatcgaaaggacccacgatctgatacagaaactggagggtcgcttgtag

SEQ ID NO: 585 - protein, 320 aa, DROSOPHILA
MQSIGWTLIMKRGCLFSCRKETLNINGSRYTIRERLATGGFSLIDLGENASTRRSYAIKRITCHSIDDQNIALREIENCRKIDSENVIRVVDYELKGQADIVINTTSTLFIVLPYYKHGSLADHLQLRSRKQDHMPEAQILQIFLGVCEGLKAIHEAMPVPLAHRDLKTANICLSDSFEPIIVDLGSMTEARLQIVGQTDAQRLQDEAEERSSIVYRAPELFTVKTYCTIDERTDIWSLGCVLYAMCYFNSPYDPIYERGDSVALAVLSGNINIPEDSIYTEDMHELIKYMLRTDPMERPFVFSVIERTHDLIQKLEGRL

SEQ ID NO: 586 - DNA, 3378 bp, DROSOPHILA
tgaccggaattaggctcatcatattagtttcaccttttttattaaatcaaaacagacacgatgagctgtccaggatttggagaactaaatataccctcgtcgcgtgccttctgggacgactgcgacgaggatgaattggagaaccttaagccggtggagaagtgcgtgatctaatgttatttacgtaggtagtcctaatttcttggattcgcaggctgcagctgaagtttgatgatgattgcgatggggaagctgcccctgtggagagcgagatgctggtggtcattgagggcgtcaacgtcactcacttcgcctcttctctgctggaaaaggatgcaaagcgtgtgtgcgccattcctgccaataactcgaccctgcactggagtcattcgtccaaacagttgctggccataatcaacgaggacctgaccagtagcggcgaggtagcggagctcctactgccgtacgtgaagcttgccaagaaagtgatcactctgacgcttaagccaaaggtcgagttcaaaagcgaggacatccagctctaccgggatcacattgccgttgtccgcggcataggtgccaaccagaaggatatcactgaactagaggctcccaactttatcgctggagttgcagcaggcggtgagtgatgagtggaaaaggagaaggttgaatcacctcaccatctgttcacctttttttgcagttgccagttggcgggatcagatggaattgcctgttacctctttcgttatttacaccgacaagctgcccctcgacgccacagctgcgcagccagtgatcaaggtacttaaagccgcgggcgttgcctgcagctcgagctacatccctccgcggaaggagagctcttatttgtacatgtgaaactacttttggctgtgctcaacttcctagttttaatgcttgtaaaaatgatacggttgcggaataaaaatcgaactacttaagtacatcaaaaatgctgaggttgtcctcccgactacgttgctccatgtgcgccttggcgatggctatgaactgtggacgggaaagcattgaataggcgggtaccagcaacgatgaggcaagcatgtgcagctccttgtgcccactgcagaacatatcgatgcctagttccagggcgcttccaaagtccgattcatcaactgctatgttggctgcgttggccaccggctgcagcttctccagaaccgcctgcttggcggctccattatcgacgtccttccgctcaagcattgccagcatcttcttgagttcggaatcgctgacagccagcgggcggtatcccacttctgtcttctggtcaaagggcacaacaatgccggctcggtggaatgtcttggccacaacacgcttgttgcgctcccgctgcagtcggtccagctgggccagttctagggaattgtcactcaggtattttgccaccgcctttttggtccccgccaactgcccgcatgagaacggagtggccgcaaaatcgtgctccaggtagtagaggaaagcatcgaaggcatttccagcgacgaattggaactggcagcctttcgcagagtcgttgcgggctattaagagattttccttgtcctgcggcacatcgcgccagtaaccgtagtgaatcccagtgcctcggcgcacgaagatcgtctgaaattctggtggatcgtagtaaaaacgccagtggcgcaggtagtctcccggttcgcctagtttggcgccgtgaaatttaccggctaggaactcaaagggacccaccaactgcagttgaaatactttgtctaggtgctccaagccagcatccttgggcttcgcaggatcaatttttaagcttcccacaaacttccaaaattcgtagaagtccggcggcatttcgacaaggaacttgtgtcgaatgaactcgttggactcgcagagattgtcgtactccttctgcacggacaggcggatgcgcttctccaagatctccatgtagttctttccggatatgttgctcatggcctctttgtgaagctcctcggtttcggcttcataactgcccttggctgtatccttgttcaccatctccgtacttgaagcactcgtattggacttatccttgttcaccggctccgtttgttcttcctttttctgttcaccagactgcgaggatgcacttctttttggcgccacttttttgccttctgcgccgtccacttcgtgttcttgttgctttttcggatgattgtatttggacaaatgtgcgggattctgctgatagcacttatcccagtatttgcaatcttcttttggcattcttaagtaacaacaataccgatttcaaacaaatttgcaaaatgtgaggtttgctatggcacaattaacaagaataacaagcatccagtgacgccgttaaaagttgcaaggggatgattctgacccatttgagaaaaatactttaccatgacagctgggtaatagaaaatactacactatatactacagcccagacatttccccttggtgaaaagctaataaacttttcataaacttgtatacttttattggacacttaaattcaattttagtcatttttttagatctacgcccatgttgacttccctggataagaagaagcactctgcacacacccccaaaagtgttgtaaaataccgccggaaatcaccagtgactggcaaaaactgcactgaattgcatggagatttaatggggggattcatttaataattgtagttcattcaatgaatacaaacttcacgaagagaatcgaaatgttgatggttaggggttagtacaattacagttgcgtgtggataggcgcttcaagggggaaacactattctaagcacctatggaacaggattaatcctcgacagcacacatgacggagtagacgcactcttccttgttaatcaagtggcaggtcttgttgaccagggacatcagctggttgacgtcggtggcccagttgttcaggatgtcggaggcgctctttttttgggtgaagtaaatgatgccggcgggacggtcgatctttacgcggatggtgtcggtgttggccagtttagaaagatactcctcgcagcggctggtgggcaggttcagcagctcactcatgcgcgccaaatgcaggcgggagtaatacatggcaatgatgcgaatgttctatgaaataaccagtagcaattagttattattagtattgatttaaatcaaaaaaaacctacatgctctatcagacgatccttaagctcggtgatacatttcttgccatgcttggtgctatccttgaacatctcgttttcagccaacacgagcccaaagtctgcattaaatgtgtcgaagttgatcagctcctttgac

SEQ ID NO: 587 - DNA, 1304 bp, DROSOPHILA
ttaattgtgccatagcaaacctcacattttgcaaatttgtttgaaatcggtattgttgttacttaagaatgccaaaagaagattgcaaatactgggataagtgctatcagcagaatcccgcacatttgtccaaatacaatcatccgaaaaagcaacaagaacacgaagtggacggcgcagaaggcaaaaaagtggcgccaaaaagaagtgcatcctcgcagtctggtgaacagaaaaaggaagaacaaacggagccggtgaacaaggataagtccaatacgagtgcttcaagtacggagatggtgaacaaggatacagccaagggcagttatgaagccgaaaccgaggagcttcacaaagaggccatgagcaacatatccggaaagaactacatggagatcttggagaagcgcatccgcctgtccgtgcagaaggagtacgacaatctctgcgagtccaacgagttcattcgacacaagttccttgtcgaaatgccgccggacttctacgaattttggaagtttgtgggaagcttaaaaattgatcctgcgaagcccaaggatgctggcttggagcacctagacaaagtatttcaactgcagttggtgggtccctttgagttcctagccggtaaatttcacggcgccaaactaggcgaaccgggagactacctgcgccactggcgtttttactacgatccaccagaatttcagacgatcttcgtgcgccgaggcactgggattcactacggttactggcgcgatgtgccgcaggacaaggaaaatctcttaatagcccgcaacgactctgcgaaaggctgccagttccaattcgtcgctggaaatgccttcgatgctttcctctactacctggagcacgattttgcggccactccgttctcatgcgggcagttggcggggaccaaaaaggcggtggcaaaatacctgagtgacaattccctagaactggcccagctggaccgactgcagcgggagcgcaacaagcgtgttgtggccaagacattccaccgagccggcattgttgtgccctttgaccagaagacagaagtgggataccgcccgctggctgtcagcgattccgaactcaagaagatgctggcaatgcttgagcggaaggacgtcgataatggagccgccaagcaggcggttctggagaagctgcagccggtggccaacgcagccaacatagcagttgatgaatcggactttggaagcgccctggaactaggcatcgatatgttctgcattcatagccatcgccaaggcgcacatggagcaacgtag

SEQ ID NO: 588 - protein, 411 aa, DROSOPHILA
MPKEDCKYWDKCYQQNPAHLSKYNHPKKQQEHEVDGAEGKKVAPKRSASSQSGEQKKEEQTEPVNKDKSNTSASSTEMVNKDTAKGSYEAETEELHKEAMSNISGKNYMEILEKRIRLSVQKEYDNLCESNEFIRHKFLVEMPPDFYEFWKFVGSLKIDPAKPKDAGLEHLDKVFQLQLVGPFEFLAGKFHGAKLGEPGDYLRHWRFYYDPPEFQTIFVRRGTGIHYGYWRDVPQDKENLLIARNDSAKGCQFQFVAGNAFDAFLYYLEHDFAATPFSCGQLAGTKKAVAKYLSDNSLELAQLDRLQRERNKRVVAKTFHRAGIVVPFDQKTEVGYRPLAVSDSELKKMLAMLERKDVDNGAAKQAVLEKLQPVANAANIAVDESDFGSALELGIDMFCIHSHRQGAHGAT

SEQ ID NO: 589 - DNA, 3448 bp, DROSOPHILA
actcttgctcttgtgggctcgattccgtatgaccagtcccgccagcggcttcttcacatggattttgggcatcttggcggcgctgacaacgttgcggctacgtggctttagctttaccgttaactggagggggggcaggcggtagggtgcgtggtgtgtgtttgtttgttttggcaatggaaacgccggagagctgctgcctcttttcgttcagtgtttttcgctgtagtgcctagcaatttggctgcatcgcccgtattttgctgctgtttttccactttactacacggcggcacttaattgaggcgcacaagcacggcggcacacactcgatttgctcgttctatgcgcgctttaatcacaattattagtttaccattaaagggacgcctgggcaacaagaacaacaacaactgcggcggcggtttaggcggctcgcatgcctatgggctaactgccatcgaagacctcatgtggctggagctggatcaccgggatctctgggcggtttctggcagggatttgactcagcggagctattttcacgaaaatttaatgcgttcgttgcaaacacgggccgagaacaaggtcgatttggggctaaaaaacgccaaaagcgggcgctgtcaacatgtgttctagggttaccgcagcgcgcgcatttcgtgtgctaaaaagtgaattttagatttaaattgagatcgagtttttaaaataatggcttagattaccgtagtctttatatatatatatagcaacataggtgaaatagaaaaagtaacaaataaatattgaacgtaataaaagaggttacagaacatataataaataattaagttaatataataataataaatagaagatgtagataactttagacttaaatggcaatacatcagcgaaagcatcgttttataataataaaaaacaataaactatatatttggtatattctttagaaccgctttagaacattcatcctaccacggtcacactttcggcaatcagctgagaaaatatttaaaagttttaaatattaaaaacaaaggcccgtaaagaatgcaaatattctgaccccgtggcataaaaagaatatagtcctagttctagcatattgtttgtaaattcctttactccagacttccggttgagaccatggttcgagttctgttcctccacccggatttgggcatcggaggagctgagcgactggtggtggatgccgctctggcactcaaggagcggggtcaccaggttagcttcctaacgaatcaccacgacagcacgcactgcttcaaggagacggcggacggcacttttccggtccacgtagtgggcgactggttgccacgcgggctcttcggaagattctatgccatctgtgcctatctgcgcatgctctatgcggcgatctacgccagtttttttatgccccagcgggagcaagtggacgtggtggtgtgcgacctaatctctgtgtgcattccagttctccgcttcgcccctcatcgtccgaaggttctattctactgccactttccggatcagcttctcagcagccgtgaaggactgctaaagcggctgtaccgcctgcccatcaactggctggaggagcacacgatcggtctagcagacaaggtgctggtcaactccaaatttacgctacgtgtcttccaggacacctttcgccgactgagcacggtgccggatgtgctgtatccttcactgcacacccagtactttgaccagatgcagaaaaagctagaacagcggtctgctttactggacgagccagtgcatccgcgagtaccactcaacgcctttatctatctggacatcaatcgctacgagcgcaagaagaaccacgcccttgccttacattccctgcgccttctgggcgacatgctgcccgccacggacttcaagcgctgtcgcctgatcatcgccgggggttacgacaccagatgcatggaaaatgtggagcacttcgcggagctggagcaccttacggaggagttgaaacttcaggatcacgttgtgctgctacgctcgcctaccgacgaggagaaatgtcgcctgctctttgccgctcactgtctgctgtatacgccagagaacgagcacttcggcattgtgccgctggagggcatgtactgctcgaagccagtcgtggcattaaacagcggcggacccactgaaacggtggtgagcacttccactggctttctgtgcgaaaagaccgagaagagctttggtggagcaatgctccagcttttccgggacgagcagctgcgtgtaaagatgggagaccagggtcacaaacgggtgcagcaaaagttctctttccaagcattcgcagatcggctgaacggcattattagagatcttgttcctatctccagggagtcgagtgctaagaaaaataaataaaattccaattaagaaagcagatctattgtaaactcttatggaattatttttagctgcttatgcgaaatattagtcatcaaatgattcatcaatgtgaagattgcatatatctgaagcccccaaaaaccgattgcagcactgtttatgtactttattattaaattccattcttcagggcgaataatattagcttgtgggactggggtgattcggattggactgagatcgggctggctactgttcgcgcatatacagatacagatagccgaggtccttgggtgggttctgcgacttggccaccttgctatcgttgaagatcacccattcgcccttcttgcgaatgtgacaaacgtagtgtcccacctgggcggaggtgcccatgtgtgagatgaatgccaccaggcgatacttgccgcggccatcgcggtagttggtcttatttggcgtcgaggaggccgctgcagctgatgaattcgcagcgggggcagcatcctcaacaccaattgaatcggcgtgcgagaagatccagtcggtggcgcgctccacattgccatcggtcgctttcagagcagccaccgcctgtctttcgtcgaagcccatgctcatgagcatggccaggctctcgggattggccacaaactggttggcggcgcagtctccaatgctgttgttcggcaccacaaagggctccgagatatcctcgtcggcgatgtgctccatcaaccagttggaggctgcctcaagtccgctgtttttggtgtgatagcaagcacgcttgcaggcttccggtggaaaacccatggtcagcaactcggacatgaccgcctcgtcaaatgcaaacttcacctcctctgtggcgggctcgggaagagcctcctcaccaggctgcaagccaccagcggagcgccagttacttagatccagttcatcgggcatgtctacggaaacgtccagtttcttgggcacccagtcgtcgcccagcgtgaactttcccacgtgaatcatcaggcagtcgggc

SEQ ID NO: 590 - DNA, 1448 bp, DROSOPHILA
gcaatcagctgagaaaatatttaaaagttttaaatattaaaaacaaaggcccgtaaagaatgcaaatattctgaccccgtggcataaaaagaatatagtcctagttctagcatattgtttgtaaattcctttactccagacttccggttgagaccatggttcgagttctgttcctccacccggatttgggcatcggaggagctgagcgactggtggtggatgccgctctggcactcaaggagcggggtcaccaggttagcttcctaacgaatcaccacgacagcacgcactgcttcaaggagacggcggacggcacttttccggtccacgtagtgggcgactggttgccacgcgggctcttcggaagattctatgccatctgtgcctatctgcgcatgctctatgcggcgatctacgccagtttttttatgccccagcgggagcaagtggacgtggtggtgtgcgacctaatctctgtgtgcattccagttctccgcttcgcccctcatcgtccgaaggttctattctactgccactttccggatcagcttctcagcagccgtgaaggactgctaaagcggctgtaccgcctgcccatcaactggctggaggagcacacgatcggtctagcagacaaggtgctggtcaactccaaatttacgctacgtgtcttccaggacacctttcgccgactgagcacggtgccggatgtgctgtatccttcactgcacacccagtactttgaccagatgcagaaaaagctagaacagcggtctgctttactggacgagccagtgcatccgcgagtaccactcaacgcctttatctatctggacatcaatcgctacgagcgcaagaagaaccacgcccttgccttacattccctgcgccttctgggcgacatgctgcccgccacggacttcaagcgctgtcgcctgatcatcgccgggggttacgacaccagatgcatggaaaatgtggagcacttcgcggagctggagcaccttacggaggagttgaaacttcaggatcacgttgtgctgctacgctcgcctaccgacgaggagaaatgtcgcctgctctttgccgctcactgtctgctgtatacgccagagaacgagcacttcggcattgtgccgctggagggcatgtactgctcgaagccagtcgtggcattaaacagcggcggacccactgaaacggtggtgagcacttccactggctttctgtgcgaaaagaccgagaagagctttggtggagcaatgctccagcttttccgggacgagcagctgcgtgtaaagatgggagaccagggtcacaaacgggtgcagcaaaagttctctttccaagcattcgcagatcggctgaacggcattattagagatcttgttcctatctccagggagtcgagtgctaagaaaaataaataaaattccaattaagaaagc

SEQ ID NO: 591 - protein, 424 aa, DROSOPHILA
MVRVLFLHPDLGIGGAERLVVDAALALKERGHQVSFLTNHHDSTHCFKETADGTFPVHVVGDWLPRGLFGRFYAICAYLRMLYAAIYASFFMPQREQVDVVVCDLISVCIPVLRFAPHRPKVLFYCHFPDQLLSSREGLLKRLYRLPINWLEEHTIGLADKVLVNSKFTLRVFQDTFRRLSTVPDVLYPSLHTQYFDQMQKKLEQRSALLDEPVHPRVPLNAFIYLDINRYERKKNHALALHSLRLLGDMLPATDFKRCRLIIAGGYDTRCMENVEHFAELEHLTEELKLQDHVVLLRSPTDEEKCRLLFAAHCLLYTPENEHFGIVPLEGMYCSKPVVALNSGGPTETVVSTSTGFLCEKTEKSFGGAMLQLFRDEQLRVKMGDQGHKRVQQKFSFQAFADRLNGIIRDLVPISRESSAKKNK

SEQ ID NO: 592 - DNA, 7149 bp, DROSOPHILA
gggtgaggatagagacggagggttggcatgtgccgccacttgaatcagtggctgtttattggggatgggatcggattgtgagagagaggggtatggggatcgggatcggggaggctccgagtgccatgtgcaatggcagccaaacatcaaccgtgtcaaaattcaaagaaacaaaagcggaaatgtttttgttttccttatttttaacagccgccacatgaggaaaactaaaacacccgagtgcccgtggtagtggtaatggtaatggaaagctgacttggtcaatgaacttttcccgctgtctataattggcagtgccagcggaatttggttatgaacctggcactacgatgaagttaaaaagtaaatattatatataaaataaaacattcggagaacattcattaaattaagataaaacccgatcaggcgatcatgtgagactgcgatttattgggcaaaataaataatttaatattttgtctacagaccaataaaagaaatccaaaaactcttaacaatgtgagattattaattaagcagcttataaataataagtgttaactaataataataataataatataataatataataataattataatataatttatgcatgatatgtgaaaattttaaattgtatctacatattttgcatgtagaatatttaaaaattatatgtaaaaatacgtatattactggaatgcagtattaatgtattagttgataaatactaaaaagtgcgcaagtcaaacggtaacaccgatactttcgtacaactaacgcctcctaaaatcgatgacacgtttatcggttcgccaatcgagcaataatagaattttgctgcgctgccgaattttcgcgaaattcaccggaaaacgcacgtaagcgggccaaaactgcactaaaatatgcacaactagaaaggccatccataaaccataagaaacgcaaagcaaaagacgcggagcagacagggaacaaacagcaaacatcatggcgcccacccccttgcccctcgagcaaatgcctggtgttggcggtggcggaggaggctacctgcccgctgcccaggtgagtgttgctgccaaactcattatcccatctccatacaatggatacattgtgcttcacaggagggcggcccccggatcaacaccatgtccatgtcggtgctgatcgacttcatcatccagcggacgtatcatgaactaactgtactggctgaactgtgagtaaatgtttgaatgagtatatttatatgtttaactgaggcttgcttaccgcgaattttagattaccacgcaaaacggacatggaacgcaaggtggagatctacaactacgcggcacgcacccgccatttgttcaccaggctgaatgcgctggtcaaatggggcaactcggtgtccaaggtggacaaatcgtcgcagataatgagcttcctggacaagcagaacatgctttttgtggagaccgccgacatgctggcgcgcatgtctcgtgaaactttggttcgtgctcgattgcccaactttcacatacccgccgccgtcgaagttctgactactggcacatataatcgtctacccacctgtatacgcgagcgtattgtgccggccgatgcaattacgccggcggagaagagacagacactgctccgcctgaaccaagtcatccagcaccgcctggtcacaggaaaacttttgccccagatgagagaatttcgcattcgcaacggacgagtcaccttcgaggtgaagcacgagtttagcgtttcactgaccgtaatgggggataatcccacagtaccttggcggctgctggacatcgatgtgctcgtagaggacaaggagacgggaggtaaggaatctgtaattctctcataagtctatattatgtactaaaatcattgactttgatagacggaaaatcgctggtgcatccgctgcaggtcaactacatccatcagctcatccaggcacgcctagtagagaatcccaatgctcttagcgaggtctacaactgtctgcactacttctgccaatccctgcagctggaggttctgtacacgcagaccctgcgtttgaactacgaaagactggacgacaacaatataactgtggaagagtacgtaccaggcgtaaaactgacggtgtcgtattggcgtgatctaaagtcggagctgggctaccgcctaaccgttcaatcggatcccagcgagatcgggcgtccgttggcagtggtccacgtgccctcactgggcgccaaggagtctgccgaagtggcggatcgggccgtacgctctgaacacctttcgatggagcgcctaattgtacatactgtctacatacgatcggtgtccaggctgagcgatctcaagctggagtttcaggcttttttgaaagatgttgactgtgagtgtaaagtaaaacttaactaggtagattatcgaggactaactaatccctgttctcccaatgacagtcaacctccaaggaactcctgctattttgaccgtccccgtactctcgccctgtctgagggccgagcagattcacatcaccattgacacccacacaggcatgttccgttgtcatgtgcccaagcatctggactgtccgataatggaggagatgcaggactgcctcaatggggatcgcagcaagctgcccgctttgctttcggagctgcgcttttggatcacccatcggaggtgcgacaaaaccctacaacatcttccggctacggccaccgagacacttccatttcttgtgcagcctgatcaggagattttgcagccgggcaggcacaagatttatgtcaagctgcacaggcatccaaatattgttttggtaattatacatttagtaagtgtaattgtgaaaatatgaaaacattgattcattccaggtggttcaactcaaggaaaagactaccatgcccaacgaaatggaatacacctttcacctgggcttcgtggcctaccaaaaggacgagctggatgttatagacgactccgccatgcagctggtgtctatagtggcccaaccgcattcggacattccaaagtgttacaccaagctgatgcgccttattgagtttgatacttttgttgccactcatggacctggcactgaggtggacggtgagcacaatgacactttaaatcccttttccatattatcaaacaatccatcttttagcggaggtttccccgcacaaacgaaagtcgaatggggatttgctggctcctccagctaaacaacaaaagaccatatttcctgcctacttcattcccgagctggctcatgtggtggccatgtgcgatgaaaagataccgttcatgaacctagcccagacgctgtccaagcacaatattccccacagcggactgcaggtggaagcgaatgccacgtcacttgttctgaagatactggccttaccacagccaggaaaaacaacctttgcaacccaacaacagcagcaacagggagcacctgcagtggcaggagaaaataagccaagtggtacctctggactgccgaaaatcgactcccacgtgtgggacgacctaatgcgtcgcgttctctccatatcgattcgttcacagaccaacaagaacagccaggtccggatctgggtagtggagttcgtcttctacagcacaccgctgcaaagtagccatccgaaggagcagggcagtcggcggactgtttacctcacctacgaacaggcgaactacgacttttcaaaaacagttgaggatttgctaaacgactggtcgaaaatcgtgtacctttacacgctggtttacgactttgctgagcagctgctaaatagttagtataatacacgtgcattcgtctgcatttattaacttaccttcattttttagaacgtctttccctttgtgacatgctagtggtcaagtcatacagctacatgaacctgctcctcggatacggacccaaaaaagaggtgagctgcaatatctattggtcggtgcaatcccacggcttccgactgacgttcgtcggcggaatgtcagctgtaaacgggcactcaatgatgcgtgaccagctggcgcaacacttgaaccagcagcatagcatcacccaaatcgcccagattctccatgaaacctacaacccgttgagctccattgccaagctgccggtgctgcccttcttggggataccggtaagtacatttagctgctatgcatcaaacatcattacattattctttgattctagcgccctcaggtgccagtgctatcgttttgcgtgttggcacaatcgccgtgcctgataaggttgacatatcaggcagtgtactgcctggagttgcgtttccgtgccaacagactcgtatccatccgagatggagcgagcagtcgcttcgagcgtaacgtcgtggaagagttcacgcccattcagggtctgaaagccttcctctccaagtacgtggacgagtcggcggtctacaggggacgggcctcccacgaggacgacaatccgctgtcaccaatgggaatggaggacaacttcggtggaccgagcagtgttgcgggggtaagtgctggtggatcctcaccatttttgggtactggaatgcggggaccgcagtcgccgagagacagtggcctgcgttttcctgccccccacactccgccctccagttcaaatccgcacacacccgccagtccgcatccaagtgcgggggcaggtggcggcagtggaccccagggacacggcaacttcaacctgacgtcaccgccagcgccacatatgccacatccgtcgccaagcggcttgatgccgtcgtctccgctaaatcctcagcccagtccccacatggtccatagtcctggacccaacacgctctacatgcagagccaccaggactctcccttcaccgccatgtcgccggcgaataacaattggcccggatcccccagcatgccgcgcccatctccacgacccggacagagtcctgatcacaagagcaccggtggtggagcaggagtggccggtggaacggatagaggaggctctcggggcactctcaatcggccctgggctggagcagtacctactctcctcacccatgaagctttggagactctgtgtcgtcccagtccgtatccgaacaaggatatcaatgtgccggacatgagtcctctagagcgttttctaggctgcgtttatatgagaaggcaattgcacagaaacattcagagcgaggagacgcttaccgccctaaacagtacagaaccaggagtggtgctcttcaaggtcgatggactgcagtgccaggtggtgctgaatcagatgcacatgcagacgctgcacctcaaagtctctcagctgccgcccatgcccgacaagcatccgccgccgttccagcttagccaggacgatctgctggttatagagcagtactttgacaccagagtggcagctccaccataccgacccaattccctgcacagcatctgccggctgttgaacctgcccgcccaggtacttaaggatttcgtacagatcatgcgtttggatttgaagccggagctgggtggcgaccagttgaaatggacggtgcagatatgtttgcgcatgccgccctcggcggttcccattgtgcccagtggcaatgcatgcgtggttatgggtcgcatgaagatactgttcttcctgcaaatcacgaggataccctacggcgcggtcataggcgtgggcaaggactggaaggacagcccctctttggtgttgcccattgtgtacgacattcagacgaacgtcacccagctggcggaacgcacaggacaagtgatctcgcccacaatgaccgctgctagcactcttcttcgacgctttgccgagttcaatgcgcaacagaatcagtgtacgctcttcccagccattacggatcttctgacgaacctccagctggctgccgagatgccacagcccccacccaaccaatccataggacctcccgtaggcgtgggtgtcggagtgggatccagtccgaatccgatgatgcccatgcagcagctgccgcagcaagtgggaccgcagggcccagtgggtcccggcggctacccgcagatgggccccaatcccggtggcccgcagtgatgaaggcgcaagcgccgcgcctcctcgcagcagccgtgagctgaaggactgtgagctggcaacccggaacggcgaccgattatttataaacgagtttattggataagagtacacagaacaccctctactctggggtgagtcgatttggaatctcaaaaatcgtagcaaaaaaaagtaaaccatgatcagttttgaagtttgccaaaactgctcatagttcgctttctgtccctataattttgtagattgttctaataccaagaaatcgatccactccacgatacactatttagttaatgtttgtatttgtatttgtattcggcaaatccagaagtaactggaattgccaaataatattttaagctttctgggtaccatggaaagtctgctttggtagtccttaagattccatttcaccaatattgaggtgttcctgttgaccaaggaccaaacatatttcgcatgcgtaagacagcagccatctgacccaagaaaagaaaagaaaagcacatctcatttggggatcagatgctatatacattttattgcgctgtactccctgaaatattgggcatgaaaacaaattacacatccaagattataaattgttaactaaacagtgcggctagtgcggctatgtaataaaaagattatcgattatctataaatgtaggtgtgagtcatacttctgtgttccttttgctaatttgtttctatcacatagttcgattgcagatgcgccagagatgctgccatgcggactccgaaggagcagatggcagcggagatctggcaaaatgctttgtgactattgcaccgaggttagtttgtgttgtcgtctacctaataatctatctactcccgtcggtttttggcttggttgctggtcgcgcggtgaatagctcccgttcactgctgattcgcaatctgagtgttgtccatctgggtggtcagctcggatatgccctcctcctcctcagagatgaggtccacccagtag

SEQ ID NO: 593 - DNA, 4596 bp, DROSOPHILA
atggcgcccacccccttgcccctcgagcaaatgcctggtgttggcggtggcggaggaggctacctgcccgctgcccaggagggcggcccccggatcaacaccatgtccatgtcggtgctgatcgacttcatcatccagcggacgtatcatgaactaactgtactggctgaactattaccacgcaaaacggacatggaacgcaaggtggagatctacaactacgcggcacgcacccgccatttgttcaccaggctgaatgcgctggtcaaatggggcaactcggtgtccaaggtggacaaatcgtcgcagataatgagcttcctggacaagcagaacatgctttttgtggagaccgccgacatgctggcgcgcatgtctcgtgaaactttggttcgtgctcgattgcccaactttcacatacccgccgccgtcgaagttctgactactggcacatataatcgtctacccacctgtatacgcgagcgtattgtgccggccgatgcaattacgccggcggagaagagacagacactgctccgcctgaaccaagtcatccagcaccgcctggtcacaggaaaacttttgccccagatgagagaatttcgcattcgcaacggacgagtcaccttcgaggtgaagcacgagtttagcgtttcactgaccgtaatgggggataatcccacagtaccttggcggctgctggacatcgatgtgctcgtagaggacaaggagacgggagacggaaaatcgctggtgcatccgctgcaggtcaactacatccatcagctcatccaggcacgcctagtagagaatcccaatgctcttagcgaggtctacaactgtctgcactacttctgccaatccctgcagctggaggttctgtacacgcagaccctgcgtttgaactacgaaagactggacgacaacaatataactgtggaagagtacgtaccaggcgtaaaactgacggtgtcgtattggcgtgatctaaagtcggagctgggctaccgcctaaccgttcaatcggatcccagcgagatcgggcgtccgttggcagtggtccacgtgccctcactgggcgccaaggagtctgccgaagtggcggatcgggccgtacgctctgaacacctttcgatggagcgcctaattgtacatactgtctacatacgatcggtgtccaggctgagcgatctcaagctggagtttcaggcttttttgaaagatgttgacttcaacctccaaggaactcctgctattttgaccgtccccgtactctcgccctgtctgagggccgagcagattcacatcaccattgacacccacacaggcatgttccgttgtcatgtgcccaagcatctggactgtccgataatggaggagatgcaggactgcctcaatggggatcgcagcaagctgcccgctttgctttcggagctgcgcttttggatcacccatcggaggtgcgacaaaaccctacaacatcttccggctacggccaccgagacacttccatttcttgtgcagcctgatcaggagattttgcagccgggcaggcacaagatttatgtcaagctgcacaggcatccaaatattgttttggtaattatacatttagtggttcaactcaaggaaaagactaccatgcccaacgaaatggaatacacctttcacctgggcttcgtggcctaccaaaaggacgagctggatgttatagacgactccgccatgcagctggtgtctatagtggcccaaccgcattcggacattccaaagtgttacaccaagctgatgcgccttattgagtttgatacttttgttgccactcatggacctggcactgaggtggacgcggaggtttccccgcacaaacgaaagtcgaatggggatttgctggctcctccagctaaacaacaaaagaccatatttcctgcctacttcattcccgagctggctcatgtggtggccatgtgcgatgaaaagataccgttcatgaacctagcccagacgctgtccaagcacaatattccccacagcggactgcaggtggaagcgaatgccacgtcacttgttctgaagatactggccttaccacagccaggaaaaacaacctttgcaacccaacaacagcagcaacagggagcacctgcagtggcaggagaaaataagccaagtggtacctctggactgccgaaaatcgactcccacgtgtgggacgacctaatgcgtcgcgttctctccatatcgattcgttcacagaccaacaagaacagccaggtccggatctgggtagtggagttcgtcttctacagcacaccgctgcaaagtagccatccgaaggagcagggcagtcggcggactgtttacctcacctacgaacaggcgaactacgacttttcaaaaacagttgaggatttgctaaacgactggtcgaaaatcgtgtacctttacacgctggtttacgactttgctgagcagctgctaaataaggtgagctgcaatatctattggtcggtgcaatcccacggcttccgactgacgttcgtcggcggaatgtcagctgtaaacgggcactcaatgatgcgtgaccagctggcgcaacacttgaaccagcagcatagcatcacccaaatcgcccagattctccatgaaacctacaacccgttgagctccattgccaagctgccggtgctgcccttcttggggataccgcgccctcaggtgccagtgctatcgttttgcgtgttggcacaatcgccgtgcctgataaggttgacatatcaggcagtgtactgcctggagttgcgtttccgtgccaacagactcgtatccatccgagatggagcgagcagtcgcttcgagcgtaacgtcgtggaagagttcacgcccattcagggtctgaaagccttcctctccaagtacgtggacgagtcggcggtctacaggggacgggcctcccacgaggacgacaatccgctgtcaccaatgggaatggaggacaacttcggtggaccgagcagtgttgcgggggtaagtgctggtggatcctcaccatttttgggtactggaatgcggggaccgcagtcgccgagagacagtggcctgcgttttcctgccccccacactccgccctccagttcaaatccgcacacacccgccagtccgcatccaagtgcgggggcaggtggcggcagtggaccccagggacacggcaacttcaacctgacgtcaccgccagcgccacatatgccacatccgtcgccaagcggcttgatgccgtcgtctccgctaaatcctcagcccagtccccacatggtccatagtcctggacccaacacgctctacatgcagagccaccaggactctcccttcaccgccatgtcgccggcgaataacaattggcccggatcccccagcatgccgcgcccatctccacgacccggacagagtcctgatcacaagagcaccggtggtggagcaggagtggccggtggaacggatagaggaggctctcggggcactctcaatcggccctgggctggagcagtacctactctcctcacccatgaagctttggagactctgtgtcgtcccagtccgtatccgaacaaggatatcaatgtgccggacatgagtcctctagagcgttttctaggctgcgtttatatgagaaggcaattgcacagaaacattcagagcgaggagacgcttaccgccctaaacagtacagaaccaggagtggtgctcttcaaggtcgatggactgcagtgccaggtggtgctgaatcagatgcacatgcagacgctgcacctcaaagtctctcagctgccgcccatgcccgacaagcatccgccgccgttccagcttagccaggacgatctgctggttatagagcagtactttgacaccagagtggcagctccaccataccgacccaattccctgcacagcatctgccggctgttgaacctgcccgcccaggtacttaaggatttcgtacagatcatgcgtttggatttgaagccggagctgggtggcgaccagttgaaatggacggtgcagatatgtttgcgcatgccgccctcggcggttcccattgtgcccagtggcaatgcatgcgtggttatgggtcgcatgaagatactgttcttcctgcaaatcacgaggataccctacggcgcggtcataggcgtgggcaaggactggaaggacagcccctctttggtgttgcccattgtgtacgacattcagacgaacgtcacccagctggcggaacgcacaggacaagtgatctcgcccacaatgaccgctgctagcactcttcttcgacgctttgccgagttcaatgcgcaacagaatcagtgtacgctcttcccagccattacggatcttctgacgaacctccagctggctgccgagatgccacagcccccacccaaccaatccataggacctcccgtaggcgtgggtgtcggagtgggatccagtccgaatccgatgatgcccatgcagcagctgccgcagcaagtgggaccgcagggcccagtgggtcccggcggctacccgcagatgggccccaatcccggtggcccgcagtga

SEQ ID NO: 594 - protein, 1531 aa, DROSOPHILA
MAPTPLPLEQMPGVGGGGGGYLPAAQEGGPRINTMSMSVLIDFIIQRTYHELTVLAELLPRKTDMERKVEIYNYAARTRHLFTRLNALVKWGNSVSKVDKSSQIMSFLDKQNMLFVETADMLARMSRETLVRARLPNFHIPAAVEVLTTGTYNRLPTCIRERIVPADAITPAEKRQTLLRLNQVIQHRLVTGKLLPQMREFRIRNGRVTFEVKHEFSVSLTVMGDNPTVPWRLLDIDVLVEDKETGDGKSLVHPLQVNYIHQLIQARLVENPNALSEVYNCLHYFCQSLQLEVLYTQTLRLNYERLDDNNITVEEYVPGVKLTVSYWRDLKSELGYRLTVQSDPSEIGRPLAVVHVPSLGAKESAEVADRAVRSEHLSMERLIVHTVYIRSVSRLSDLKLEFQAFLKDVDFNLQGTPAILTVPVLSPCLRAEQIHITIDTHTGMFRCHVPKHLDCPIMEEMQDCLNGDRSKLPALLSELRFWITHRRCDKTLQHLPATATETLPFLVQPDQEILQPGRHKIYVKLHRHPNIVLVIIHLVVQLKEKTTMPNEMEYTFHLGFVAYQKDELDVIDDSAMQLVSIVAQPHSDIPKCYTKLMRLIEFDTFVATHGPGTEVDAEVSPHKRKSNGDLLAPPAKQQKTIFPAYFIPELAHVVAMCDEKIPFMNLAQTLSKHNIPHSGLQVEANATSLVLKILALPQPGKTTFATQQQQQQGAPAVAGENKPSGTSGLPKIDSHVWDDLMRRVLSISIRSQTNKNSQVRIWVVEFVFYSTPLQSSHPKEQGSRRTVYLTYEQANYDFSKTVEDLLNDWSKIVYLYTLVYDFAEQLLNKVSCNIYWSVQSHGFRLTFVGGMSAVNGHSMMRDQLAQHLNQQHSITQIAQILHETYNPLSSIAKLPVLPFLGIPRPQVPVLSFCVLAQSPCLIRLTYQAVYCLELRFRANRLVSIRDGASSRFERNVVEEFTPIQGLKAFLSKYVDESAVYRGRASHEDDNPLSPMGMEDNFGGPSSVAGVSAGGSSPFLGTGMRGPQSPRDSGLRFPAPHTPPSSSNPHTPASPHPSAGAGGGSGPQGHGNFNLTSPPAPHMPHPSPSGLMPSSPLNPQPSPHMVHSPGPNTLYMQSHQDSPFTAMSPANNNWPGSPSMPRPSPRPGQSPDHKSTGGGAGVAGGTDRGGSRGTLNRPWAGAVPTLLTHEALETLCRPSPYPNKDINVPDMSPLERFLGCVYMRRQLHRNIQSEETLTALNSTEPGVVLFKVDGLQCQVVLNQMHMQTLHLKVSQLPPMPDKHPPPFQLSQDDLLVIEQYFDTRVAAPPYRPNSLHSICRLLNLPAQVLKDFVQIMRLDLKPELGGDQLKWTVQICLRMPPSAVPIVPSGNACVVMGRMKILFFLQITRIPYGAVIGVGKDWKDSPSLVLPIVYDIQTNVTQLAERTGQVISPTMTAASTLLRRFAEFNAQQNQCTLFPAITDLLTNLQLAAEMPQPPPNQSIGPPVGVGVGVGSSPNPMMPMQQLPQQVGPQGPVGPGGYPQMGPNPGGPQ

SEQ ID NO: 595 - DNA, 3500 bp, DROSOPHILA
acaaggtcaaggatgtgcgcgtgatgatacccgtgctaagtggcttaacccgatccgagctaatttccgttctgccgaagctgattaaacttaatcccgctgtggtcaaggaggttttcaatcgattgcttggtatcggtgccgaattcgcgcatcagacgatggccatgacccccactgatattctcgtggctttgcacaccatcgatacgagtgtctgcgatattaaagccatcgttaaggctacatccctatgtttggctgaaagagatctgtacacacaggaggtacttatggctgtgctgcaacagcttgtagaggttactccgctgcctactctgatgatgcgcacaacaattcagagtctaactctgtacccgcgtctggcaaactttgtaatgaacttgttgcagcgtctgataatcaagcaggtctggcggcaaaaagtaatctgggagggctttttaaagaccgtgcagcgcctgaaaccgcagtcaatgccgatcctgctgcaccttcctcccgcccagctggtggacgcactgcagcagtgccccgatttaaggccagcattgtcggaatacgcggagagcatgcaggatgaaccaatgaatggtagtggtataacccagcaggttctggacatcatctccgggaaatcagttgatgtgttcgtgacggtaactatgcattttttgatttagtcttaaatgaaataatagtaactcaaataccgaaccaatatcgaagacgttcagctactacatacgagtatcttcttttcaggacgaaagcggcggttacatcagtgccgagcatattaaaaaagaggcaccggatccatcagaaattagtgtcatttccacagtgcccgtactgacgtctctagtaccactaccagttcctccccccataggcagtgatcttaaccagcccctgccgcctggcgaggactagttgcagtttaattgttttgtttgctcatacacatttttaaattacttaataagataaggtctataattttataaactcactgttctaggcgataatacataaaaccaaggtcttgaccgcacccacatacattataaaggaatataattttgtttgttaatgatcaaaagattgggagtataccccacgcaaataacacaaaaatttcgattctgagtggccacgaccatttacggatcagttcattgcgagcactgtcatcggcgtaatacaagtgtttcaataatttcagtacctttaaaatacctttgaaagtacgaaatatttaattagaacattgtacataattacaaacagatgtttttaaaaagatgtggaaaaaattcattgtacgctgagattacacggcttacagctctacttcggctaccattttatcgccagctaaggcagcaagaatatttctggctgtaatccgggacatttccttgcgcgtttcgatgtcagcgctgccaatgtgggggagaataaccacattatccagtttcagaagaggatcgtcgattggcaatggctccggcgtcgttacatccagaccagctgctagaattcgtttggttttcagtgcctcgtacagggccttctggtctacaacgccaccacgcgccgtgttgataagaatgcagttgggcttcatcttctgaaaggcagtggcattgaagatttccttagtctccggggttagggcgcaacagactacgattaagtccgactcgcgaagcatctcgtcaaagtccacgtgccgggcattcacagcagccgcctccttggggcgcagtgatcgtgttgtgtatgttatctccgtcggcttaaatggcacaatgcgtgccgctatctcttggccgatgcggccgaagcccagcaggccgacccgggagcccttcagtccctggccgcacatccacatgggggcccacgacttccagccgccgttgtaaacctgcttgttggcctcgaatagtcggcggttggtggccagaagcagggcaagcgttaattctgccgtggcatccgttaggacgtccggtgtgaagcccactcgaattccacgtttcctgcactcctccacgtcgatgtgatcgtaacccaccgaaatagttgccacgcacttcaactgaggaccggcagcatccaagacttccttgtcaaccttgtccgttagagcgcagtaaagggcatcttttccggccacgacgcggataagctcggagcggggcaccggattggtctcatgccaggtactcacttggcagctgagcaaaatcgtgcatgtcgaaattagtgtctatgctaataactaaatagccggttacaacaacaaaaacaaacctcttgcgcagcagctccagaccgctgtcatccacatccggcctggttacgtacaccttgtgttgggagctcatccttcgaattatgtgtccctgaatcaataagtttctgacttgtccgaacggcaaccgcggtggcattgagttcaaaatttccaagcaagtaggtaaacaaagtaacaggttccgtaagtgtgcccgaattttacattacacattaatccgctaaaaaaggaatatcacagacatcggggatctcgactttagactaccctgtacatcggcttaaatttttagctacttattaccactgcctttaccgccatagtttaatttttttattcgtatttttatattttcatgttgaatattaaatatatataaataatattaataccacactcaaaaaaaatattatgaataaaagtatatttactttttaatgataacggtatgtctctgtcaatatcttctgtcaatatctttgacggaaaacatcagaattattattattataacttacttttctctcacaaagaacgagtaagacatacgactacagcactacagggtatacatcacatttgaccacaaaactttcgagtctaaacattagatcttaaatttttcgacattgcttagaagttttgccgggcgggctcgaatatcttacatgaatggaccaagcctcctcgtaaagttgaccacacgtgccttcctgttattcaacggtcgcccccagaatcgctggctaaagtcgatggccaatagtatggtttgctcgcgaggcgtctctccagaattgattgcccagctgggaaaaccacctaggatgcgcacaaacccggcattccggaaggtggcaactcctgagttcaaaagcatatttacccccgagctgaatgaccttgtggcgctctttaagaagtacgactacgagctgcggatcgccggcggagctgtgcgcgacattctgatgggcattccaccgaaggacatcgacttggccaccaccgccactccggatcagatgaagcagatgtttgagaaggaggaggtgcgaatgataaacgcaaacggcgaaaagcacggcaccatcactcctagaatcaatgacaaggagaacttcgaggtgaccacattacgcatcgacat

SEQ ID NO: 596 - DNA, 1424 bp, DROSOPHILA
aaattttgaactcaatgccaccgcggttgccgttcggacaagtcagaaacttattgattcagggacacataattcgaaggatgagctcccaacacaaggtgtacgtaaccaggccggatgtggatgacagcggtctggagctgctgcgcaagagctgccaagtgagtacctggcatgagaccaatccggtgccccgctccgagcttatccgcgtcgtggccggaaaagatgccctttactgcgctctaacggacaaggttgacaaggaagtcttggatgctgccggtcctcagttgaagtgcgtggcaactatttcggtgggttacgatcacatcgacgtggaggagtgcaggaaacgtggaattcgagtgggcttcacaccggacgtcctaacggatgccacggcagaattaacgcttgccctgcttctggccaccaaccgccgactattcgaggccaacaagcaggtttacaacggcggctggaagtcgtgggcccccatgtggatgtgcggccagggactgaagggctcccgggtcggcctgctgggcttcggccgcatcggccaagagatagcggcacgcattgtgccatttaagccgacggagataacatacacaacacgatcactgcgccccaaggaggcggctgctgtgaatgcccggcacgtggactttgacgagatgcttcgcgagtcggacttaatcgtagtctgttgcgccctaaccccggagactaaggaaatcttcaatgccactgcctttcagaagatgaagcccaactgcattcttatcaacacggcgcgtggtggcgttgtagaccagaaggccctgtacgaggcactgaaaaccaaacgaattctagcagctggtctggatgtaacgacgccggagccattgccaatcgacgatcctcttctgaaactggataatgtggttattctcccccacattggcagcgctgacatcgaaacgcgcaaggaaatgtcccggattacagccagaaatattcttgctgccttagctggcgataaaatggtagccgaagtagagctgtaagccgtgtaatctcagcgtacaatgaattttttccacatctttttaaaaacatctgtttgtaattatgtacaatgttctaattaaatatttcgtactttcaaaggtattttaaaggtactgaaattattgaaacacttgtattacgccgatgacagtgctcgcaatgaactgatccgtaaatggtcgtggccactcagaatcgaaatttttgtgttatttgcgtggggtatactcccaatcttttgatcattaacaaacaaaattatattcctttataatgtatgtgggtgcggtcaagaccttggttttatgtattatcgcctagaacagtgagtttataaaattatagaccttatcttattaagt

SEQ ID NO: 597 - protein, 325 aa, DROSOPHILA
MSSQHKVYVTRPDVDDSGLELLRKSCQVSTWHETNPVPRSELIRVVAGKDALYCALTDKVDKEVLDAAGPQLKCVATISVGYDHIDVEECRKRGIRVGFTPDVLTDATAELTLALLLATNRRLFEANKQVYNGGWKSWAPMWMCGQGLKGSRVGLLGFGRIGQEIAARIVPFKPTEITYTTRSLRPKEAAAVNARHVDFDEMLRESDLIVVCCALTPETKEIFNATAFQKMKPNCILINTARGGVVDQKALYEALKTKRILAAGLDVTTPEPLPIDDPLLKLDNVVILPHIGSADIETRKEMSRITARNILAALAGDKMVAEVEL

SEQ ID NO: 598 - DNA, 8061 bp, DROSOPHILA
tttgatttgtgttgcactttcagatactgcatctgcctatgcgttacaccgcgcactttgatcagttacatttaatatcctgctccacataaagtcttccaataccacttcaagtgatataaccaaccttgagatacgttcaaaaaatctagtttctctcaaaaaaatacagaattactctccccatatctttgaatatttttacactgaattatttgggtctccagcacctgcctgtttacaaaaagaacgacagacctcagtgaagcagatggacttcctgttttgttcctttaagaggggtcgtttgtatttcagattcgagttcaggaatacgacctttagttattggctaaatgtgtatcttacggcatcctagtcggcagtgcttagaagtgccttccagaacaatcgctataaaagcctatgcctgagattgactctcatatgcggctgatagatcacgtgctcatacaaactttaaaattgttgttaaccacacgccatttgagagcgggacggagcacagctgaagagctgacaggagtaaaaccggtttgagcggcagatgtttcatagcttcctctttaatgactcatcgttatccttcttgagtcaaaatgccgcacttgagttcttttggataacgaggaagtccgtaatgtaaagaggcagctgaaaacgagcctttatttaggaaagggaagacagcatttaaaagggaaaaatataagtcggataaataacttataaataaatttaaatttaaatgttgcacatgcttgaagctaaacgctgcttgggaaaagtggttgtccagggatttttttacaaatagccagtccaacatagaaactgcatcattgccaaactcactcaaaatccatcccctaggatcctttgaaacagcacaacaataacaataagcaggattgagtgcgtcgagcagccgggtagccgctgagggatgaactaagatcagtctgagccagaacaacgaaccgtacggatacgctcagcggagtctctcgggacactacatcgcgacattgatttcatttagcattgaaacagtatggttacatatcactttcggtcaagcctaactcagtttagtgtgccacagctcgaagcgccaagtggcgaaagtgcaaagcgcagcaaagtgcgaaaagaaggcaacaagtcgaatatgaacacaaacagtcccagcaaaaatgtgactgtgaaatcgtcacagctatataggtatatagcgcccaggaaccgatccatgcttgtcatgaaggatccacggagcatgcgaaccttacgacggtaagctgatttggtagaaatgcgttcatacgcaactacgccgcattgatgaaataggcttcaacacactccttgaactaggttttagcgcgcttcttgaactgaacatctgcctgatgttgagaccgttttctggggatcaggggcaaaactgcattccttcacgtatcccaaacttaaatggtttttgtaacgagcacgcaaagtattcatagcctgctgtttgctctgcagttcgtttaaagaaaaatcatatgaggatcggcccgaaggtaaagaaaattacaaagatattccaaagataccccaggggcacactaccttctcctcccgctgtcgtcgtgtgagaggatgtcctgttgattcctaattccccaccccagattaccatcggcctttgctagcatttagggtcgtatctcggtgtgtttgttttctttgtttccgacggttctcgaaatacttgttctttgcctacaataagcatacggaaatggaattcgcgaagtttacataggattcggttcgagaaaatcctttttcggccttttccgagcaacttgtttttgtattgtaaaatatacctgcgtcaccaattcaggaccgtcgccgccacattttcacacgcatccgtttggcgagtggcgtaaccttaggaaagatttctttgaaatctataatttgctttacaagctgaaccctttttgccaccaaataacaaactaccaaaatagtgtacatactctactgactactttcgtttagacactcaaggccacggcttcgttcattaaacaaaatgttttctatatctttcagaatgccaaaacctggaagcaatgaaatgggaacaaccagtgactgcgctgcgagtttggtaagtgaaataatttattgaattaggagttcggtattactccaaggcttactccaagtactcagctctgaatctgtagaaactaattcaatagcggggaagtcattcaactcgggcaattaattttatgacagtgtaggagatcttgccccaagaccaaactttctctgagctgccgataccggcagtaaggtggcagagagttcaatagacagatcacatttctgcctaagatatttatataagaaattatccaatgacgcggattcgaaaaagcgtcgatgcaaccgcaaatcacatcgccctgcataacaataggggctttcttactactcccccgatcaatgcactgggcacaaagctacttgcaatttattcacggcaaccgcatcccagaagagtagggtgtcacggttgagtaaatgctacactaaagccctcactgtcttatctgattccataaatgagcccgaaatatgatctctgtaaaaggtgtaaaggtctggttgtgaccaccatcttgaatgagcgatataatggcgactcgtcattaaatcaatatctcaattaaggcttcgtttgttgcattttgattaggttcccagtcacatgccgctgagcatccttccattgttccatgcaggtgatgtcgaaggaaaaactaatcacgcaagacaaaacatgaaaacagtcagcctggcagactgccattggtcaagccatcagtctgttggcgaggtcgcagacaataagttgacccagcctgtgcaacaaaggcagacatctgagacaagtggcagaggcccgtgctatgccattctcgccttaatctaatcaaaccacttccagcgagactcctgacaatagagctcgcagatagagttgatctcaaaggcattatgtcccataatgcaagggccaaactacaaggggtctctacacacttacagccgggcgacgacatcaacgctcggcagtagtcgcagttctcatttgcaagcctcgttgccggcaattgcggtctatcagttattggttatcgctttgcccggctacacttgccagtgctgtttgcggaagtcccgctggtccgctgaaggcgctatgaagaagctgataatacctacgctcatggacacctatgggctgattaagttctgggacttcgattcgggcgcccctgcaagtgtgtcgctgaccaccagagggagagtggaactcagcgtgccagtgggcaatatcatgcccggcgagcgctacaaatggaaatctcgtcttcttcaggtcgggtctttgctgctagaaatattctactatatttactattatcattaattgatcgtttcgagagcggtgccctgataaggtaatgatattttggccattccccgccagtaccctcggcgcgatcaagcacaagcagtattattgccaaacgaaaaacaaaacccgataaaaatgtcaaccgattgcctatgtgtgagtgtcggagcttacttgccttctgttacctttcgtgagttttgaaatacgactctaaatctggcaataatcatttgaagcatacttgtcacagctaccagtaccccagaacgctttattagcgttccgtttttgttaacaaaattgttgttcccagatatagttatgacgattcctatttgtgattcatagttgttttgttccgaacctgggctgatacgaagggataaataatgctgcgaattgataaaatacttgtggtttcgcgtgggaaggcgagttccgttgaagtcgcagcactgcgttacatagctgcatctattgctacagccacgttggattctcaatccgtatgccagccggtcgataatgcaacttattttatcttatttacagtcacagcaaataaaggcggtctccagtccaacgctgtccgagccgtgcttagaggagcagccacaaaaaggaactgaaagtacggatgtggccaacacaggcagcagcgccggaagtggaggcctaggcgtattgcagaaattcaaacgcaccttgaacaactttaacaacaaaaatcaattgcacatctctccgctatcaccagcggcagtaggtaacaatgccccaaaaactaagacatcgccaacaacaacaaccgcatccatagcacctatgataacgacgaccacagctagcgatcctggctcagaggccggcgatacgagctcaggaaaataccggtttgggccccttatttggcgttcttccaaagaacgccgtaagacgaagtacaaccgacgcgacaagtgtaattctggtgattcaggcatacagatcgaactagaacaggatgagcaatactcccgtgcgacaatggccgtgagccgccaggatgagccccgcgcttttgcgttaaccaatggatcgtgtggtgtcgcgctctctaaaatgcgagccatacgtcgcaccaactctgcaaaggcgagcagcatccttgggccctttattgttaaaaccaaaatagccaagcacttaaacattggagagtctgacaaagccgagcgcaaagcgcccgagtctctacccacgcgatcgcttagccaaccgaacggcctagagtcctacggtatgggtcgtcccgatcttgaggatagcgacagcgatagtgtcgcgtcaaacgaggaaggtaggttaaagcttaagtgcactgtacaatttcagccagacaaccttaactattatggtgtcttttttgtccccagctataagcttctacccaaccacctatgcggaggtgctttacaacttcacggccggcggtcctcaagaactagggctagagagaggaatgcttattgaaatactgcgcaaggaagttggaccctggtggttcggccgaattaagaaggaggaaaccaatctggtggaagacatattgggtcctgagctgggctggttccccaaggagtttgtgcgcattattcactgtccagagacggacaatttctttatagcgcacagggctgccgctgatgaggcggcggctgaggaagccactgctcgtgcagaggaagggtctgttcctgttcccgttgcggcatttgccgaggacacagacgttaccgtcaccacagaccaaagcaacgtcacccttatagtcattgaatcaccaccaactccgagtgcacccagtgtggactttgttgcccaaccggatcacagcacgatcatacgccgcagtgccgttcgcgaactgcttgatacggaggtcaattatgtaaagctgctagcagccatttgtgatgggtaagagatcaagacctaaccagtcttcagcacatatttactttgtgacccattttagttacctgccagctatgagcaagcgaatcgatatattttcgccaaacagtattcggcttatcttctccaacataacggccatttataagtttcagcgaaagtttcttgaagccttacgacgaggcatcgagcaaaaccaagttgccaaagttttcctcaaaatggtaataaattaactaaaaaaccaaaagagacaaccgtttctaatacatcatccttcctgcagcacaaaggtttcctttgctactccacctattgtaacgcataccctcgagccctgatagaacttgagacctacgatcgcgtaaaagacgcccgtacaattcttgagaagtgagtaattttacttttaaatttcgacgtcacacctaacaagtatttaaattttagctgtcgcgaatcccaaaacctggccgagctgcccctctctgcgcacctgctggcacctgtgcaacgaatctgccgctatcccctgcacctcaacgagattattaagtcggcattggaaaagggagccaaggaagggaacgatacagacggtgcgaagtcagctggcaagacaactgactatgagcaactcgatgttactgaactagacatacccgactctcaagatactgtcaatttggcgctggaagcgatgcgcggcatcacagaagcagtcaatgagggcaagcgccacagcgagacgattgcaaggcatcaagccagcttccaaaactttaagggcccgccgctgcacttgcatagtgctcgcttcttcctgcaagtcgatgccacgcggcagaaacagaatctgtggaacagcagctatactctgtttctttttgataaccagctcgtttactgcaagcgagatattattaagcggagccacttcatctacaaaggacgcatttttctcgatcgctgtcgcgtggtaaacgtgagggatggaaaaatgtttgggcacaccattaagaactccctacgcatatatagcgagtctcgagacaaatggtacgattttagtttccgttcggcgaaccgcaagcatcgcttcctaagcactctcgccctggagcgccagtttggtggtaaagctctatacgtatcagagatgactggattcgagtacaattacgaggagcggccgggcgattactcagaccaatcagattacgatgcacaagattttgaattagcaactggggtcaccagtggtgagagctcactgccggagtcgccggccaaatctacgtctcgcctgtgtgagacactgccaaaaaaatctcagtccagggacggaatatccagcgctgaaaactctcaaatagtcactaccacatcgacaggttcgctaggaaggcggcattttggcaattggttccgcaagccaaagagcgcaaactgcactccaagtcaatcaccgacgcataagccaagcttcgacgcagacgctacgctcacggaagcccgggttgctgcgatggaactggctgaagccgcggccgcactagtgccaacggacagctcctcagcgtaaatactagggacagctttgtatcgaatcgcaatacaaatacaaacagcgtaaagcaaacataaattcgtggtagaacacacgatataaaatatttgttacattaatattaaattgtcttaaattatagtaacatgtagttgaccagtgttacacttcgtagatgtttcgttagttacccttgggtttttgttcaatataaatgattgtgtttctattttatcgtgtatattcttgaattggagtcattatttgcaattaatattgcgataataggaatattagatgtacaataaaaatacaaatattgtatacttctggcatttcaatgcagttttatataaaaatgtcgccgactgctagtctaaaatcctgtccatacttgtaattttaggttacgtgataattcgataataaatacccgaaaagtaatttaattttctgttcacgttcgtatgttccaagcagaagagccgatatttaaaagcgtctggaaaagtttgctacttaattatgtcaaattttaacatgattaacaaagactatgtatctttgttttaatcgtgcattgaaacaggatagtacccatgttatttgttacttatttgttgggctaatccactatgatactgcaactaaacgacacaaataaataaacctactaataaagaaactaggttattgcatataaaacatatttgttctatacaaaaattggttgattggtcaatttgaaatcctgagaattagcaattgttaactttacaatacaagacaagcaaaaaatgcacccgaacaattgagcgaatttaattttttctaagagaatcacacaatgtatcttggtagtattttagtatctggccaatctgttggcaagaattattttattgtctaaagaggtgattgaaaaatttaaaaagcaatttactatttaatagactttgcaaaacaaaacgtattggagtttgctaaatatttcttttttaaatatataggaaaa

SEQ ID NO: 599 - DNA, 3111 bp, DROSOPHILA
accgtacggatacgctcagcggagtctctcgggacactacatcgcgacattgatttcatttagcattgaaacagtatggttacatatcactttcggtcaagcctaactcagtttagtgtgccacagctcgaagcgccaagtggcgaaagtgcaaagcgcagcaaagtgcgaaaagaaggcaacaagtcgaatatgaacacaaacagtcccagcaaaaatgtgactgtgaaatcgtcacagctatataggtatatagcgcccaggaaccgatccatgcttgtcatgaaggatccacggagcatgcgaaccttacgacgaatgccaaaacctggaagcaatgaaatgggaacaaccagtgactgcgctgcgagtttgtcacagcaaataaaggcggtctccagtccaacgctgtccgagccgtgcttagaggagcagccacaaaaaggaactgaaagtacggatgtggccaacacaggcagcagcgccggaagtggaggcctaggcgtattgcagaaattcaaacgcaccttgaacaactttaacaacaaaaatcaattgcacatctctccgctatcaccagcggcagtaggtaacaatgccccaaaaactaagacatcgccaacaacaacaaccgcatccatagcacctatgataacgacgaccacagctagcgatcctggctcagaggccggcgatacgagctcaggaaaataccggtttgggccccttatttggcgttcttccaaagaacgccgtaagacgaagtacaaccgacgcgacaagtgtaattctggtgattcaggcatacagatcgaactagaacaggatgagcaatactcccgtgcgacaatggccgtgagccgccaggatgagccccgcgcttttgcgttaaccaatggatcgtgtggtgtcgcgctctctaaaatgcgagccatacgtcgcaccaactctgcaaaggcgagcagcatccttgggccctttattgttaaaaccaaaatagccaagcacttaaacattggagagtctgacaaagccgagcgcaaagcgcccgagtctctacccacgcgatcgcttagccaaccgaacggcctagagtcctacggtatgggtcgtcccgatcttgaggatagcgacagcgatagtgtcgcgtcaaacgaggaagctataagcttctacccaaccacctatgcggaggtgctttacaacttcacggccggcggtcctcaagaactagggctagagagaggaatgcttattgaaatactgcgcaaggaagttggaccctggtggttcggccgaattaagaaggaggaaaccaatctggtggaagacatattgggtcctgagctgggctggttccccaaggagtttgtgcgcattattcactgtccagagacggacaatttctttatagcgcacagggctgccgctgatgaggcggcggctgaggaagccactgctcgtgcagaggaagggtctgttcctgttcccgttgcggcatttgccgaggacacagacgttaccgtcaccacagaccaaagcaacgtcacccttatagtcattgaatcaccaccaactccgagtgcacccagtgtggactttgttgcccaaccggatcacagcacgatcatacgccgcagtgccgttcgcgaactgcttgatacggaggtcaattatgtaaagctgctagcagccatttgtgatggttacctgccagctatgagcaagcgaatcgatatattttcgccaaacagtattcggcttatcttctccaacataacggccatttataagtttcagcgaaagtttcttgaagccttacgacgaggcatcgagcaaaaccaagttgccaaagttttcctcaaaatgcacaaaggtttcctttgctactccacctattgtaacgcataccctcgagccctgatagaacttgagacctacgatcgcgtaaaagacgcccgtacaattcttgagaactgtcgcgaatcccaaaacctggccgagctgcccctctctgcgcacctgctggcacctgtgcaacgaatctgccgctatcccctgcacctcaacgagattattaagtcggcattggaaaagggagccaaggaagggaacgatacagacggtgcgaagtcagctggcaagacaactgactatgagcaactcgatgttactgaactagacatacccgactctcaagatactgtcaatttggcgctggaagcgatgcgcggcatcacagaagcagtcaatgagggcaagcgccacagcgagacgattgcaaggcatcaagccagcttccaaaactttaagggcccgccgctgcacttgcatagtgctcgcttcttcctgcaagtcgatgccacgcggcagaaacagaatctgtggaacagcagctatactctgtttctttttgataaccagctcgtttactgcaagcgagatattattaagcggagccacttcatctacaaaggacgcatttttctcgatcgctgtcgcgtggtaaacgtgagggatggaaaaatgtttgggcacaccattaagaactccctacgcatatatagcgagtctcgagacaaatggtacgattttagtttccgttcggcgaaccgcaagcatcgcttcctaagcactctcgccctggagcgccagtttggtggtaaagctctatacgtatcagagatgactggattcgagtacaattacgaggagcggccgggcgattactcagaccaatcagattacgatgcacaagattttgaattagcaactggggtcaccagtggtgagagctcactgccggagtcgccggccaaatctacgtctcgcctgtgtgagacactgccaaaaaaatctcagtccagggacggaatatccagcgctgaaaactctcaaatagtcactaccacatcgacaggttcgctaggaaggcggcattttggcaattggttccgcaagccaaagagcgcaaactgcactccaagtcaatcaccgacgcataagccaagcttcgacgcagacgctacgctcacggaagcccgggttgctgcgatggaactggctgaagccgcggccgcactagtgccaacggacagctcctcagcgtaa

SEQ ID NO: 600 - protein, 1011 aa, DROSOPHILA
MVTYHFRSSLTQFSVPQLEAPSGESAKRSKVRKEGNKSNMNTNSPSKNVTVKSSQLYRYIAPRNRSMLVMKDPRSMRTLRRMPKPGSNEMGTTSDCAASLSQQIKAVSSPTLSEPCLEEQPQKGTESTDVANTGSSAGSGGLGVLQKFKRTLNNFNNKNQLHISPLSPAAVGNNAPKTKTSPTTTTASIAPMITTTTASDPGSEAGDTSSGKYRFGPLIWRSSKERRKTKYNRRDKCNSGDSGIQIELEQDEQYSRATMAVSRQDEPRAFALTNGSCGVALSKMRAIRRTNSAKASSILGPFIVKTKIAKHLNIGESDKAERKAPESLPTRSLSQPNGLESYGMGRPDLEDSDSDSVASNEEAISFYPTTYAEVLYNFTAGGPQELGLERGMLIEILRKEVGPWWFGRIKKEETNLVEDILGPELGWFPKEFVRIIHCPETDNFFIAHRAAADEAAAEEATARAEEGSVPVPVAAFAEDTDVTVTTDQSNVTLIVIESPPTPSAPSVDFVAQPDHSTIIRRSAVRELLDTEVNYVKLLAAICDGYLPAMSKRIDIFSPNSIRLIFSNITAIYKFQRKFLEALRRGIEQNQVAKVFLKMHKGFLCYSTYCNAYPRALIELETYDRVKDARTILENCRESQNLAELPLSAHLLAPVQRICRYPLHLNEIIKSALEKGAKEGNDTDGAKSAGKTTDYEQLDVTELDIPDSQDTVNLALEAMRGITEAVNEGKRHSETIARHQASFQNFKGPPLHLHSARFFLQVDATRQKQNLWNSSYTLFLFDNQLVYCKRDIIKRSHFIYKGRIFLDRCRVVNVRDGKMFGHTIKNSLRIYSESRDKWYDFSFRSANRKHRFLSTLALERQFGGKALYVSEMTGFEYNYEERPGDYSDQSDYDAQDFELATGVTSGESSLPESPAKSTSRLCETLPKKSQSRDGISSAENSQIVTTTSTGSLGRRHFGNWFRKPKSANCTPSQSPTHKPSFDADATLTEARVAAMELAEAAAALVPTDSSSA

SEQ ID NO: 601 - DNA, 4706 bp, DROSOPHILA
gacttcaggatcgtcggcgtcgctctgtgattcatcttcatcttttggtttaggtggccaaaagaaatcgagatctggttctgtgatagcggacttaagatccaacgattcgcaggtctgctggcaccgttttatgtcatactgtaattttcgctcctccgctttatgggtcgcgcgcctcctataagcctctgtactgacttcctcgtcgcttttaatgccggccttgtttaggagatgtgccctccgcaacttctgccgcttgagggccaactctgcaacggctgcctcgcgcccaagtcctccacgaccgctctttatagttatccccacgggttcagtacgagcatccgaagttatgcccaacccagaaccggctttgtagcccatcttggccagtagctggaatcctttgttgtcggcggaaattggtttgttgagggactgttgaaggcgaacattgtctacgttcccggaagaagctgctgtctcccgttggcgcttcttcagctcatctttcttggactcgacttcaatctgccgctttctgccgcgattgtgcaccaaactcggtcggacatcttgcagactaatgagggaaggatgagagtttttcataaggtggttggttgttagttaggtgtgagtgtaatctcacccaaccaggaatttgtcggacatataatcctcctcctcgtcagacatctgtttgttttgtttacacttctcacttaagtgtgaccattgcatagttatctacagcattatttcgataatttataataacaatgatatctctgctatgaagattgagttccgaaaattgtattttatagtattggttctgtttagtgataaaaaaaacagccagtttgtgtcatttacttatttcttcaaaaacaaagtattttaagtaagcgcatgtaagatactaaacaaaatactatccgcttctgagcagctgttgcgctccgctgacgagtggacagttccgttggcgttccatgtgctcgtcccattcagaaggcaacatttgtgaaaattaactattagttgactaaaacgggtgcaatgggaactgtaagtggaaagtaaaattatttaatgcttattctaatccaaatcattgtagaaaaaggtcaaaatcagctcggtcaagcgggctgctcacctgaagtcgaaaaaaacaccgctttctaagcagcagcaacaaaaacagaagcaaaagcgcgaccaactgaaatcgaagcgcgaacagggtcagaatatattctcccaaaaggcgagaaagcgggacaacttagcacagcgtaaaaagcacaacaaattggcctccctgggcttggatccgctcgaggaagacaacgaggatggcgacgatgagatgcttgaaaacgttgcggacatgctggatggcgatgatcttgccctgctccaggctaacaaacgcaagcgaaaggccaagacgaccggcgagaatgatcctgaccaaggacaatccatcggcttggaaagggcctatgcctctgacacgaaaaaagagcaggacgcgcaaaaaataaagttggatttgctgccaatcaagtccagggatggtcagattatcacccgtacgacagaggtggattacatacctaagcccaagcagaaaaagaagaatgaagaagaagaggaggatgattccgaggaagacggtgatacggagtatgaggacagcgatgacgatgtggtcaatgatgtcgaggccgccaccgccgctcccgtccaaaaacttatctctaccacggatctacttattgcccggcagcaggagatcgaacgccagaagtatcgcattggaatcatttgttccgggctgctcgaaaagccagaggataagatgcgcaactttcatgctctgtacgaactcatggacgaaatcaacccagccagtcgacaggccaacctaatggccgtcagaaagctggccataatctctgtcaccgagatattcaaagatatcttgcccgagtatcgagtgggtcaggtcgacaccaagatgcagacgcttcgcaaggccactcttgatcgtgtaacctttgaaaacgccttgcttcaacagtttaaaaagttcctgcagaaactggaacagatcacagcgcaagttaacaggagaggtggtctaaggacgcctcagactgtgaagttggccaccgtggcagtacagtgcatgtgtgacttgcttgtggcacatccatactttaactacgttcaaaacattgcccagcttctggtgtatatgctgaattgcaattatgcagagatgcgaacggcggtccatcagtgcttccgcacagtcttttccaacgacaaacggttagaaatgactctttttatagtgcgacgcatcaatcacttgatcaaaacgaagcagaacaatgttcatgtggagtgcatcacctgtctgatgggccttaaaatcaagaacgtaaacctagatgccgaaaaggagaatgagctaaagcaaaagaagcttgagtcgcatcgtcaacgcttactaagcttgtccaagaaagagcgcaaaagacgtaagaagctcaccgaggttaacagagaactagaggaaacccgtgccgaggaaaacaagcaagcaaagcatcagaagctcaccgagatcataaagatggtgtttaccatttacttccgcgtgcttaagaacgatcccacctcccgcgtgctgagcgctattctagaaggattggcagagtgagtggttattgtaaatctctttcctggaattttaaatatagaggatgatttttaggtttgcgcacgtcattaatttggacttcttctccgatctaatcgatgtgctcaaccgcattctagaggaccaagacgagctgggctaccgggagcgattgcactgtgttcagaccatattcgttatcctttccggccagggtgaggtgctaaacatcgaccccatccgattctaccagcacttttaccgaaatatgctggcggtgcaggcaggcaaaaatcacgatgacttcgccattattttgcgaactttggatgaggtgctcgtaaagcgtcgtcgcaatatgagccagcagcgtctaatggccttcatgaaacgcttgcttactggaagtctgcatctgctccataatggcaccctggccacgcttggcacaataaaacaaaccttccagctcacttctgtgcttgacaacctattggatacagacactacgataggctctggtcgttacgatcccgaactggacgatcctgagtactgtaacgcagcaagcacagcgctgtatgagcttgcgcttctggcacgtcactatcatcccacggtgcgacggatggccgttcacattgctcatggagtgccagcaacgggcgagggagctttgcccacggaaattggcaaactgtatgtaataagacggcaactacatatgtgactctaacaattattactttccttagtacctcccacgagctgtttacgcaattcgacagcactcagatggctttcaatccgacaataccgctgccaaaagcgggtcaaccaaaactaaaaaggggcaaacacttatatattcgctcggacttcaaacaggagtacggaaaactgctgcagcaaggaaaagtttcacagacgaaggataaacaaaccttacaaattgattttttcagtgcacttcaataaagaaaaatttgaagattgaagtagagttataatgactgcggaatagtgtggaaagaaatgcaatttttaaacaatacccaacttgtttcccaatattaaacattcttccaaatacgttctcagttaaaggaagagaataccaagtgtgataccaggatttgattagccagataataatcgaacaaatttgttgttaaatcagaaaggtgcgagttggttttaaaacatgaaaccattcatttgcttagaacttctctgtaatatatttcaattaatgggatttttacaagttattatgtttggagctcctaacattctatatagaggctaagtctagagtcactaagagtagtgtcatataaccgggtacaagtcccaggggttcgccagaatttttcattcgctacctatgcattggtgcctcctcgttgtcgctgttgtccaacgctagctggtggcagatactctctattcccgcccgactgctgttgcccgaatccagccactgaactctcgggaagagctccggcggcagtggccagaagcccgacagcagctcccgatggcggtaatcgattggctccagtgctcgggacaatggcgggacgaaggacagccccagcgccatacgggctttggggctgagcggttggggtgggcgtggctgaaggataggacccccggccggagttatatccagcaacctgagacactccggtggctcgaagtgttccagtcgtggccagaggtgccccgaaggcagccgaggaagaagcggccggacggtagacgttgttggtattcgatgttctcagattggagccacttctctcggagtaatcatagatataggcattgttcgcatataagctgggcgccgaaacgcagtcgtactggttccaccacacacagactaatgtctcctggctgaagactgtgccattgggacacaggaaggagtaggtccggttgagggcacagatatggaacacctggcatt

SEQ ID NO: 602 - DNA, 2540 bp, DROSOPHILA
ttccatgtgctcgtcccattcagaaggcaacatttgtgaaaattaactattagttgactaaaacgggtgcaatgggaactaaaaaggtcaaaatcagctcggtcaagcgggctgctcacctgaagtcgaaaaaaacaccgctttctaagcagcagcaacaaaaacagaagcaaaagcgcgaccaactgaaatcgaagcgcgaacagggtcagaatatattctcccaaaaggcgagaaagcgggacaacttagcacagcgtaaaaagcacaacaaattggcctccctgggcttggatccgctcgaggaagacaacgaggatggcgacgatgagatgcttgaaaacgttgcggacatgctggatggcgatgatcttgccctgctccaggctaacaaacgcaagcgaaaggccaagacgaccggcgagaatgatcctgaccaaggacaatccatcggcttggaaagggcctatgcctctgacacgaaaaaagagcaggacgcgcaaaaaataaagttggatttgctgccaatcaagtccagggatggtcagattatcacccgtacgacagaggtggattacatacctaagcccaagcagaaaaagaagaatgaagaagaagaggaggatgattccgaggaagacggtgatacggagtatgaggacagcgatgacgatgtggtcaatgatgtcgaggccgccaccgccgctcccgtccaaaaacttatctctaccacggatctacttattgcccggcagcaggagatcgaacgccagaagtatcgcattggaatcatttgttccgggctgctcgaaaagccagaggataagatgcgcaactttcatgctctgtacgaactcatggacgaaatcaacccagccagtcgacaggccaacctaatggccgtcagaaagctggccataatctctgtcaccgagatattcaaagatatcttgcccgagtatcgagtgggtcaggtcgacaccaagatgcagacgcttcgcaaggccactcttgatcgtgtaacctttgaaaacgccttgcttcaacagtttaaaaagttcctgcagaaactggaacagatcacagcgcaagttaacaggagaggtggtctaaggacgcctcagactgtgaagttggccaccgtggcagtacagtgcatgtgtgacttgcttgtggcacatccatactttaactacgttcaaaacattgcccagcttctggtgtatatgctgaattgcaattatgcagagatgcgaacggcggtccatcagtgcttccgcacagtcttttccaacgacaaacggttagaaatgactctttttatagtgcgacgcatcaatcacttgatcaaaacgaagcagaacaatgttcatgtggagtgcatcacctgtctgatgggccttaaaatcaagaacgtaaacctagatgccgaaaaggagaatgagctaaagcaaaagaagcttgagtcgcatcgtcaacgcttactaagcttgtccaagaaagagcgcaaaagacgtaagaagctcaccgaggttaacagagaactagaggaaacccgtgccgaggaaaacaagcaagcaaagcatcagaagctcaccgagatcataaagatggtgtttaccatttacttccgcgtgcttaagaacgatcccacctcccgcgtgctgagcgctattctagaaggattggcagagtttgcgcacgtcattaatttggacttcttctccgatctaatcgatgtgctcaaccgcattctagaggaccaagacgagctgggctaccgggagcgattgcactgtgttcagaccatattcgttatcctttccggccagggtgaggtgctaaacatcgaccccatccgattctaccagcacttttaccgaaatatgctggcggtgcaggcaggcaaaaatcacgatgacttcgccattattttgcgaactttggatgaggtgctcgtaaagcgtcgtcgcaatatgagccagcagcgtctaatggccttcatgaaacgcttgcttactggaagtctgcatctgctccataatggcaccctggccacgcttggcacaataaaacaaaccttccagctcacttctgtgcttgacaacctattggatacagacactacgataggctctggtcgttacgatcccgaactggacgatcctgagtactgtaacgcagcaagcacagcgctgtatgagcttgcgcttctggcacgtcactatcatcccacggtgcgacggatggccgttcacattgctcatggagtgccagcaacgggcgagggagctttgcccacggaaattggcaaacttacctcccacgagctgtttacgcaattcgacagcactcagatggctttcaatccgacaataccgctgccaaaagcgggtcaaccaaaactaaaaaggggcaaacacttatatattcgctcggacttcaaacaggagtacggaaaactgctgcagcaaggaaaagtttcacagacgaaggataaacaaaccttacaaattgattttttcagtgcacttcaataa

SEQ ID NO: 603 - protein, 822 aa, DROSOPHILA
MGTKKVKISSVKRAAHLKSKKTPLSKQQQQKQKQKRDQLKSKREQGQNIFSQKARKRDNLAQRKKHNKLASLGLDPLEEDNEDGDDEMLENVADMLDGDDLALLQANKRKRKAKTTGENDPDQGQSIGLERAYASDTKKEQDAQKIKLDLLPIKSRDGQIITRTTEVDYIPKPKQKKKNEEEEEDDSEEDGDTEYEDSDDDVVNDVEAATAAPVQKLISTTDLLIARQQEIERQKYRIGIICSGLLEKPEDKMRNFHALYELMDEINPASRQANLMAVRKLAIISVTEIFKDILPEYRVGQVDTKMQTLRKATLDRVTFENALLQQFKKFLQKLEQITAQVNRRGGLRTPQTVKLATVAVQCMCDLLVAHPYFNYVQNIAQLLVYMLNCNYAEMRTAVHQCFRTVFSNDKRLEMTLFIVRRINHLIKTKQNNVHVECITCLMGLKIKNVNLDAEKENELKQKKLESHRQRLLSLSKKERKRRKKLTEVNRELEETRAEENKQAKHQKLTEIIKMVFTIYFRVLKNDPTSRVLSAILEGLAEFAHVINLDFFSDLIDVLNRILEDQDELGYRERLHCVQTIFVILSGQGEVLNIDPIRFYQHFYRNMLAVQAGKNHDDFAIILRTLDEVLVKRRRNMSQQRLMAFMKRLLTGSLHLLHNGTLATLGTIKQTFQLTSVLDNLLDTDTTIGSGRYDPELDDPEYCNAASTALYELALLARHYHPTVRRMAVHIAHGVPATGEGALPTEIGKLTSHELFTQFDSTQMAFNPTIPLPKAGQPKLKRGKHLYIRSDFKQEYGKLLQQGKVSQTKDKQTLQIDFFSALQ

SEQ ID NO: 604 - DNA, 3664 bp, DROSOPHILA
ctttgtgtgctttaaaaatatacacgaattaacggcaaagcgcggcctaacggtattttaaaacgcactcacactctcttacagcctttgtgaactgcacgtggcaaggatagaaaggagaagaagagaaggaaagagcatgctggagagagaggaagagtgctaggaatagccaaccaaagcaaaaaagtgaaaaagacaaacaaaactgtccgtccagcattcgtttttctacacacatttcgaaagaatgtaaatgtaaagtgaagaaaaacagagagtaagagagagacctcaaaactggccattggcaggccaaacacatacacaggcacaccaagcatacaggacacacaggccacacacgacacacacgcacgaacatccagtgctttgccgcagtcataaaataatcaagaagcagctaaatcaggcaaaagcaagacgactgcaacgtgctgatgttgacgaaacatctccattgggacgaataaagcaattagcaaaggttcacgattgttgccaccacactgccaggaggcggaggaagctggaggggattaagaatgcgggatacgtgggactcgcactcggactccgtggagtatttagcctaatcgagtgaagcgatgccgttgaactggagcacaaagatgcaggaccctccctgcaaaggtcagctatgtgcgagataacgggacaccggacagccaggcaaccaaagcgaaagaagcaaaagcagaagcaacagcaaaagcaaacgaaacgagaaatcgaactctccctgtgatataacttgcaccgtaatcgtaatctagctattagttatcgttatcgatcagtaatcgccgcaattgtaagctaagttatcgcacttatcgccgctctgctccgccgccgccaccgccagacctgcgcctaaaaactaataatattaataaaattaaataataccataatatatagtagacctcaaacccgaccaaaatcgagctaaaacatgggagacgagcaggacaaacgcaccggcaaggagaagctgctcttctacaccaccgccttcttcatcctgctgggcaccttcagcctgttcgccttcctcttcctggtgcccttcgtcatcgagcccgccttcaccacgatcttcatgcagttcgaggaggttccggcgctctgcgaaacgtacgacacggagatctactacggggccaagaactgttcgtggtcgtcctgccgcgagggctgcaccaaggacatctatacgtgcacccagattcgggtgaactaccgtctcaatctatataacttcaccgatgagttcaacttcacggagtaccacatcaatctcaaggaggcggagcgcatcctgccgcccgtcaagcgaacggatcgctatgagagagctctgaggagcgactacgagtacgataatctgggtggtggcaccggcttggacatcgacttaggcgccggccggatggaacagctcaattttggggatgccgacggctccaatggctacctcattgaggattcggaggatacgcgcggtctgagcgcttcgggtaccctcatttcggacgagcggaggccgttcgacgagatctccgagctgaacgagggcctgatggggaaccgctccatgtactactatgtgggagccaggctctttccgaatgtaaagggctgtggctacccgccaatgctcaactgtaccatctggctaaagaggtacaccaagatcggcatgaagttcccctgctactactccaaggtggacccaagtctggtcatcagcgacctggactactggcagaacaccctaaacttggtctactcgatggccattccaataccctcgttcatcatctcggtgatttatctgacgtatgcctacttcaagatatacaacgaggatgaggagacggcgccgttggacaagaacgccgaagacatggacatcgatgatatcgatgccgtggacgacagcgatggtgcagtcctggcggacaatgtggccggtagccaaatcattaacatggactcaaccaccaacgacagttgtctggagggtgtcctgcccaacggcggtcccggcatgaccgcctccatatcgcagggtggctccgtcaccacgccgggtccgtacatcgcgcagagtccggcgggctcgcagatgacgcccaactcggagatcaactcgttcggtcaccagctgaaagtccagatggccgacgagctatcgagggattcgctggagaacggagctatctccacgtccaactcagtgcaagggtaagacaggatatacatggggtaatcattgaaaggaatggagtggggttgaataatatatgaggtcatatgaatcattgcatacattgggtcagacttacggaaggggttctgtaaaagtatttgacaataggcgtttgcttagaaaagaaatattacgtatacgtaaaaagttcttttgtgttattttgtggcatacatttatgcgcaaaatggccaaatcataaatcctgtgaaataacttttatttggatttaaccatgacgttaactttaaaactcaaatgtatctttatttttttgcagaaacttgagcaagacgatgacgacgagtatctcaactcctcctgggccgacagcggcagtctgaaacgtcaggcgcatggtctggaaaatgttagattccgattcagaaaatgagccgctactggactcgtagaccgccgagcggtcagccacggaccacggagcaggcggagatcaccggagcggagacccaacccgaaaaagaactcatgaggcaaccgtaaagcgcgatacaccccaagtatttctacccgaaacaatcgacaacaacgcagcgaatgcgaccgaacctgaataccttcagagctgttagcggcacctaatgaactatgatagattatatttaccttatgaactagctactcggattcacacctacactcacacaaacactcacccacattaagcacgctagatagccggagtaactccggactgccacacccactcaaaattgcaatgcacgggcattatagtatgtgcacagtatctgatatctggaggatcttaggcgattggtacaaatacaataaaaacataggccgcatggactcgagcatggagtgctattcatatacctagaggaaaaactataatacttatacacgcatatacaaatatttacttgaattatttttctattcgcaacaatcgtcgtcgtctcgaggcagaaacacagataaactccaccaactccactaccccactacccattgcccaacatccacaatccaaaacccaaattccaaatagagcaaataaaagcaaaagaaaaacaaggcgcgcaacttatttacaaatcgataaatcgaggcgctgaggttttttaaatattgtaatgcccattcaagtgctgcaaaccgtaatgcgtaaaaaccgaaaaacagaaattaaatttaacaacaaacgaaagcatcgtgtatttcatttaaacgtaatgataaacgaaagcaagtcgaatgcctatatttgaagtaaattaaattaaattaaattaacattaacttaaattaacgtaaattaactaacattgttatccttcaaattaatgcggataaaaactc

SEQ ID NO: 605 - DNA, 1359 bp, DROSOPHILA
atgggagacgagcaggacaaacgcaccggcaaggagaagctgctcttctacaccaccgccttcttcatcctgctgggcaccttcagcctgttcgccttcctcttcctggtgcccttcgtcatcgagcccgccttcaccacgatcttcatgcagttcgaggaggttccggcgctctgcgaaacgtacgacacggagatctactacggggccaagaactgttcgtggtcgtcctgccgcgagggctgcaccaaggacatctatacgtgcacccagattcgggtgaactaccgtctcaatctatataacttcaccgatgagttcaacttcacggagtaccacatcaatctcaaggaggcggagcgcatcctgccgcccgtcaagcgaacggatcgctatgagagagctctgaggagcgactacgagtacgataatctgggtggtggcaccggcttggacatcgacttaggcgccggccggatggaacagctcaattttggggatgccgacggctccaatggctacctcattgaggattcggaggatacgcgcggtctgagcgcttcgggtaccctcatttcggacgagcggaggccgttcgacgagatctccgagctgaacgagggcctgatggggaaccgctccatgtactactatgtgggagccaggctctttccgaatgtaaagggctgtggctacccgccaatgctcaactgtaccatctggctaaagaggtacaccaagatcggcatgaagttcccctgctactactccaaggtggacccaagtctggtcatcagcgacctggactactggcagaacaccctaaacttggtctactcgatggccattccaataccctcgttcatcatctcggtgatttatctgacgtatgcctacttcaagatatacaacgaggatgaggagacggcgccgttggacaagaacgccgaagacatggacatcgatgatatcgatgccgtggacgacagcgatggtgcagtcctggcggacaatgtggccggtagccaaatcattaacatggactcaaccaccaacgacagttgtctggagggtgtcctgcccaacggcggtcccggcatgaccgcctccatatcgcagggtggctccgtcaccacgccgggtccgtacatcgcgcagagtccggcgggctcgcagatgacgcccaactcggagatcaactcgttcggtcaccagctgaaagtccagatggccgacgagctatcgagggattcgctggagaacggagctatctccacgtccaactcagtgcaaggaaacttgagcaagacgatgacgacgagtatctcaactcctcctgggccgacagcggcagtctga

SEQ ID NO: 606 - protein, 452 aa, DROSOPHILA
MGDEQDKRTGKEKLLFYTTAFFILLGTFSLFAFLFLVPFVIEPAFTTIFMQFEEVPALCETYDTEIYYGAKNCSWSSCREGCTKDIYTCTQIRVNYRLNLYNFTDEFNFTEYHINLKEAERILPPVKRTDRYERALRSDYEYDNLGGGTGLDIDLGAGRMEQLNFGDADGSNGYLIEDSEDTRGLSASGTLISDERRPFDEISELNEGLMGNRSMYYYVGARLFPNVKGCGYPPMLNCTIWLKRYTKIGMKFPCYYSKVDPSLVISDLDYWQNTLNLVYSMAIPIPSFIISVIYLTYAYFKIYNEDEETAPLDKNAEDMDIDDIDAVDDSDGAVLADNVAGSQIINMDSTTNDSCLEGVLPNGGPGMTASISQGGSVTTPGPYIAQSPAGSQMTPNSEINSFGHQLKVQMADELSRDSLENGAISTSNSVQGNLSKTMTTSISTPPGPTAAV

SEQ ID NO: 607 - DNA, 4061 bp, DROSOPHILA
ccaaggcttcccttaatctaacgctaactcgctaaattgctccgctgttttacattttggttcgcccaatccttaattgttatgtgtatgtttctgccacgctaaagatagtaaatacgtatacattaaaatatccagcgcttcgcggataggacagccactataaaaactcaaataatgaatccgcctttctaggtacccacatatgtatgtacaagcctgattacgagcacaaaagtcgcttgtgtgtccattttgaagaacaggccctttgatattgcacaaattgtaaatcttttgaagtccgtcttatgtttttcgcacattgtttaatgaataaatcgcttagaatgtagtcaaaagataaaatacaacatatttttgtaacaaagtgtaaatgtcttcagcgaaagtgcatattgtatactgtgaaagttaatctccctaataattaatcacgaaatctatataattgacttttaatttttaaataaacttaaaaatgtcaccaaaggtagcaagtggattgttataattggataattaagttcagctatgtttataatgattaataactgagttatttggaaaggagtagatgaattctaatatttgtctgaaaatggaattaattattaacatttattaattattttttgaaaccattgcagtttcagtatatttttgtctaatatatagtatattgtaacggtcatctgtatggtcacactgttttcacgtttttgcgtttgtttggctttttcatccgatcttgaattttggaattaatagaggtatatatttaaagattaattgatatttggagatctgcaagtcctctacaagctgctccagccttccatatcaaaggagcctgatttgcgtgctccaaactcaagaaaacaccagaatctaggtcgcacgtgtttggatgtttatagtgtccagattgaaggatttaacgattataacgaatcgtttacgtcactactttcgaaacatggacgtcaaggagctgcagcctcccagctcggtgcgcggaatgcaggagctgcaaagggaacagttccgaaagatcgttcaagttccgcgtttacgggtgcccgagtctcaggtgcaacgtgttatgccgctggtcaaaaagttcctgctgaaaatggagcacctgcatcctgtccgagctgtggaccaatctcgagagatcctactacatccaacgcctgtcaaaaactgggattccctgccaacagaggatctgcagaggcagaaagtcaatgccgagaacttctccttcgccgacctcgagttgaggtatgaaaattggagcgccaatgaaatcctgaaaagcgtgctacccacggaggaggaaggtctcacctcctactcccgcataggccacattgcccaccttaatcttcgtgatcatctgctgccctataagcagctcatcggtcaggtgctccgcgacaagcttcccaattgccgcacggtggttaacaaagcatcctccattgacaacacctaccgcaacttccagctggagctgatctgtggggaccccgattaccaggtggaaactaaggagaacggagtcccctttgagtttgatttctccaaggtgtactggaatccccgcctctccacggagcacgagagaattgtcaaaatgctgaaatcggacgatgttctctatgatgtatttgctggcgtgggtccattcagtattcctgctgccaagaagcgatgccatgtcctggccaatgacctgaaccctgagagttttcgttggctccagcataatgccaagagaaataagtgcttgcccaatataaagatgagcaataaagatggtagacagtttatcgtcgaggagctaagggaggacctgctaaagcgtctatgtaccacggatactactacctatggcatacatattacaatgaatctaccagcaatggctgtagagttcctggacgcatttcgtggtctctacagcgcagatgagctagcgcagttacctacaaacgtgtgctatcccactgttcatgtttactcctttgccaagggtgagaacaccaaggaattggtgcgtcaactggtggagagcaatctgggagccagcctggacgaaaacctgctccagggaataaattttgtacgaaatgttgcccccaacaaggacatgtatagagtgtccttcaagctatcactaaacatgctaaccactttaaaggaagtcgaggtcacgagaaaacgttatgcagaggaggagctggaggtcgccaccaaagtgaaatgtgtttgatacaatagatacaataaagctgtgatttccaaacaattaaaaagagtctccttgtatgcatacttacagatgggtcgcaacaaggcaaacaacaagaaggttactcctggggccgccaagccaaagtcggctctgaacaagtccaaaaaggccaagaacgtattcaaagtgggcgacggtaacaagggcaagggcaagaagcccaaggaagtgcagggcaagctcaagcaggtgagtggattggctcctgctggatagaatcccatcacgtacgggcttaaattgcagatcaaggaatctgttaaagctaagcaggagaaattggacgccagcctgaagactctacacaaggatctggtggtgaagaagccaaaggcacctgtggcacccatcaagagctacaagaagaagggggtcgatgcccagaaagtgtccgacacactaagcaaactcaagttctaagcaactccgccggagaccatgtttcacgtatagatgcatatacgtattacgcatagatgtagttagtccccattgattgttaataactttggtgcaatgttgccagcagtggcaatgattatccaaaatatacgttagctattccgacagtgatgggaagtcctcagccaggtggagactacgtagccaaatacctcttgacctcttttaaagctagcataaattcagaatttcattcctgataagtataatatccaatgaataggcttggaaaataacagttgatccccaatttatttttacaaatattgtgcaactcttaccatacgagtgcgctttatcttacgtaattggtaagttgttatatgttgaatccttcctaggaatgggtgactccccatcactgtgctatggcagcctagacaaccacactaacagtgttaactgggggcaaaactgcacccggaatcgcggtaggtgcagcgggagttccaccagtggaggcttctaccgtaccattcacagcattccagccgaggagctctcggatgatgccatccaattgcacggtatcaatgcccgccttctgaagttcagccagaacctgtgtagtttccactgtagtcagccaacgttcatacatgactcgcaacccctgtaatctcgaccagaactgggcgaaaattccctgctgcaacaccttggcatcgatgtgggctcggatggcatacagtggaaagtagagctgaacttcgtttagaaatccttgccagccgaaaacggtgccggaccagtagggaaactggttcaatagactcactttgagcctctgctcctccaactcaaaggaaccgcccgaggccaggagctgctggtccgtccactgcagaaagagaatgagctccggctgcgagagcagacgccagcgggcagtgactgcggcattgctgttgataatccgcacgaaggcctggaactgggcatcgttgattaggtagcgcaccaagagctggtttaatggcttcgactgtatcagacgctggatttcttccagatcctgggatagagtgggtggtggagccaaggtagctggcgggcccggcgccaacagaccaacagttggaggcaccaactgaggagaccacagtgccagggatccactggccagggtaatcaggagaagccagtccagagcgatggccatatctgtaaggtggtgaccgaaagacgactaccaaaattaaagtcgcagaagcttttatatccagccatcaagatttgttattactgtcta

SEQ ID NO: 608 - DNA, 1908 bp, DROSOPHILA
atggacgtcaaggagctgcagcctcccagctcggtgcgcggaatgcaggagctgcaaagggaacagttccgaaagatcgttcaagttccgcgtttacgggtgcccgagtctcaggtgcaacgtgttatgccgctggtcaaaaagttcctgctgaaaatggagcacctgcatcctgtccgagctgtggaccaatctcgagagatcctactacatccaacgcctgtcaaaaactgggattccctgccaacagaggatctgcagaggcagaaagtcaatgccgagaacttctccttcgccgacctcgagttgaggtatgaaaattggagcgccaatgaaatcctgaaaagcgtgctacccacggaggaggaaggtctcacctcctactcccgcataggccacattgcccaccttaatcttcgtgatcatctgctgccctataagcagctcatcggtcaggtgctccgcgacaagcttcccaattgccgcacggtggttaacaaagcatcctccattgacaacacctaccgcaacttccagctggagctgatctgtggggaccccgattaccaggtggaaactaaggagaacggagtcccctttgagtttgatttctccaaggtgtactggaatccccgcctctccacggagcacgagagaattgtcaaaatgctgaaatcggacgatgttctctatgatgtatttgctggcgtgggtccattcagtattcctgctgccaagaagcgatgccatgtcctggccaatgacctgaaccctgagagttttcgttggctccagcataatgccaagagaaataagtgcttgcccaatataaagatgagcaataaagatggtagacagtttatcgtcgaggagctaagggaggacctgctaaagcgtctatgtaccacggatactactacctatggcatacatattacaatgaatctaccagcaatggctgtagagttcctggacgcatttcgtggtctctacagcgcagatgagctagcgcagttacctacaaacgtgtgctatcccactgttcatgtttactcctttgccaagggtgagaacaccaaggaattggtgcgtcaactggtggagagcaatctgggagccagcctggacgaaaacctgctccagggaataaattttgtacgaaatgttgcccccaacaaggacatgtatagagtgtccttcaagctatcactaaacatgctaaccactttaaaggaagtcgaggtcacgagaaaacgttatgcagaggaggagctggagatgggtcgcaacaaggcaaacaacaagaaggttactcctggggccgccaagccaaagtcggctctgaacaagtccaaaaaggccaagaacgtattcaaagtgggcgacggtaacaagggcaagggcaagaagcccaaggaagtgcagggcaagctcaagcagatcaaggaatctgttaaagctaagcaggagaaattggacgccagcctgaagactctacacaaggatctggtggtgaagaagccaaaggcacctgtggcacccatcaagagctacaagaagaagggggtcgatgcccagaaagtgtccgacacactaagcaaactcaagttctaagcaactccgccggagaccatgtttcacgtatagatgcatatacgtattacgcatagatgtagttagtccccattgattgttaataactttggtgcaatgttgccagcagtggcaatgattatccaaaatatacgttagctattccgacagtgatgggaagtcctcagccaggtggagactacgtagccaaatacctcttgacctcttttaaagctagcataaattcagaatttcattcctgataagtataatatccaatgaataggcttggaaaataacagttgatccccaatt

SEQ ID NO: 609 - protein, 537 aa, DROSOPHILA
MDVKELQPPSSVRGMQELQREQFRKIVQVPRLRVPESQVQRVMPLVKKFLLKMEHLHPVRAVDQSREILLHPTPVKNWDSLPTEDLQRQKVNAENFSFADLELRYENWSANEILKSVLPTEEEGLTSYSRIGHIAHLNLRDHLLPYKQLIGQVLRDKLPNCRTVVNKASSIDNTYRNFQLELICGDPDYQVETKENGVPFEFDFSKVYWNPRLSTEHERIVKMLKSDDVLYDVFAGVGPFSIPAAKKRCHVLANDLNPESFRWLQHNAKRNKCLPNIKMSNKDGRQFIVEELREDLLKRLCTTDTTTYGIHITMNLPAMAVEFLDAFRGLYSADELAQLPTNVCYPTVHVYSFAKGENTKELVRQLVESNLGASLDENLLQGINFVRNVAPNKDMYRVSFKLSLNMLTTLKEVEVTRKRYAEEELEMGRNKANNKKVTPGAAKPKSALNKSKKAKNVFKVGDGNKGKGKKPKEVQGKLKQIKESVKAKQEKLDASLKTLHKDLVVKKPKAPVAPIKSYKKKGVDAQKVSDTLSKLKF

SEQ ID NO: 610 - DNA, 3162 bp, DROSOPHILA
gacaatcaactctatgttcttaggctttgatggcaccgtgtacgattacttctatggctacgatgatctccaggagcgtcgcgtggtcttcgtgggcgaagcagatattcgcattaaggaggattttctgcgcatcctgcgctatttccgattctacggacgcatcgcaagtgaggaaaacaaccacgataaggccaccctggcagccataaaggaaaacgcgaaaggtcttgcgagaataagtggcgagcggatctggtctgagctccaaaagatagtgccgggaaatttcggagccgcattgtttctggagatgcaccgttgtaacctattcgagtacattgggctgcctaaagagccatatctggatgagttcgaccggctttgcaaagcgctagatcaatttgaaaagccacatcagccgattttgtacttggcagggatgctgcactccgtggaagacgccatggaaatgcacaaacgcctgaagctatccgcctacgaacgagacctggctaggttcattacccaggagcgggagaaggtaagaataccgatccgatcaagttaaaattgcgtctttaaacaccagtttccctttttaggttggctcacagtacacgaccctgcgtgactatcagaagttgtgcttacaaaagtacattcaaagggatttcgtagaacagttgctgaaatactctggcaaactggaactttacaaccagctcaagtcgtgggtcaagccggacttcccgatcaggggaaatgctttggctcagcgtggtctgaacggaatgaggcttggtttggtgatggatgaactgaaacttttgtgggcagacagtgattttcagctaacacacgacgatttactgaaatggattcccaacgtactgaaaaagataccaagcgctcctggtaaagtgaagcgaatgaagtagtattgattacatttagatgtaatcgatgtaaataaatatatgggtttcccttgaattttcagataattttcatttcttgattttctttttatttcctacgactttgtaaaaatttggatcggtcgcttgaatcctactttgcagtgctccggtatgcccataagtttcatttcggcaaagcccacttccgggctaagcagatattcggtgaaatgatcaggtcggaatttaattgcattgtagttatctcttatttgttcctgaagagataaatgtacatacattaaattagaatattctctatcgattgtccgtctaataaagctcaccgatagcttcttgcgcctcttgtagccgtcgaaggactgaggttccaggatcagcttgccgcccgggcgcagctgcaggtacatgcgtctgaaggcctgcttcaggccggaatcacagaaattaaggtggatccacttagtgacagacaggcagagtatgacgtcgaactgcggccgttcaatttcgagcaggacgtcgtcctccaggacgtagttcccgtgcacaaactgtatgtggggtatcccctgccccggggttgcgtgacgtttcaggtgactgacggttttttgggcatcatttattagcccccgatctatgtccaggcccacgaggctcttaacctcgaatttcctggcaatctggatggacaggtggccagagttgcagccgatgtcaagcagctgcttgttccgaaacaaatccggttgcgtgccaagcacgtccaggcgtatgtcgtgaaaatccttgttcaggatgcgcttgccgtagtagtgcttatagttgccgtacttgaagttaaggtccttgttttgcatgggctttccgtttagatggagccgttttttgggactctgcgcaggcggacggcttgtggcctccacatttgattcctcctttttcagtcttttggattccacttgcttttcatctaatgttattacacattttcgctttttcgcacatttttcggcttgtttgccggtcaatggcgtattgttgttgttctccaaatccattgtgaaatccaaagtataagaattcattggtatgttaaaatgacttgaggaactattgatgtctcattaaatactcactacatatatatcaatgagtttatgcccttgcccttttatatctttaaaaacatacaaattaaaatgtttaccacatcttgcggtaatttctaacttagagtgaccgttttaaataccactttccgcacagatgataaatataccgaaataatataactgtatatagcacatgatgtaaatttattttatatgctttactttcccatagtttattatttattcaaatttatttaagttggcgtaatcagtatattgtaactcaaagctctgccgggacttccatacctaagaagttgttattattaaacataagatacatatgtttgtttacatgataatttacgcatgtagatttctacaaagcctgtaagtatgctataaaaatcgaaaaaagaccctaacttgaagtgcaaataaaattgatttagagcataagtttaaacgtggctgatgtcaccaaaaaaaacgggctgtccttggaaaataaaattaggagctattgttgcatagcagctcctgccctattttatggtatcccagtgtacggttttgcagctaaagcccacctaaaaaaagttcgagtaatcactggacgtgagaatcactggtgatcgttagtatataagaaatgtttatatcgaacgtgatctcagtcacaaaaataggggacaaaatccagaagatggccaaaaaaatcacacgagagactggatttacaccccaacgcggaccttcgaattgttataatggttatctctcgtatccccaatacaagttacctctatttatatacatatatatatgatcgaaactgcgtctatatctctacaatccgcatgctcgatcgtataagtaaaatttataattagattaagttgcctaggtggtagtagtacgctttttctataaataaactcttctttctaatataaaatttaaaagtcaatttaatttgttttctggctgaatgaaatgaaatttttatatacttcagaaaataagtggacactagaaaggaaatcaatgaaagactataatgaaaatacccaagtatctatacgattttttattatacc

SEQ ID NO: 611 - DNA, 1023 bp, DROSOPHILA
atgtggtaaacattttaatttgtatgtttttaaagatataaaagggcaagggcataaactcattgatatatatgtaatttcacaatggatttggagaacaacaacaatacgccattgaccggcaaacaagccgaaaaatgtgcgaaaaagcgaaaatgtgtaataacattagatgaaaagcaagtggaatccaaaagactgaaaaaggaggaatcaaatgtggaggccacaagccgtccgcctgcgcagagtcccaaaaaacggctccatctaaacggaaagcccatgcaaaacaaggaccttaacttcaagtacggcaactataagcactactacggcaagcgcatcctgaacaaggattttcacgacatacgcctggacgtgcttggcacgcaaccggatttgtttcggaacaagcagctgcttgacatcggctgcaactctggccacctgtccatccagattgccaggaaattcgaggttaagagcctcgtgggcctggacatagatcgggggctaataaatgatgcccaaaaaaccgtcagtcacctgaaacgtcacgcaaccccggggcaggggataccccacatacagtttgtgcacgggaactacgtcctggaggacgacgtcctgctcgaaattgaacggccgcagttcgacgtcatactctgcctgtctgtcactaagtggatccaccttaatttctgtgattccggcctgaagcaggccttcagacgcatgtacctgcagctgcgcccgggcggcaagctgatcctggaacctcagtccttcgacggctacaagaggcgcaagaagctatcggaacaaataagagataactacaatgcaattaaattccgacctgatcatttcaccgaatatctgcttagcccggaagtgggctttgccgaaatgaaacttatgggcataccggagcactgcaaagtaggattcaagcgaccgatccaaatttttacaaagtcgtaggaaataaaaagaaaatcaagaaatgaaaattatctg

SEQ ID NO: 612 - protein, 300 aa, DROSOPHILA
MDLENNNNTPLTGKQAEKCAKKRKCVITLDEKQVESKRLKKEESNVEATSRPPAQSPKKRLHLNGKPMQNKDLNFKYGNYKHYYGKRILNKDFHDIRLDVLGTQPDLFRNKQLLDIGCNSGHLSIQIARKFEVKSLVGLDIDRGLINDAQKTVSHLKRHATPGQGIPHIQFVHGNYVLEDDVLLEIERPQFDVILCLSVTKWIHLNFCDSGLKQAFRRMYLQLRPGGKLILEPQSFDGYKRRKKLSEQIRDNYNAIKFRPDHFTEYLLSPEVGFAEMKLMGIPEHCKVGFKRPIQIFTKS

SEQ ID NO: 613 - DNA, 3577 bp, DROSOPHILA
ccgtccaaatgaagctccttcgccgtggcatggatgaaccaccccggatcaaagtcattgttcatcagaaccactgatatgttgttcacgtgcactgccataaattgggcaaaggtgataatactcgccggcaccttagtttgccggaagtctggcacacccttcgcctccgaggctttgcccgccaacgtctgagtccgccggagttcgtaagagtcctggtcgtaggagtcatcctgtcgactgtgaatgtctttgttgatgcgaatgtcacggatataaatggagagcagcttggtcacctcggtggtgaagaaactgctgcgcagacacacctcctcgatttgctgtaaaattaggagtgtttatcgcttggtaaccagagttcgaaggttatccataccaccgagaatccactcttgctgatgtgcacattcttcagggacaagtagggcagcgaaatgcgaccgatccgtactttgacccgaaacctcttcaccaaataccaactaatgcccgtgggcaagaccctaaaatggaaagtgatcaattttttatgtttataacgatgatggatcaatcatggggccacggaacaggcaaaactaaccaataaacgaagatgaagagcgccaggcagaatagaagtagctgtagcatcatgttgttgcctaaataccatagtgtcccaacatttatgttgtgctatttatgttttgaaattttttgactaaatactgaacaatttactagttgcggcaatagagtgaccaatgcatactattcaaaaataccacaataagctatcagtttttcaaatacttagcccttgcaagacaagcttgttcgcaaaatgcataacttaaacaattaccgcaattaccaaaattttagttacagtgtataaaaagaaaatgcattctcaattagaaattaataatgcaaagaaatgcatccctgttcatgtgcgactttgacttgtcgcatcaacaaagctcgtcaggggttcaggctttattaaatttcggctttccccagacggtcacactgtggctttatatcttttaaaaataacaaaatcaaaaagttatcttatcgctgctcccgcgcccgttattccattgtaagcatgcgaacgtgaaaattggccaaagaagtcgctatgttgctgctggagctgaacattctgaccctgaatatatggtgagagcaggcatctccttctaaggctgctggagccccacttcccttgacaccgatctgcacaggctaatcatgtgcactttcaggggcattccgtatgtgtcgagtgatcgcagaccccgcatcgatgccatctgcaaggagctggctagcgggaagtatgacatcgtgtccctgcaggaggtgtgggcgcaagaggacagcgagctactccaaaagggcacggaggcggtcctgccccatagccactactttcacagcggcgtgatgggcgccggtctgctggtactgtccaagtaccccatcctgggcactctgtttcatgcgtggtccgtaaatggctacttccaccgtattcagcatgccgattggttcggcggcaaaggtgtgggcctgtgccgcatactcgtcggcgggcagatggtgcacctatataatgcccacctgcacgcggagtacgacaatgccaacgacgagtacaagacacatcgcgttattcaggccttcgatactgctcaattcattgaagccaccagggggaactctgcgctgcagattctggctggcgacctgaatgcccagccacaggacatctcttacaaggtgctgctctatacctccaagatgctcgacagctgcgactcggactcttttcggaccaacgaatgcgaacacaactcatacacatctaagcaagcacgggagagaaatcctctgggtatccgtatcgatcacatctttgtgcgtggtggcgatcatgtaaatgctgagatagccgaatacaaactgccttttccggagcgagtacccggcgagaaatttagcttctccgaccacgaggcggtgatggccaagctgaagttattcaagctggaacctagaagtgaggagccagtggcaacgatcgaggtgaactgcctggtagaggatggtgaaacctgttccgtgagggaagtaggagcaggggatgctttgacaggagaggacgatcagtcatcacaacaccagccggagatccaatgcaatggaagctccacttccattcaatccatgcccgccgctagaactgctgcccttcttgaagctctggcgctgtgcgatgcttccctgctgcagttaaacactgatcgaatactgtactacagcgccgccaccttcctgtttgtcctcttggtccttctggtggagttcaccgcccccgtgggcatgcgcactatctttctgctgctcaagttcatcgtgtttggcgtgatcctgttctgcgtcttcatggcctccatctggaactatatggaacgaaatggggtcctgcagggcaagaagtcgatggaggtgatgctgcaccacgcccagaagtacgagtacttctactgaggctgtgtatagcagccaagctcaatgcgcatttaaaatccacgtgtagcgtactataagcagcgatatatgtttgactagagttatagcgctcttacttgatctttttattcgtgtaaccgtcaatgcaattccatggtctctttctgtgtaacgtcatccatatcccaggaataatagttcaataaaagtgagaatcatttaggcaaacaaagattgattgatctaaagataccttttgtatcaacaataatatagtttgtcgtttaataagcaacaatatatatggtaagctcattcatggttatagaaaatttcataactaccgccccaaagtatgcagtacttggtcgctacccattatcgacaaataaccacagaactgtattaatattacggtgtttttaatattttttctttattctcgagtagaaaacagctccgcatagccccaatctggtacagtttattcgggcttctttcccttagcaaactcggccttctttcccttgacgggggcgggcttctgggagcgcaggacagcggaagcgcggcggagggcagcctataagcacaagtaaaatcattagaataggcctaacactgaagtacgataagcttcagctttgagagcttcagataagtttatcaacacgatcattctgcgatcttggttgtgtagcattaaaaaaaagatcatcatgacaagaacccaaacagttgtttctaggcttggagccataatcacctgtgtcaggtccttgcggtacttggagccgataagcaggttcttcagcttcttcagggaacggcggggaccggccttgaagtcaacacgcacggtgttcttggcggggcgctgggcatacttgcccttcttcagcacggcggtgaagcccttcttgtcggcagctggcacgactcccagggtcttcttgtgcacgatgccgctgtagcggtacgagctcacgctggccaagttgtttggctcctggaaggg

SEQ ID NO: 614 - DNA, 1371 bp, DROSOPHILA
caggggttcaggctttattaaatttcggctttccccagacggtcacactgtggctttatatcttttaaaaataacaaaatcaaaaagttatcttatcgctgctcccgcgcccgttattccattgtaagcatgcgaacgtgaaaattggccaaagaagtcgctatgttgctgctggagctgaacattctgaccctgaatatatggggcattccgtatgtgtcgagtgatcgcagaccccgcatcgatgccatctgcaaggagctggctagcgggaagtatgacatcgtgtccctgcaggaggtgtgggcgcaagaggacagcgagctactccaaaagggcacggaggcggtcctgccccatagccactactttcacagcggcgtgatgggcgccggtctgctggtactgtccaagtaccccatcctgggcactctgtttcatgcgtggtccgtaaatggctacttccaccgtattcagcatgccgattggttcggcggcaaaggtgtgggcctgtgccgcatactcgtcggcgggcagatggtgcacctatataatgcccacctgcacgcggagtacgacaatgccaacgacgagtacaagacacatcgcgttattcaggccttcgatactgctcaattcattgaagccaccagggggaactctgcgctgcagattctggctggcgacctgaatgcccagccacaggacatctcttacaaggtgctgctctatacctccaagatgctcgacagctgcgactcggactcttttcggaccaacgaatgcgaacacaactcatacacatctaagcaagcacgggagagaaatcctctgggtatccgtatcgatcacatctttgtgcgtggtggcgatcatgtaaatgctgagatagccgaatacaaactgccttttccggagcgagtacccggcgagaaatttagcttctccgaccacgaggcggtgatggccaagctgaagttattcaagctggaacctagaagtgaggagccagtggcaacgatcgaggtgaactgcctggtagaggatggtgaaacctgttccactgctgcccttcttgaagctctggcgctgtgcgatgcttccctgctgcagttaaacactgatcgaatactgtactacagcgccgccaccttcctgtttgtcctcttggtccttctggtggagttcaccgcccccgtgggcatgcgcactatctttctgctgctcaagttcatcgtgtttggcgtgatcctgttctgcgtcttcatggcctccatctggaactatatggaacgaaatggggtcctgcagggcaagaagtcgatggaggtgatgctgcaccacgcccagaagtacgagtacttctactga

SEQ ID NO: 615 - protein, 402 aa, DROSOPHILA
MLLLELNILTLNIWGIPYVSSDRRPRIDAICKELASGKYDIVSLQEVWAQEDSELLQKGTEAVLPHSHYFHSGVMGAGLLVLSKYPILGTLFHAWSVNGYFHRIQHADWFGGKGVGLCRILVGGQMVHLYNAHLHAEYDNANDEYKTHRVIQAFDTAQFIEATRGNSALQILAGDLNAQPQDISYKVLLYTSKMLDSCDSDSFRTNECEHNSYTSKQARERNPLGIRIDHIFVRGGDHVNAEIAEYKLPFPERVPGEKFSFSDHEAVMAKLKLFKLEPRSEEPVATIEVNCLVEDGETCSTAALLEALALCDASLLQLNTDRILYYSAATFLFVLLVLLVEFTAPVGMRTIFLLLKFIVFGVILFCVFMASIWNYMERNGVLQGKKSMEVMLHHAQKYEYFY

SEQ ID NO: 616 - DNA, 3178 bp, DROSOPHILA
aatctctggctaaaagcgaattaaaagcaccagatagatatacataaatgcaattaaataaagggggcctacatgagaattgcagcaaaaatcaaatttggacgggaatctcacgcacatcacacgcactaaactcgcacacacgctcatttatataaataaacaaaaaagaagcagaaaaaatagcaaaattacctcagcgcacgttgctgttgttgttgccgtggttgtgtgtgtgtgtgtgtgtgttgtagttgttgctggtatcttttatatatattgttattgttgctgcagctgctgaaatcgcagcgaatatcgcgacacgtagacggccaacgttaaagccaagaacttattgtacatcggagaggcgttgtcggcgcggggcgaacttaagtcggttgttaaatattattttaacaaagtttttaacaaatacgcgacgtttttagagctggtacaagaatcgatgtttaactgaaactatcgataagccaacagcttagtactgatttggggtgaccagattcaatgcaattttgaatcaatgacgattgacaatcgatagcactttaagcaaatacaagagtaggtacaaagttaggcaaattaaaaccataaacatatattaaactgcatatgaaaaagtaaaaccatatccattaatcaattttagatgaataatttaaagactttggcggtgagacagatttttggacattgccaaaccgaaccacaccgtttattgcctttataaatcagtattcttttaaaaaacctcattattaagaagtgcaatggatctaacacacgcatcgcaatttttaaaaacaaaaaataaatacatattccttaatgttgtcgaaatcagttgtaaagtaaacttccacatacctgtcatctagctagattcgacagcactgccgcattaatcgaaaccgataggagctctcatcaagtagcaaccctatagagacgccgggacttggtgtaaagaaaaaacgaaaaagatttgtctttttaagcgccgcaaagaatccggaaaaacgtgaatataccaccgaaaacggatctccggtaagttgaaaatgactgggattaggttgtgcgtacaatggaataactgaaaatgcccacaatgtgacccgcaggctgaaacccctacgtgtagcgcaggaaaacgaggaacaccacgaaccaagatgtcggacatctccagcgaggacctgcgtcgtgaaattcaggcggttctgaaggacgccgatttggcgaccatttcggcaaagagggtgcgcgagcaggtggagggaaagctgaactgctcgttgctgagccgcaagaaggagttcgacaagatcgtgatggaggtgatcaacgagcagcaggacgaggaggacgaagacgatgacgagggcaaggatcccgatgccgatcccgacgatgagagcgagcccagcgaggaggaggaccccagcagcagcgaggaggaggccgccaagaagaagaagcagagccccaagaagaggccacagcccacgaagcacaaggcgcccaagaagaagcgcaagaccctaaatgccgacgattccggcaccgagagcgatgccggctcggactcggactacgaggtggtcaagaagccggcggccaagaagaaggccaaggcggccgggggaacaggatcgggacgtaagagcaccggcttcacacgcgcatacaatctatcaccggaactgagcgccctcatgggagagtcctccctgccgcgccacgaagtcgtgaagaaggtgtgggccatcatcaaggagcgcgatttgtacgaccccaagaacaagcagttcgccatttgcgacgacgagctgatgaaggtgatgaagatccgccgcttccgcacctttggcatgctgaagcatctcaagccgcactttctcgattagatcagatccgccctccgatcctctccagatgcaaatatatgtgtatgcctctccgccagcctggtttaccaatcccctgtaactttcggctccgcctggatttgtttgttccacaacctttgattaagatttagttgacgcatgtgtttagcattaccctaattaggacgggtttgcacattatgcactttacggcattttaggaatagttcagatgaacggaaaattacaaaaaaaaaatcgattataatacataatgtgtatgattttttttatgacaaactcgtgtagtttacattttataaaatatcaaagaaaaacataacaagtttaaggcaagtaccgagtaataaaaagagaaatagacgagtgatgcatctgaaaaatacgaaagcaacttttcctggttttcatttcgacggggctgctgggggagaaatcaatcagtggaacagatctaattgctcaataaagaatcccttttttattgttttgcgtttctcacaaatttcttacaaacatttttcactttttctaatatacatattaggtgtatatgcagtgtatatatatatataattctcgatctgatatatatgccagcgtgtatataattgaataaatggaataccttgcactgctgttccattaacgctctcgggacgaaacgaaagtacaaaagtataatcataatcataagcgggggccataaacattaacaaattaagtacgtaaacaatacgagaggttaaatcgatcacttattgcccagctgtcgtagctcaaaaaagggattagtcaggaaagtcgttaacattaaaatgtacatggatttcacgcgaaaaagttatagaaatgtaatgcaaatatgctagaaaccattatacaagtcaattcccattaaatatattatcaattccgaattagaagtatacatttagagaactaatcgcgtcttttgagctactgcagtctgattgacaggcgttcgaagtatttaaaataaattcaagtaactggctacaaaaaatgttgatggggataaattcttggggcaagattagttttggggattagagagtcatgttggataggtgaacggagagaatactcctgcggctaaagcgagtgctaaatactatgtcgaagactttaaatgctaacgaaaagcaaccaagaattccgctcgagctaaactaagcaatacaatggtaatagtaactttgtgttctcctttc

SEQ ID NO: 617 - DNA, 1104 bp, DROSOPHILA
aaaaacgaaaaagatttgtctttttaagcgccgcaaagaatccggaaaaacgtgaatataccaccgaaaacggatctccggctgaaacccctacgtgtagcgcaggaaaacgaggaacaccacgaaccaagatgtcggacatctccagcgaggacctgcgtcgtgaaattcaggcggttctgaaggacgccgatttggcgaccatttcggcaaagagggtgcgcgagcaggtggagggaaagctgaactgctcgttgctgagccgcaagaaggagttcgacaagatcgtgatggaggtgatcaacgagcagcaggacgaggaggacgaagacgatgacgagggcaaggatcccgatgccgatcccgacgatgagagcgagcccagcgaggaggaggaccccagcagcagcgaggaggaggccgccaagaagaagaagcagagccccaagaagaggccacagcccacgaagcacaaggcgcccaagaagaagcgcaagaccctaaatgccgacgattccggcaccgagagcgatgccggctcggactcggactacgaggtggtcaagaagccggcggccaagaagaaggccaaggcggccgggggaacaggatcgggacgtaagagcaccggcttcacacgcgcatacaatctatcaccggaactgagcgccctcatgggagagtcctccctgccgcgccacgaagtcgtgaagaaggtgtgggccatcatcaaggagcgcgatttgtacgaccccaagaacaagcagttcgccatttgcgacgacgagctgatgaaggtgatgaagatccgccgcttccgcacctttggcatgctgaagcatctcaagccgcactttctcgattagatcagatccgccctccgatcctctccagatgcaaatatatgtgtatgcctctccgccagcctggtttaccaatcccctgtaactttcggctccgcctggatttgtttgttccacaacctttgattaagatttagttgacgcatgtgtttagcattaccctaattaggacgggtttgcacattatgcactttacggcattttaggaatagttcagatgaacggaaaattacaaaaaaaa

SEQ ID NO: 618 - protein, 244 aa, DROSOPHILA
MSDISSEDLRREIQAVLKDADLATISAKRVREQVEGKLNCSLLSRKKEFDKIVMEVINEQQDEEDEDDDEGKDPDADPDDESEPSEEEDPSSSEEEAAKKKKQSPKKRPQPTKHKAPKKKRKTLNADDSGTESDAGSDSDYEVVKKPAAKKKAKAAGGTGSGRKSTGFTRAYNLSPELSALMGESSLPRHEVVKKVWAIIKERDLYDPKNKQFAICDDELMKVMKIRRFRTFGMLKHLKPHFLD

SEQ ID NO: 619 - DNA, 5946 bp, DROSOPHILA
aggtggtattaggtgttgctgctttggaggcgtcaacttcacgagaagagcttcaccgttctggtcgagattttcatagtctagtgccagatccctgttgatcctgaacaaagtgggcgtctgcattgggatgagtctgtccattttgtagttcatgaagcattccgctcgaaagtgccgggcacaaactgttttggctgccagtttggacggcggtgcatttgaaacgtcagggtttgaacaattcctgacccaatctttcaacctcttcggatccttaacggggaacttgaagaagtgcatattggggttgcggctagaacccaccggacaatcacgaaaacaacacttagtgccgcccatttgtttaaatataagcaaacaacttttatgttattagtggtggaagtgttagcgtcagctggtgatatcgatgggaggcatcgataacagaattgaccgaaaccaaatgatcgatatgacacttcttaattaatgagagattttttacttgactgggcttgtagcaggttttgcacagaagcaattattttccggaatgtgaaatgtctgctttttagctaattacaacaaaaactttccaatttttgttccccaaacccactcaagtgatttcaaattttaccgtccgcttaaaatggaactagtttattccagaggaaccagcttgcaccaccaagtctctgaaactctggaaatatcgatagtctggtggagaaaagtattcataaatataaataaaaattaacaggtcataagctgatttgtttattatttactgttaaaacaagtaaaataatattgggaacaattaaattttccattttcctaattacagtataagcctagtgggcgttttgatatccaattgtaatgttttaagcaatcccagtgggctttgctcaatcgttcggaccacttagacgaatttccaccaaacttagttcagtataatttttgaattcgcccgcacaggttgcgcacttttcgaccgtatcacaacactgatctaccctagtattcacaggaagttgcatccctggcatccagaagcctctagaagtttctagagacttccagttcgggtcgggtttttctataaaagcagacgcgcggcgtttgccggttcgagtcttgaaaaaaatttcgtacggtgtgcgtcgtaacaacaagcagcgtctgaaaagttttgtgaatttccaattctatacaaagcaaagtgaaaatatctgtatttttacctttattctgtgaatagaacgaaaaacatacatacaaggtgagtaatgcaaattacaagaaaagagtgaatagtttatcagtggctatggccaaaatgtgcattttgcgtggtcctgtgcatctcgaatgttcttgacccaaatgtgagatattgattttaaatttctaggagccaagtttaagaattttttttgattaattaagaggtggcaacgtgcaaattaactcaaaatgccggtttcttttattttttgtcgcttggacgcatcttccagaggtttctatgctttagcatgaattaaacatcgtgccaaataggccttttaattatatattactgtcctttatttacaattacatgtggtttatagaatacaagattaatttttgtttaatgcaatggtcttttagcgctaaatcgaattatgccgctctttttagggggtgacaatgcgcaaatcacatttgccgctcgagaatgttctagaggtttctatgctttagcatgaattaaacagcgtgccaaataggctttttaattataaattactgtccttcatttacaattacacgtgctttctttgcattcccattttaaattgcacatgccgcatacgcacacatgcacgcccatgactaatactttcaagtaaaaatgtggcgtcagtaagcaaattctgttaaatcggttttttaatcctatttgctctattttaattggttggttgctactagcaacttgctaggcgaattagttttcctttggcttctagatgcttccacaaacttccttggtgaagtacgaattttcaatgcaatgctcactcacacagacacgagtttgcacacagcaggggtagaaaaattatcaaccgacccaatttgcataattatatttaaatatttaaatttaaaacattattttgcaacttaaaatcaattctgttggctaattgaaattaaaattccattttacgggttgcaaagtgaatgctataattttgaccaccactgtacttgtatatgcgcatgttaaatgaggcatgtgcaaaagagaaagaaagaaaaagaataaaaccggagcagctgctgaaaatgcagctgcttttccttagtgttgaacccacagactataactaatcctaatgattttgtaaatccattgcagatgccagaagaagcagagacctttgcattccaggctgagattgctcagctgatgtccctgatcatcaacacattctactcgaacaaggagattttcctgcgcgagttgatctcgaacgcttccgatgccctggacaagatccgctatgagtcccttactgaccccagcaagctggactctggcaaggagctgtacatcaagctgatccctaacaagacggctggtactctgaccatcattgataccggtatcggtatgaccaagtccgacctggtcaacaacttgggaaccattgccaagtccggaaccaaggccttcatggaggctctgcaggctggtgccgacatttccatgatcggtcagttcggtgtgggtttctactccgcctacctggtcgccgacaaggtgactgtcacctccaagaacaacgatgacgagcagtacgtgtgggagtcctctgccggaggctctttcacagtccgtgccgacaactctgagcccctgggccgtggcaccaagatcgtgctgtacatcaaggaggaccagaccgactatctggaggagagcaagatcaaggagattgttaacaagcactcccagttcattggctaccccatcaagctgctcgtagagaaggagcgcgagaaggaggtcagcgacgatgaggctgatgatgagaagaaggaaggtgatgagaagaaggagatggagactgatgagcccaaaatcgaggatgttggcgaggatgaggatgccgacaagaaggacaaggatgccaagaagaagaagaccatcaaggagaagtacactgaggatgaggagctgaacaagaccaagcccatctggacccgcaatcccgatgatatctcccaggaggagtacggcgagttctacaaatccctgaccaacgactgggaggatcatctggccgtcaagcacttctccgtggagggtcagctggagttccgtgctctgctcttcattccccgtcgcacgcccttcgatctcttcgagaaccagaagaagcgcaacaacatcaagctgtacgtgcgtcgtgtcttcatcatggacaactgcgaggacctcattccagagtacttgaacttcatgaagggtgtggtcgactccgaggatctgcccctcaacatctcacgtgagatgctgcagcagaacaaggtcctaaaggtgatccgcaagaacctggtcaagaagaccatggagctgattgaggagctcaccgaggacaaggagaactacaagaagttctatgaccagttcagcaagaacctgaagctgggtgtgcacgaggacagcaacaaccgtgccaagttggccgacttccttcgcttccacacctctgcctccggcgacgatttctgctccctggccgactacgtgtcgcgcatgaaggataaccagaagcacgtgtacttcatcactggcgagtccaaggaccaggtcagcaactctgccttcgtggagcgcgtcaaggcccgtggcttcgaggtggtctacatgaccgagcccatcgatgagtatgtcatccagcacttgaaggagtacaagggcaagcagctggtctctgtcaccaaggagggtctggagctgcctgaggatgagagcgagaagaagaagcgcgaggaggacaaggccaagttcgagagcctgtgcaagctgatgaagtccatcctggacaacaaggtcgagaaggtggtggtgtccaaccgcctggtggattcgccctgctgcattgtcacttcgcagttcggctggtccgctaacatggagcgcatcatgaaggcccaggctctgcgtgataccgccacaatgggctacatggccggcaagaagcagctggagatcaaccccgatcacccaattgtggagactctccgccagaaggccgatgccgacaagaacgataaggccgtcaaggatctggtcatcctgctgttcgagacctctctgctgtcctctggattctcgctggacagcccccaggtgcacgccagccgcatctaccgcatgatcaagctgggcttgggaatcgacgaggacgagcctatgactaccgacgatgcccagagcgccggagatgccccctcgctggttgaggacacagaggacgcttcccacatggaggaggtcgattaagcgaccagtcgaaacaaacaaccaaaattcattctatcactcgcattcacatacacaatttacttgcgtttcgaacttttatactgagtttactacggccgagttaaattttgtattcattaacattttgccgcgttataagcgacagacatacgcttaactcataaaaaagcaggaataactcgttaaatggttaggttctcacagaacattcaagagcagttgtcgttttaagaacttataatttagaatccaagtaatttatgtaaaaaactaaagactacatacgcgccctagttggtagagctatataaagaatcgagtatatatataattaaggtttgatgacccgatcgatgataaacataaaaccaaataaacaacaagcaaatgtgttttaaaaatctaacttctgagcgagtatttattggggggaataaacaatctatgaatcggattctttgcgcagcagctgctcaatggcctccaccgtggacactcccttggttatcattattatcttgtttcgcgatcgagatcccttgtccaaagaaacgtcgctctttcgaagacctagaactttcgacagaaacttgaccagttcggcgttagcttctccctcgctgggcggagcggcgatttggacgcccactccttcaaagccaattcctgtgattccgttctgcttagcccccggcttggcaaggatttgtatgcatatattgccgctcttatcgactgaaatcggactggcttccttagccggcatcgcttttgcatcgtttttcgcactttcaacgccggcctttgatttccccttgctcttcgacattatttgggcgttgaccgatgtaaacaagcggcgcattagcttcttggcaattattttaaatattttgtgtttttaaatgcattttaatagcaactagtgtttaattttgcgaggtctactggcgtctatcagctgattcgtggagaaaaccagggatgcgcacatatagggatgagcatatctcgtgagttctcactcacgaaacgaagataaaactacatttttacattccatgtaacttacagattggacatgaatagtacgattcaaaaatgtatttttattttcctgttgagtattatttaacggttttctaaacacattccccccgaagtcaccacaacatgtaaataaaagtattaaaacaaaatatgattaggtaaaaaattatcatatattcatcattgttatgtactcatagtttcttctctactcgtctttgcattagaaaacaacgctttaacactttgcactatttaaaactgcgccgagaagcatcttaaaaatgcatttatcgcctataaatgat

SEQ ID NO: 620 - DNA, 2815 bp, DROSOPHILA
cgcacttttcgaccgtatcacaacactgatctaccctagtattcacaggaagttgcatccctggcatccagaagcctctagaagtttctagagacttccagttcgggtcgggtttttctataaaagcagacgcgcggcgtttgccggttcgagtcttgaaaaaaatttcgtacggtgtgcgtcgtaacaacaagcagcgtctgaaaagttttgtgaatttccaattctatacaaagcaaagtgaaaatatctgtatttttacctttattctgtgaatagaacgaaaaacatacatacaagatgccagaagaagcagagacctttgcattccaggctgagattgctcagctgatgtccctgatcatcaacacattctactcgaacaaggagattttcctgcgcgagttgatctcgaacgcttccgatgccctggacaagatccgctatgagtcccttactgaccccagcaagctggactctggcaaggagctgtacatcaagctgatccctaacaagacggctggtactctgaccatcattgataccggtatcggtatgaccaagtccgacctggtcaacaacttgggaaccattgccaagtccggaaccaaggccttcatggaggctctgcaggctggtgccgacatttccatgatcggtcagttcggtgtgggtttctactccgcctacctggtcgccgacaaggtgactgtcacctccaagaacaacgatgacgagcagtacgtgtgggagtcctctgccggaggctctttcacagtccgtgccgacaactctgagcccctgggccgtggcaccaagatcgtgctgtacatcaaggaggaccagaccgactatctggaggagagcaagatcaaggagattgttaacaagcactcccagttcattggctaccccatcaagctgctcgtagagaaggagcgcgagaaggaggtcagcgacgatgaggctgatgatgagaagaaggaaggtgatgagaagaaggagatggagactgatgagcccaaaatcgaggatgttggcgaggatgaggatgccgacaagaaggacaaggatgccaagaagaagaagaccatcaaggagaagtacactgaggatgaggagctgaacaagaccaagcccatctggacccgcaatcccgatgatatctcccaggaggagtacggcgagttctacaaatccctgaccaacgactgggaggatcatctggccgtcaagcacttctccgtggagggtcagctggagttccgtgctctgctcttcattccccgtcgcacgcccttcgatctcttcgagaaccagaagaagcgcaacaacatcaagctgtacgtgcgtcgtgtcttcatcatggacaactgcgaggacctcattccagagtacttgaacttcatgaagggtgtggtcgactccgaggatctgcccctcaacatctcacgtgagatgctgcagcagaacaaggtcctaaaggtgatccgcaagaacctggtcaagaagaccatggagctgattgaggagctcaccgaggacaaggagaactacaagaagttctatgaccagttcagcaagaacctgaagctgggtgtgcacgaggacagcaacaaccgtgccaagttggccgacttccttcgcttccacacctctgcctccggcgacgatttctgctccctggccgactacgtgtcgcgcatgaaggataaccagaagcacgtgtacttcatcactggcgagtccaaggaccaggtcagcaactctgccttcgtggagcgcgtcaaggcccgtggcttcgaggtggtctacatgaccgagcccatcgatgagtatgtcatccagcacttgaaggagtacaagggcaagcagctggtctctgtcaccaaggagggtctggagctgcctgaggatgagagcgagaagaagaagcgcgaggaggacaaggccaagttcgagagcctgtgcaagctgatgaagtccatcctggacaacaaggtcgagaaggtggtggtgtccaaccgcctggtggattcgccctgctgcattgtcacttcgcagttcggctggtccgctaacatggagcgcatcatgaaggcccaggctctgcgtgataccgccacaatgggctacatggccggcaagaagcagctggagatcaaccccgatcacccaattgtggagactctccgccagaaggccgatgccgacaagaacgataaggccgtcaaggatctggtcatcctgctgttcgagacctctctgctgtcctctggattctcgctggacagcccccaggtgcacgccagccgcatctaccgcatgatcaagctgggcttgggaatcgacgaggacgagcctatgactaccgacgatgcccagagcgccggagatgccccctcgctggttgaggacacagaggacgcttcccacatggaggaggtcgattaagcgaccagtcgaaacaaacaaccaaaattcattctatcactcgcattcacatacacaatttacttgcgtttcgaacttttatactgagtttactacggccgagttaaattttgtattcattaacattttgccgcgttataagcgacagacatacgcttaactcataaaaaagcaggaataactcgttaaatggttaggttctcacagaacattcaagagcagttgtcgttttaagaacttataatttagaatccaagtaatttatgtaaaaaactaaagactacatacgcgccctagttggtagagctatataaagaatcgagtatatatataattaaggtttgatgacccgatcgatgat

SEQ ID NO: 621 - protein, 717 aa, DROSOPHILA
MPEEAETFAFQAEIAQLMSLIINTFYSNKEIFLRELISNASDALDKIRYESLTDPSKLDSGKELYIKLIPNKTAGTLTIIDTGIGMTKSDLVNNLGTIAKSGTKAFMEALQAGADISMIGQFGVGFYSAYLVADKVTVTSKNNDDEQYVWESSAGGSFTVRADNSEPLGRGTKIVLYIKEDQTDYLEESKIKEIVNKHSQFIGYPIKLLVEKEREKEVSDDEADDEKKEGDEKKEMETDEPKIEDVGEDEDADKKDKDAKKKKTIKEKYTEDEELNKTKPIWTRNPDDISQEEYGEFYKSLTNDWEDHLAVKHFSVEGQLEFRALLFIPRRTPFDLFENQKKRNNIKLYVRRVFIMDNCEDLIPEYLNFMKGVVDSEDLPLNISREMLQQNKVLKVIRKNLVKKTMELIEELTEDKENYKKFYDQFSKNLKLGVHEDSNNRAKLADFLRFHTSASGDDFCSLADYVSRMKDNQKHVYFITGESKDQVSNSAFVERVKARGFEVVYMTEPIDEYVIQHLKEYKGKQLVSVTKEGLELPEDESEKKKREEDKAKFESLCKLMKSILDNKVEKVVVSNRLVDSPCCIVTSQFGWSANMERIMKAQALRDTATMGYMAGKKQLEINPDHPIVETLRQKADADKNDKAVKDLVILLFETSLLSSGFSLDSPQVHASRIYRMIKLGLGIDEDEPMTTDDAQSAGDAPSLVEDTEDASHMEEVD

SEQ ID NO: 622 - DNA, 8279 bp, DROSOPHILA
cacagctgctttgtttagtcttgtgcgattcattgggaccctgcggaaacaatttaccctgccaagtatcctgtgtggtggacttccccgacttggttttgttatcgaccagcggttttttcttcaccaagtgcggctctccgggagcttgtggaaaccacttgccctgccagccatccttggttgtgaactccagcggaggaacttcctccgtggtgctcttcatttttaattcaatcgcttcctgctgttgtccaggggcatggggaaaccacttgccctgccagccattcttgccgggcgtcgcacctaatggaacctgcacacgttgcacatcattggaaatgtcgggtggggacttcccaatcttccctagcttctcatcaggatcaagagttggctccaacagattggcctgcgacttcttgatggatttcgcatcgatgagggcgaacccaaggcacaagagggtcaagtaatgccaaataaacataataattgcaagcaaaagaaaaacaaaagcgcaaaataagcaaacaaaaatataattaagaacttggcaaaacagctgtggagctgcgtttttcaacactggtcaaagcatgactttgttgcagggtagcaacaggttgtttggagtttgcataaatctccgatgataattatgtgttgttttaataactaaattaaaattatttacgccaaattaaagtaaataaagttaatttaaaatgactacttaaatcaagcagatttaaaaggaaatcaatgtatatttgaaatattcagactggattctaaggttaaatgacaaattactcaccagaaatcggctcataataataaatcattttattttcaaatgccccctgcgaacgctcccccgcattgcacacaccagggggtattttacgaagtgcccacacctggccacactggtcgcagctacaaaaagaagaagaacaagggccaacttgatggtcacttgctactgcgctttattaattcattattttccaaaataatgcacatatatacccgcccacagccgctctgcgcccccgctaatcgaaaaatgtgagtggtaagcgtttttaccagagtcttatcaacaatttaagcctcaattcccttccgtttccgtgattcgccacccagaaaacaataacaaaggggtgttgttgttgctgtcgctgctgctgcgctggaaaaacaactcgcataaaattttaaaacgcacaaagaaggcgaacgtggaaagttaggccaacaacccagtcgcgatgtcgtggttcaatccctgggatggcctcaaaacgaaaatgtgtcgctacctgctgcagcgatacctgggccagtttttcgagaataacttgaacctggagcagctgaaggtggacctttacaatggcaaggctgtggtggaggacattttcctaaaggtcaacgccttcaacgatctcttcgaggaccagggctgggccttcgaggtggtctcgggccacattggccgcctgactgtcgtggtgccgtggaatgcgctgatgaccaacgacagtagcctggagatccacaatctaaccatcacactgaggccagtcacacgctaccagagcggcaccaccatgctggagtccatgtggtcgtcggtgagcagctcgatgcaaatggccgaggagtgcatgaagcaggtggatgacgatgtgcccttcctgaaccacaataacgccctgattgggttggagaagttcgcagagaccatcgacaacgtgctcaaccgcatacgcgccaagctgacaaatactactttgaacattgagtacatactgcccagatcggaccggaagctggtgctctccttccaggccagccatgtggagtataagaacaagacgggctacgagatgcccatgtccacctcccaggacactgaaaccgaagaagatcccaatagcagcttcaatgcactgcccatgatagccaagcacaatttggtgatcgagggacttagtttgcacacctccgaagtgcttgatgtgatggatcaccagtttggacccactccctacgagcagctctgcaagattgtggagctcaagggcgcgcaaaacatccagatcaacatcaagcagacggaaaatatagtggggcccaaggtcagcctagaactgagtctggacgacatatacttcatgctaacgccgcgtcaaattcacctgctcatcgagttctcaaagggcttcaactgcggcggtcagcaggagcgacccaaaaagggcagaagcttgaaatcggctccgcccagtgagtatcagatgcacagtttgcagcagcccacccggatgacggggattctgggccagaatgcagactggtgtacaggaatgtcagaggcggatccctccgaatattccgtttacggaaatcccccgaggagcggttacgcacggagtcgaaagatgagcgaatccacaaacagcatggtcacctcctgtaccaatactctgcagcaggagttgggctacacagagaagtccggcgagatcctcaagttcaaggtgcagatctcgaaaatctacggaattgctttgcaccaggacattcttatccagaacacggccaatatcgacagttgcagcacggttttcgatcacgcaagttaccttcgctactcggacactgccagtgggttcttcttgggcacgctcctggagaatcacatcccgctgcaaaatcagcagtaccttctgctacgagcagccccaataatcgttagtggaagccagcagcgctatttccaggagctcacatcgagaactactctctccgccactgcggtggatctcatcgaggtcctggacaattccaaggagcatctgcttcagttcgaccgccagagaaactgcccggatggctaccacattcgaccggagatcgtgctcacccagagctcatcgttcatgttcaagcagaatcacaatcgttgctctaacaaaattgaatgcagtttggatgaatgtacggcggaattggatatatctatttacgatcgactaggggcgctctttgggagctctccgttttccggggattcggcgtcgtcaacgccctatccagatgatcccaaccaaacggagtttgtggtgaagtccgaaaatctccgtcttcacttgcgtttccctgtggtggatggcagagccgccaacgatccgctaaagattccctggtggaagaagaatgtgcgacgtgatttcttggcagtggagttccgctccctggtggttagttcgaggtctcagataagcatcgtttcggatgaactagatgtgttctattgtgacgcggataagcagagtgccgtgcatctcctgaagtgccagcaaaaaatgcagccgaacaagaagatccaaattgacgtactgcagctaaaggacacctcggatggccaaaagaaggcaaggaagtctccgtttagctcaaaatgtacctttggctacacctcccatgtggagggacttgatggtagcgtggacaaaaccgattcccttttacccggcgaaacggaggagatcaatgaattctgcgacagttgcacacagtcctccaagctgaagatatttgcgtttataccgcacgtaaaagttgtgctggaatccaagagcatgtacgaactgatatacaaccgcttgaacggagatctctttatgtgggaaccacgttctccgcactatgacatcagcccggataacgaagtcccagagtcaaaagacctgtacgcagagccacagctggaagagtttagacgaaacctgttgctcagtacgagcgccatggaaagtagtatttacttttccatggcggagccaacggcttctgctccaccggcgccaccggtgcgtaatgaagccttctcctttgagttgtttgtagagcagggaactttgattctgttctcgcatcttctggatcccgagaccaaccagcgatccaaggagtgcggtaagtttcaggtgaacttaaaggagctgcgtttgtttacagtgaatggcttggacaacgattcgactcggagtttcttttccatccaactgggcgagatcgatgccttgcattgcgggaatacgctgcaggatttggagctggcttggagtgatttggcggatgaaaagctgctgcccaccatctataactttgcaagtgttcatcagcagcaggacaggaaaagaatggaggttttatccctcgtggctgagatcaagaagcaaccggagcagcgcatcaagagaatgaagatgtccttcgggatatgtggcgccattctgcagcatcactcctgccactcggagcattcttggctgaatcaactgatcgactttatggacgtggccgactttcccatcgaggaatacgaaccgtttgctctggtctccgagctgcagttgcatgtgtggaatgctgggatcgactatcgcccgaaattctttccacaacgtgcgttcctggatctgggctactgtaccttgagcagcaatatcatatcatcgatgagtggctgcaccttgcgattgctggccgaggattgtgtcctgcaactgggattggttaaggaggagtccaacgactccctgatacctgtgctgaatctgggactcttgaatatatccttccgtttgaatgcagaaggtagtggacaaccgcgagtggatttgcgctcttccatccacgatatgcatctgaagacttgctacgattcggcagcagctttggcccaacttatagcctatgtggccaacgacagggacttgtgtccgccagaggagcccatcttgaatgaggacactaagcctgcagagccgaaacccaacgaggagcatgagatgagcgatcacacccagaaccatgtgagcaaattgatggccgatgctgtgatagacgtagagtcctcgcccaatctcagggcaatgaaatctccagggggtcgggaggagggcattgagatattctacttcccggatgagcccaaagagaaacggaaatccacgtccgccaagctgcagaccaagtcactgatggtcgagagtccctcggtcatcggagacatcctggactttgaatcgaatgtgatcttgcagtcctactaccaccagagccaagtgcaaccgcagacatcactgggctcccaggtgcagcaggagctgggttccctgggcaacgcgtccctggaggagcgggatttcgacatcatacacgacgaggagatttcacgcatggacaagttcggtgtcaagcaaatttacatctccgaggaccctttgcagattgtggacaatcactttgagctgccgcatgagaaagtggacctgcttaggcctccatctaatttcccagtggccgagagcacttacaccctttgcgagatgacattcacatggcacctttatggcggccgggatttccccgatgaaccactcaagaaatcctcttcgtcggcaaccagtggctttggcatgtccgatacctacaagtatggcgtgtctcaagctcaagagcaggataaacaggacaaaaagggttccaagaagggtctgctcaaacaacccaaaggatcgcagcgcaatctggaggttctagtggagatgcagctctccaagattcgattctcctacgaaacctatccgttgacctccatgtactcgtcccgtcaggtgctccttgtgtcggaaattgaaataagagataggttgcgctcctcggacattaacaagtttctgtaccatccgacgggcaacaatttatcccataagccggacgagaacatggtcatagtgaaggctctgaatgtgcgtccgaatccgcaaaagagctccgcggaagagtgctccctgagggtctccattttgcccataaaactcaacattgaccaggatactctgctctttctcgaggacttcttttcgggcatgttccgaaactccgctagtgctgctggtggcaccaaaacggagggcagcagttcgtcggccacggatatgccggtgatgtcggtgagcaaaatgccggaggagttatccgataaattgcccgattcggaagttaaggagatggtggagaggaacctgaatgtgctgattgaagagaacagcttggatgtggagttggaggaggatcctgccacggctccacctgtgttcttccgcgaggtgatcttcagtccagcactacccatttgctttgactatcatggacggcggattgaactctcccgcggaccggtcaccggcctaatcatgggtcttgcccagctgcagggatccggaattaatttgagggaaattgtgaaccgcagaggcattctgggatggaacaaactgtgcgagttcctggccaaggagtggctgaaggacatcaagcggaatcaattgcccaatatcctaagcgggattggacccacgaatgcggtgctgcagcttttccagggtatctacgatcttttccggctgcccatcgagcagtacaacaaggatggacgaattatcaggggattccagttgggtgcccagagtttcaccgctcgcacagcgctggctgccttggagatcacctccaggattatacacctgctgcaattcacggcggagactaccttcgatatgctatctgcaggtccttccatgaagaagcggaagggcggcaggcagggcaaacggaggcgacagggacgacccaaggacctgcgcgagggcgtggccaacgcctataccatagtgagagagggcatcaacgaatcggccaacacactcatcgaagccgccatcacggagcacgaccagaagggctacagcggagcggtgggcgcggtggtacgccagatccctcagctggtcgtctgcccggcggtgctggccacccaggccaccaccaacatcctgggcggcgccaagagctcgctgattccggaggccaaactggaggcgcgcgacaagtggaagcaggagatccactaggcaactgcttcacagatcgactaggttaacggtagctatagttcacggggcttacagcataacgcaatgttttctattgttttactaataataaataatgtacataaaaggagcacttgcacgagacggcgaggtgacgagggatttgggatcccgaacggtgattccgacatgggtgtgattgaacttatcctttttagccatattacagtacatgagagttatattttttattattttacctgaataaatatatatatatataaaagaaaaagatgacgtatttcttcatggtgctgctaaaagtttaagaacggatactattctagcaaaatttaaccgaactaccagaatttattaaaccctcagctaaaaatgaagtacaaataaaaacaactagcagtttacaaaatgatttaaaaagacgttacttttatttgtatgcttctctgtgaatggcaagtttctgtaaacagctgattgcttgctattcggcgcgaatgaatgttcgttggcgcatggtttacgtaaaagccgcataaatcgctggaaatattagttaaaattaggtatctaagcttaaaattaaacataaaaccatgtccagtgcgctgactcgcctgttggagcgcctgccactgaaaaaacagacggcgcaaagcggtattcgtgttttttccaaccaggagcagcggcaagaaattgaggatgatgaaggtaaacaattaagtttccctggcttacacgttttataatggatatatcttcctgatcggccagaattccgagtgctcagcctgcggacggtgaagcagcagatgcagaagcgccagcaggtccgtcgggatcccatcacaccgccgcgcactggccgcatggcggtggatcaggactggacggccgtttggccaggaccacgttcgttccacccggccagtgtgcctctgccactgcggcagggattcacggaacgcggagcagcagctccgtcgaagttcgccaatgcagagctgatgaagatacccaactttctgcacttgacaccgccggccatccgtcagcaatgcgaagccatcaagaagttctgcacgccatggccaaagggtctggagacagaggccaagtggcagcgccacttccccctggaggtcaccaccacagactactgccagagtttgcccacgatcaggaatccggaggccaggcgcgtcaccattaccctgaagctctctgacctgaagttcgatgcgcacgccagggataagttcctgcgcc

SEQ ID NO: 623 - DNA, 6198 bp, DROSOPHILA
attaattcattattttccaaaataatgcacatatatacccgcccacagccgctctgcgcccccgctaatcgaaaaataaaacaataacaaaggggtgttgttgttgctgtcgctgctgctgcgctggaaaaacaactcgcataaaattttaaaacgcacaaagaaggcgaacgtggaaagttaggccaacaacccagtcgcgatgtcgtggttcaatccctgggatggcctcaaaacgaaaatgtgtcgctacctgctgcagcgatacctgggccagtttttcgagaataacttgaacctggagcagctgaaggtggacctttacaatggcaaggctgtggtggaggacattttcctaaaggtcaacgccttcaacgatctcttcgaggaccagggctgggccttcgaggtggtctcgggccacattggccgcctgactgtcgtggtgccgtggaatgcgctgatgaccaacgacagtagcctggagatccacaatctaaccatcacactgaggccagtcacacgctaccagagcggcaccaccatgctggagtccatgtggtcgtcggtgagcagctcgatgcaaatggccgaggagtgcatgaagcaggtggatgacgatgtgcccttcctgaaccacaataacgccctgattgggttggagaagttcgcagagaccatcgacaacgtgctcaaccgcatacgcgccaagctgacaaatactactttgaacattgagtacatactgcccagatcggaccggaagctggtgctctccttccaggccagccatgtggagtataagaacaagacgggctacgagatgcccatgtccacctcccaggacactgaaaccgaagaagatcccaatagcagcttcaatgcactgcccatgatagccaagcacaatttggtgatcgagggacttagtttgcacacctccgaagtgcttgatgtgatggatcaccagtttggacccactccctacgagcagctctgcaagattgtggagctcaagggcgcgcaaaacatccagatcaacatcaagcagacggaaaatatagtggggcccaaggtcagcctagaactgagtctggacgacatatacttcatgctaacgccgcgtcaaattcacctgctcatcgagttctcaaagggcttcaactgcggcggtcagcaggagcgacccaaaaagggcagaagcttgaaatcggctccgcccagtgagtatcagatgcacagtttgcagcagcccacccggatgacggggattctgggccagaatgcagactggtgtacaggaatgtcagaggcggatccctccgaatattccgtttacggaaatcccccgaggagcggttacgcacggagtcgaaagatgagcgaatccacaaacagcatggtcacctcctgtaccaatactctgcagcaggagttgggctacacagagaagtccggcgagatcctcaagttcaaggtgcagatctcgaaaatctacggaattgctttgcaccaggacattcttatccagaacacggccaatatcgacagttgcagcacggttttcgatcacgcaagttaccttcgctactcggacactgccagtgggttcttcttgggcacgctcctggagaatcacatcccgctgcaaaatcagcagtaccttctgctacgagcagccccaataatcgttagtggaagccagcagcgctatttccaggagctcacatcgagaactactctctccgccactgcggtggatctcatcgaggtcctggacaattccaaggagcatctgcttcagttcgaccgccagagaaactgcccggatggctaccacattcgaccggagatcgtgctcacccagagctcatcgttcatgttcaagcagaatcacaatcgttgctctaacaaaattgaatgcagtttggatgaatgtacggcggaattggatatatctatttacgatcgactaggggcgctctttgggagctctccgttttccggggattcggcgtcgtcaacgccctatccagatgatcccaaccaaacggagtttgtggtgaagtccgaaaatctccgtcttcacttgcgtttccctgtggtggatggcagagccgccaacgatccgctaaagattccctggtggaagaagaatgtgcgacgtgatttcttggcagtggagttccgctccctggtggttagttcgaggtctcagataagcatcgtttcggatgaactagatgtgttctattgtgacgcggataagcagagtgccgtgcatctcctgaagtgccagcaaaaaatgcagccgaacaagaagatccaaattgacgtactgcagctaaaggacacctcggatggccaaaagaaggcaaggaagtctccgtttagctcaaaatgtacctttggctacacctcccatgtggagggacttgatggtagcgtggacaaaaccgattcccttttacccggcgaaacggaggagatcaatgaattctgcgacagttgcacacagtcctccaagctgaagatatttgcgtttataccgcacgtaaaagttgtgctggaatccaagagcatgtacgaactgatatacaaccgcttgaacggagatctctttatgtgggaaccacgttctccgcactatgacatcagcccggataacgaagtcccagagtcaaaagacctgtacgcagagccacagctggaagagtttagacgaaacctgttgctcagtacgagcgccatggaaagtagtatttacttttccatggcggagccaacggcttctgctccaccggcgccaccggtgcgtaatgaagccttctcctttgagttgtttgtagagcagggaactttgattctgttctcgcatcttctggatcccgagaccaaccagcgatccaaggagtgcggtaagtttcaggtgaacttaaaggagctgcgtttgtttacagtgaatggcttggacaacgattcgactcggagtttcttttccatccaactgggcgagatcgatgccttgcattgcgggaatacgctgcaggatttggagctggcttggagtgatttggcggatgaaaagctgctgcccaccatctataactttgcaagtgttcatcagcagcaggacaggaaaagaatggaggttttatccctcgtggctgagatcaagaagcaaccggagcagcgcatcaagagaatgaagatgtccttcgggatatgtggcgccattctgcagcatcactcctgccactcggagcattcttggctgaatcaactgatcgactttatggacgtggccgactttcccatcgaggaatacgaaccgtttgctctggtctccgagctgcagttgcatgtgtggaatgctgggatcgactatcgcccgaaattctttccacaacgtgcgttcctggatctgggctactgtaccttgagcagcaatatcatatcatcgatgagtggctgcaccttgcgattgctggccgaggattgtgtcctgcaactgggattggttaaggaggagtccaacgactccctgatacctgtgctgaatctgggactcttgaatatatccttccgtttgaatgcagaaggtagtggacaaccgcgagtggatttgcgctcttccatccacgatatgcatctgaagacttgctacgattcggcagcagctttggcccaacttatagcctatgtggccaacgacagggacttgtgtccgccagaggagcccatcttgaatgaggacactaagcctgcagagccgaaacccaacgaggagcatgagatgagcgatcacacccagaaccatgtgagcaaattgatggccgatgctgtgatagacgtagagtcctcgcccaatctcagggcaatgaaatctccagggggtcgggaggagggcattgagatattctacttcccggatgagcccaaagagaaacggaaatccacgtccgccaagctgcagaccaagtcactgatggtcgagagtccctcggtcatcggagacatcctggactttgaatcgaatgtgatcttgcagtcctactaccaccagagccaagtgcaaccgcagacatcactgggctcccaggtgcagcaggagctgggttccctgggcaacgcgtccctggaggagcgggatttcgacatcatacacgacgaggagatttcacgcatggacaagttcggtgtcaagcaaatttacatctccgaggaccctttgcagattgtggacaatcactttgagctgccgcatgagaaagtggacctgcttaggcctccatctaatttcccagtggccgagagcacttacaccctttgcgagatgacattcacatggcacctttatggcggccgggatttccccgatgaaccactcaagaaatcctcttcgtcggcaaccagtggctttggcatgtccgatacctacaagtatggcgtgtctcaagctcaagagcaggataaacaggacaaaaagggttccaagaagggtctgctcaaacaacccaaaggatcgcagcgcaatctggaggttctagtggagatgcagctctccaagattcgattctcctacgaaacctatccgttgacctccatgtactcgtcccgtcaggtgctccttgtgtcggaaattgaaataagagataggttgcgctcctcggacattaacaagtttctgtaccatccgacgggcaacaatttatcccataagccggacgagaacatggtcatagtgaaggctctgaatgtgcgtccgaatccgcaaaagagctccgcggaagagtgctccctgagggtctccattttgcccataaaactcaacattgaccaggatactctgctctttctcgaggacttcttttcgggcatgttccgaaactccgctagtgctgctggtggcaccaaaacggagggcagcagttcgtcggccacggatatgccggtgatgtcggtgagcaaaatgccggaggagttatccgataaattgcccgattcggaagttaaggagatggtggagaggaacctgaatgtgctgattgaagagaacagcttggatgtggagttggaggaggatcctgccacggctccacctgtgttcttccgcgaggtgatcttcagtccagcactacccatttgctttgactatcatggacggcggattgaactctcccgcggaccggtcaccggcctaatcatgggtcttgcccagctgcagggatccggaattaatttgagggaaattgtgaaccgcagaggcattctgggatggaacaaactgtgcgagttcctggccaaggagtggctgaaggacatcaagcggaatcaattgcccaatatcctaagcgggattggacccacgaatgcggtgctgcagcttttccagggtatctacgatcttttccggctgcccatcgagcagtacaacaaggatggacgaattatcaggggattccagttgggtgcccagagtttcaccgctcgcacagcgctggctgccttggagatcacctccaggattatacacctgctgcaattcacggcggagactaccttcgatatgctatctgcaggtccttccatgaagaagcggaagggcggcaggcagggcaaacggaggcgacagggacgacccaaggacctgcgcgagggcgtggccaacgcctataccatagtgagagagggcatcaacgaatcggccaacacactcatcgaagccgccatcacggagcacgaccagaagggctacagcggagcggtgggcgcggtggtacgccagatccctcagctggtcgtctgcccggcggtgctggccacccaggccaccaccaacatcctgggcggcgccaagagctcgctgattccggaggccaaactggaggcgcgcgacaagtggaagcaggagatccactaggcaactgcttcacagatcgactaggttaacggtagctatagttcacggggcttacagcataacgcaatgttttctattgttttactaataataaataatgtacataaaaggagcacttgcacgagacggcgaggtgacgagggatttgggatcccgaacggtgattccgacatgggtgtgattgaacttatcctttttagccatattacagtacatgagagttatattttttattattttacctgaataaatatatatatatataaaagaaaaag

SEQ ID NO: 624 - protein, 1906 aa, DROSOPHILA
MSWFNPWDGLKTKMCRYLLQRYLGQFFENNLNLEQLKVDLYNGKAVVEDIFLKVNAFNDLFEDQGWAFEVVSGHIGRLTVVVPWNALMTNDSSLEIHNLTITLRPVTRYQSGTTMLESMWSSVSSSMQMAEECMKQVDDDVPFLNHNNALIGLEKFAETIDNVLNRIRAKLTNTTLNIEYILPRSDRKLVLSFQASHVEYKNKTGYEMPMSTSQDTETEEDPNSSFNALPMIAKHNLVIEGLSLHTSEVLDVMDHQFGPTPYEQLCKIVELKGAQNIQINIKQTENIVGPKVSLELSLDDIYFMLTPRQIHLLIEFSKGFNCGGQQERPKKGRSLKSAPPSEYQMHSLQQPTRMTGILGQNADWCTGMSEADPSEYSVYGNPPRSGYARSRKMSESTNSMVTSCTNTLQQELGYTEKSGEILKFKVQISKIYGIALHQDILIQNTANIDSCSTVFDHASYLRYSDTASGFFLGTLLENHIPLQNQQYLLLRAAPIIVSGSQQRYFQELTSRTTLSATAVDLIEVLDNSKEHLLQFDRQRNCPDGYHIRPEIVLTQSSSFMFKQNHNRCSNKIECSLDECTAELDISIYDRLGALFGSSPFSGDSASSTPYPDDPNQTEFVVKSENLRLHLRFPVVDGRAANDPLKIPWWKKNVRRDFLAVEFRSLVVSSRSQISIVSDELDVFYCDADKQSAVHLLKCQQKMQPNKKIQIDVLQLKDTSDGQKKARKSPFSSKCTFGYTSHVEGLDGSVDKTDSLLPGETEEINEFCDSCTQSSKLKIFAFIPHVKVVLESKSMYELIYNRLNGDLFMWEPRSPHYDISPDNEVPESKDLYAEPQLEEFRRNLLLSTSAMESSIYFSMAEPTASAPPAPPVRNEAFSFELFVEQGTLILFSHLLDPETNQRSKECGKFQVNLKELRLFTVNGLDNDSTRSFFSIQLGEIDALHCGNTLQDLELAWSDLADEKLLPTIYNFASVHQQQDRKRMEVLSLVAEIKKQPEQRIKRMKMSFGICGAILQHHSCHSEHSWLNQLIDFMDVADFPIEEYEPFALVSELQLHVWNAGIDYRPKFFPQRAFLDLGYCTLSSNIISSMSGCTLRLLAEDCVLQLGLVKEESNDSLIPVLNLGLLNISFRLNAEGSGQPRVDLRSSIHDMHLKTCYDSAAALAQLIAYVANDRDLCPPEEPILNEDTKPAEPKPNEEHEMSDHTQNHVSKLMADAVIDVESSPNLRAMKSPGGREEGIEIFYFPDEPKEKRKSTSAKLQTKSLMVESPSVIGDILDFESNVILQSYYHQSQVQPQTSLGSQVQQELGSLGNASLEERDFDIIHDEEISRMDKFGVKQIYISEDPLQIVDNHFELPHEKVDLLRPPSNFPVAESTYTLCEMTFTWHLYGGRDFPDEPLKKSSSSATSGFGMSDTYKYGVSQAQEQDKQDKKGSKKGLLKQPKGSQRNLEVLVEMQLSKIRFSYETYPLTSMYSSRQVLLVSEIEIRDRLRSSDINKFLYHPTGNNLSHKPDENMVIVKALNVRPNPQKSSAEECSLRVSILPIKLNIDQDTLLFLEDFFSGMFRNSASAAGGTKTEGSSSSATDMPVMSVSKMPEELSDKLPDSEVKEMVERNLNVLIEENSLDVELEEDPATAPPVFFREVIFSPALPICFDYHGRRIELSRGPVTGLIMGLAQLQGSGINLREIVNRRGILGWNKLCEFLAKEWLKDIKRNQLPNILSGIGPTNAVLQLFQGIYDLFRLPIEQYNKDGRIIRGFQLGAQSFTARTALAALEITSRIIHLLQFTAETTFDMLSAGPSMKKRKGGRQGKRRRQGRPKDLREGVANAYTIVREGINESANTLIEAAITEHDQKGYSGAVGAVVRQIPQLVVCPAVLATQATTNILGGAKSSLIPEAKLEARDKWKQEIH

SEQ ID NO: 625 - DNA, 3136 bp, DROSOPHILA
gtacaacaaggatggacgaattatcaggggattccagttgggtgcccagagtttcaccgctcgcacagcgctggctgccttggagatcacctccaggattatacacctgctgcaattcacggcggagactaccttcgatatgctatctgcaggtccttccatgaagaagcggaagggcggcaggcagggcaaacggaggcgacagggacgacccaaggacctgcgcgagggcgtggccaacgcctataccatagtgagagagggcatcaacgaatcggccaacacactcatcgaagccgccatcacggagcacgaccagaagggctacagcggagcggtgggcgcggtggtacgccagatccctcagctggtcgtctgcccggcggtgctggccacccaggccaccaccaacatcctgggcggcgccaagagctcgctgattccggaggccaaactggaggcgcgcgacaagtggaagcaggagatccactaggcaactgcttcacagatcgactaggttaacggtagctatagttcacggggcttacagcataacgcaatgttttctattgttttactaataataaataatgtacataaaaggagcacttgcacgagacggcgaggtgacgagggatttgggatcccgaacggtgattccgacatgggtgtgattgaacttatcctttttagccatattacagtacatgagagttatattttttattattttacctgaataaatatatatatatataaaagaaaaagatgacgtatttcttcatggtgctgctaaaagtttaagaacggatactattctagcaaaatttaaccgaactaccagaatttattaaaccctcagctaaaaatgaagtacaaataaaaacaactagcagtttacaaaatgatttaaaaagacgttacttttatttgtatgcttctctgtgaatggcaagtttctgtaaacagctgattgcttgctattcggcgcgaatgaatgttcgttggcgcatggtttacgtaaaagccgcataaatcgctggaaatattagttaaaattaggtatctaagcttaaaattaaacataaaaccatgtccagtgcgctgactcgcctgttggagcgcctgccactgaaaaaacagacggcgcaaagcggtattcgtgttttttccaaccaggagcagcggcaagaaattgaggatgatgaaggtaaacaattaagtttccctggcttacacgttttataatggatatatcttcctgatcggccagaattccgagtgctcagcctgcggacggtgaagcagcagatgcagaagcgccagcaggtccgtcgggatcccatcacaccgccgcgcactggccgcatggcggtggatcaggactggacggccgtttggccaggaccacgttcgttccacccggccagtgtgcctctgccactgcggcagggattcacggaacgcggagcagcagctccgtcgaagttcgccaatgcagagctgatgaagatacccaactttctgcacttgacaccgccggccatccgtcagcaatgcgaagccatcaagaagttctgcacgccatggccaaagggtctggagacagaggccaagtggcagcgccacttccccctggaggtcaccaccacagactactgccagagtttgcccacgatcaggaatccggaggccaggcgcgtcaccattaccctgaagctctctgacctgaagttcgatgcgcacgccagggataagttcctgcgcctggtgggcgatcgctacaacaaggacacggacctcgttaccttcgtcacggatcgctgtccgcagaagaagcagaactacgactacgccctgtatctgctcaccgcttgctatcacgaatcctttgtcaccgagccgtgggaggccaccaaatcggaggccgacatggaggtctatctgttcgagcgtaaccagtcgaaggtctccgccgagggaatcctcaactggaacgccaagaagggtgctccaaaagtggttcccagcaagtcattcgctgaatgcgtggagaaactgataaacgaaggcgaaaacgagtacaacttgggcaaatacaaggaggaggtcaagaagatgttgaacattgcctaggaaactggatagttgagtgaaccaataaagcgagaagttgttaaaaaataatcataacaagtatttgaatgttacaatatttatcttgttaataattttgaattgaaactgggcaaccatgtaatccccctttacgacgcccctccttcgttgtgaatgtccgaacagctgtttacaatgaaggcgtgcccgtgtgaatggcattagaacagcgccaagaacagaaccaaaaaaaccgaatttccgcggacgtggaagcaaacttttgttttgctatgctaattagtattttagtagttaataagtttattcaaccccgtttggatggagctttgagtagaatacagtcgtagagaggtgagaacaaactcctgataagaattcacctgctgatgacgtttcacctgattaaaattataaaatccggaattataaacaaagttagtcgctgaagtgtttctaagttatagtacattcattgacatatgtctgcgataaggtaactatccagcggatgttccttcagcgcagttaaatatcatttctattatcttaactttcgtattggtgaaaatgactcgccgcttatcttgtattttttgtatgtgcgacccaaaaagatacatatgtgcttacgtttctgaatttttctacttttctactattctctttcacccacagaccacgttgcagtgccgccagataaagagacaagccagcaaacatccgcagcacctgagctaacaaaccaatatcaccattaccgcgagatatacttcaccgacattaatggttgacgtagagacccgtagagcgcacacgtagccacggatatccggcaaagatgcggcgacccaatctcaagtggatagtgaaggcctcgctgctcttgttgatctcactgactctcttcgtactgataaccagctggatctcatctactccgtacaccaacaagccagtccatcatggcgtggagcccgtgcccgaaaaggctggc

SEQ ID NO: 626 - DNA, 1073 bp, DROSOPHILA
ttcgttggcgcatggtttacgtaaaagccgcataaatcgctggaaatattagttaaaattaggtatctaagcttaaaattaaacataaaaccatgtccagtgcgctgactcgcctgttggagcgcctgccactgaaaaaacagacggcgcaaagcggtattcgtgttttttccaaccaggagcagcggcaagaaattgaggatgatgaagaattccgagtgctcagcctgcggacggtgaagcagcagatgcagaagcgccagcaggtccgtcgggatcccatcacaccgccgcgcactggccgcatggcggtggatcaggactggacggccgtttggccaggaccacgttcgttccacccggccagtgtgcctctgccactgcggcagggattcacggaacgcggagcagcagctccgtcgaagttcgccaatgcagagctgatgaagatacccaactttctgcacttgacaccgccggccatccgtcagcaatgcgaagccatcaagaagttctgcacgccatggccaaagggtctggagacagaggccaagtggcagcgccacttccccctggaggtcaccaccacagactactgccagagtttgcccacgatcaggaatccggaggccaggcgcgtcaccattaccctgaagctctctgacctgaagttcgatgcgcacgccagggataagttcctgcgcctggtgggcgatcgctacaacaaggacacggacctcgttaccttcgtcacggatcgctgtccgcagaagaagcagaactacgactacgccctgtatctgctcaccgcttgctatcacgaatcctttgtcaccgagccgtgggaggccaccaaatcggaggccgacatggaggtctatctgttcgagcgtaaccagtcgaaggtctccgccgagggaatcctcaactggaacgccaagaagggtgctccaaaagtggttcccagcaagtcattcgctgaatgcgtggagaaactgataaacgaaggcgaaaacgagtacaacttgggcaaatacaaggaggaggtcaagaagatgttgaacattgcctag

SEQ ID NO: 627 - protein, 326 aa, DROSOPHILA
MSSALTRLLERLPLKKQTAQSGIRVFSNQEQRQEIEDDEEFRVLSLRTVKQQMQKRQQVRRDPITPPRTGRMAVDQDWTAVWPGPRSFHPASVPLPLRQGFTERGAAAPSKFANAELMKIPNFLHLTPPAIRQQCEAIKKFCTPWPKGLETEAKWQRHFPLEVTTTDYCQSLPTIRNPEARRVTITLKLSDLKFDAHARDKFLRLVGDRYNKDTDLVTFVTDRCPQKKQNYDYALYLLTACYHESFVTEPWEATKSEADMEVYLFERNQSKVSAEGILNWNAKKGAPKVVPSKSFAECVEKLINEGENEYNLGKYKEEVKKMLNIA

SEQ ID NO: 628 - DNA, 3650 bp, DROSOPHILA
agccaagagctgatattatttaattaaatctaaaaatattagaattcaacgtttctgtgtatttggatttccctttaattgttcgcattcctctcgcacttattggaatctacctttggaaaattgttatacgaaattccgtagggagatcttaacgcgcccattcttcggcatcctggaatagttaattttcagaaaattaaactctagacgaagtcaagagctcaacaaatgggcaaatcattttgaaacgtaataaccttgttctaattatagaactaattgttacaaatttacctgtgaaagcaggcttcaattaggcttccttttaaacaacaggagcaggaggccagcaattgacaccaaaggcatttataatgagcagagaaaatgttttaggtctctggaaagaatacatatatcttacttagttccgcaccaacagccacgcaaaaaagtttgttggggtaaagaagggagaagcttcttgttgttaatcgatataacctaagttacctttctcaaacacactggaaataaaagagtactgcaaattaccatatttccgttacttcaaaattataattggatccataataatcaacttggatgatggaacttcagtgaaaattacaaagatacaaattatatgcatttataatcacattaaataaagtccaaagggctttcttttacaaatgacctccttaaaaatttgtatttcagtgctagctagcaaccttgtttaaaatgaccttccatttttcatttcctattttccagcttaaagtgtcgacggcgccgggtggaagccaggacaaaggacatagtcatcaggtgctcgtgacccctgaaccgtgcaacaataagtatccgacctgtggccgcagaattgatgttcgtgcgaaagttacccgtcggctgcctaaatgctacgtccacgattcgataagggttaggcttacgcatcggggaagtgggtcagtagactccgggagccatgagtggtacagcggttgcgcggctcctgctccgcctggagctaccctcgccaggcgtaatgccaccaccgcccacggactacgattacggtggacccatcagcgacgatgagttcctggccagtgcgatggccaccgagggcccaacggtacgctacgatttgtttccgcagaacaacagtcagcccactctgcaaatcgtccttaaccacacggaggtgcaaacggatctgcaatatccccactacgaggacctgggcctggatcccgatccgaattggacacgaatctgcgaggatgtgtacaacccactgctggagaacaatcgcattgagttctgggtgtgcggagtactgataaatatcgttggtgtcctcggcatcctaggcaacataatctccatgataatcctctcccgaccacagatgagatccagtatcaactacttgctcactggattggcccgctgtgatacggtgctgattatcacctctatcctgctgtttggaatacccagcatatatccatatacgggtcactttttcggctactacaactatgtttatccgtttatatcgccggcggtattccctataggcatgatagcccagacagctagtatatatatgacatttacggtgaccttagagagatatgtagccgtttgccatcctctgaaggcgagagcactctgcacttacggaagagctaaaatatatttcatagtttgtgtatgcttctcgttggcctacaatatgcccagattttgggaggtcctgactgtcacctatcccgaaccgggcaaggatgtaatactccactgcgtgagaccttcgagactgagaagatcggagacctacatcaacatatacatacactggtgctacctgatagtgaactatatcataccctttctcaccctagccatactaaattgtctgatatacaggcaggtgaagagggctaatagggagcgccagaggttatcgagatcagagaaaagggagatcggattggccacaatgctgctgtgcgtggtgatagtgttctttatgctcaactttctaccgctggtgctcaatatatccgaggccttctatagcaccatcgatcataaaattacgaagatctccaatctactgatcaccatcaatagcagtgtcaactttctcatttacatcatcttcggcgaaaagttcaagcgcatttttttactcatttttttcaagcgccgcctgagtcgtgaccaaccggatcttatccactacgagagctccatatcgaacaacggcgatggaactctgaaccaccgatcctccggccgcttctcgaggcacggcacccagcggagcaccaccaccacctacctggtggccaccggaggaccaggcggtgggggatgcggtggtggcggtggcaataattccctcaataatgtccgactgacccaggtctcgggatcacccggtctggtcaagatcaagcgaaatcgagctccctcgcctggtccagtggtttactttcccgcccgcgaaatgcagagatccgcatccacaacaaattcaacaaccaataacaacacttctattggttacgactggaccctgccggacagcaaaaaactgggacacgtctcctctggattctgagattgtgtccgggcaaaaacgattagaagggttcacatggaaggggttgacttagagcaccaatcttgtaaataggatagacacggaaatagggcttaacaaacagctgtggtcaaaatagtagtagcatttctttacatttctttaacattggaattttaaaggagatttaatttccaatctgaataatatattataaaaaaaactaatcactttaaataatttgatgaatttcacgagttttaaataatcaaatctataatgaaatctaaaaaaaacgatgaatgcgattttgggtaaataattattcgattattaaaggtgaacgtagctttttaaatttaataaaaacattttctaagtggcatgagtgcccgggaatgctaatattttgaccggaggtgtaactactaagtactactatagtttgtacagaaggcataaactatgcgctccaagcgttgagttacttgtgataagcgttaaatgtttccttccccaatttctctactactcctccagaacttaactcgttgatatagattttaagaaagttagtttcagtggcggccaggctgaagaaaatagtttcttagactgagagttttaatattgttttcctaacgttttcctatcatttctccggttcaatgaattgaatttgtatcaatttcgcactaaattagtcatcgaaacttttccgaacccaatatcgtttcactttctactggcctttgtccgaagttttatttattagcgtaaactttagctgcctctaattaaatatcctttacgacgcatttctcggccgaacttgatgaatgattttccttttctttggctgatttgggtttcccgaacttttcgatttccctcacactttaccggaaactggggttcttcgggtccaaatatacaaaggccgggcaatctgtcaacttgtcagaaagtttttaaaatgccgctcaaagttcagtcagctcaaaagtttgccagcatt

SEQ ID NO: 629 - DNA, 1650 bp, DROSOPHILA
atgagtggtacagcggttgcgcggctcctgctccgcctggagctaccctcgccaggcgtaatgccaccaccgcccacggactacgattacggtggacccatcagcgacgatgagttcctggccagtgcgatggccaccgagggcccaacggtacgctacgatttgtttccgcagaacaacagtcagcccactctgcaaatcgtccttaaccacacggaggtgcaaacggatctgcaatatccccactacgaggacctgggcctggatcccgatccgaattggacacgaatctgcgaggatgtgtacaacccactgctggagaacaatcgcattgagttctgggtgtgcggagtactgataaatatcgttggtgtcctcggcatcctaggcaacataatctccatgataatcctctcccgaccacagatgagatccagtatcaactacttgctcactggattggcccgctgtgatacggtgctgattatcacctctatcctgctgtttggaatacccagcatatatccatatacgggtcactttttcggctactacaactatgtttatccgtttatatcgccggcggtattccctataggcatgatagcccagacagctagtatatatatgacatttacggtgaccttagagagatatgtagccgtttgccatcctctgaaggcgagagcactctgcacttacggaagagctaaaatatatttcatagtttgtgtatgcttctcgttggcctacaatatgcccagattttgggaggtcctgactgtcacctatcccgaaccgggcaaggatgtaatactccactgcgtgagaccttcgagactgagaagatcggagacctacatcaacatatacatacactggtgctacctgatagtgaactatatcataccctttctcaccctagccatactaaattgtctgatatacaggcaggtgaagagggctaatagggagcgccagaggttatcgagatcagagaaaagggagatcggattggccacaatgctgctgtgcgtggtgatagtgttctttatgctcaactttctaccgctggtgctcaatatatccgaggccttctatagcaccatcgatcataaaattacgaagatctccaatctactgatcaccatcaatagcagtgtcaactttctcatttacatcatcttcggcgaaaagttcaagcgcatttttttactcatttttttcaagcgccgcctgagtcgtgaccaaccggatcttatccactacgagagctccatatcgaacaacggcgatggaactctgaaccaccgatcctccggccgcttctcgaggcacggcacccagcggagcaccaccaccacctacctggtggccaccggaggaccaggcggtgggggatgcggtggtggcggtggcaataattccctcaataatgtccgactgacccaggtctcgggatcacccggtctggtcaagatcaagcgaaatcgagctccctcgcctggtccagtggtttactttcccgcccgcgaaatgcagagatccgcatccacaacaaattcaacaaccaataacaacacttctattggttacgactggaccctgccggacagcaaaaaactgggacacgtctcctctggattctga

SEQ ID NO: 630 - protein, 549 aa, DROSOPHILA
MSGTAVARLLLRLELPSPGVMPPPPTDYDYGGPISDDEFLASAMATEGPTVRYDLFPQNNSQPTLQIVLNHTEVQTDLQYPHYEDLGLDPDPNWTRICEDVYNPLLENNRIEFWVCGVLINIVGVLGILGNIISMIILSRPQMRSSINYLLTGLARCDTVLIITSILLFGIPSIYPYTGHFFGYYNYVYPFISPAVFPIGMIAQTASIYMTFTVTLERYVAVCHPLKARALCTYGRAKIYFIVCVCFSLAYNMPRFWEVLTVTYPEPGKDVILHCVRPSRLRRSETYINIYIHWCYLIVNYIIPFLTLAILNCLIYRQVKRANRERQRLSRSEKREIGLATMLLCVVIVFFMLNFLPLVLNISEAFYSTIDHKITKISNLLITINSSVNFLIYIIFGEKFKRIFLLIFFKRRLSRDQPDLIHYESSISNNGDGTLNHRSSGRFSRHGTQRSTTTTYLVATGGPGGGGCGGGGGNNSLNNVRLTQVSGSPGLVKIKRNRAPSPGPVVYFPAREMQRSASTTNSTTNNNTSIGYDWTLPDSKKLGHVSSGF

SEQ ID NO: 631 - DNA, 3573 bp, DROSOPHILA
aggatgacttggcgcacagtttcggtgtgacacagttaggtggcattcttgcctgatatccagagcaagtgatctgaccgagattgcgggggttcgcaatcactattcgcataataaagcggtctacacgctttttaattttaattttccgcccaccaccgctcttaggttcaagcctgccctctttttccgagccttttaaaacattgtagacggtcttacgggatacaggaaacatttatactaattctggaaaagattttcccaactgggtggttatagtttattaattgggtaacttcaaaagttaatctctttccaggcattttattaaatttaataattcgctttaagcaccgtttgatcagcaaaatttcacaagcaaagtcaacaaaatttcaatagaagcgttgtaaaaagcaatgcaaagccaaaaataacggaaaaatcgagttcgttctaagaaaaagaccaaaccaaagtaggaaaacaaaatgtgtaaagagtttcttgacagtctcaaaagtgtgtaaacttggaatttgttgtttattttcttgtatatttaatatttttaatttgttttttgatttataagtaaaataaatattgtttaattatattttataaaaaaattgcgtttaattaagcaaaaaaccctttatttttagctttaaagtcaaaaattcaacttatttcacagtgtgtaaacagtttcttgacaaactgtatatattttaataaagtttatagcgtaagtaaaagttaactgagaaagtgttttttacttaaaaaaaattggatagatcatagcatggccatacatcgcttttgattcgccaatgcagcacagatattttttctaaaataatattctttcaaaattgcagttacgcgttaatatgaaatgaaaattcaaatatttcataatgaaatttatgttggcaatgctgaactatgcattggtgtcggaacgacagtatggtatttttgcgtattacggtcacaccaatgccggcagaacaatttgttattaaaacaaaaagagttaattatagcgcttaaaaggtaacagctgtgcgtttgcattgttgcttaatgcaagcaagttaactaccctgcaactaaaaataaatattcaaatcggagctaggcaatcgcattggcattggaattttagtagttttgtaaactatatttgtttaaatcggttacacgctgacaactataaattataatagcagtgaagtgaatgaaattgataagcttatcttttcggaagcgcagcaacaataagcgcgttccaccaaaatcaattgaagttctgcccgttgaaatagttacttttttgactgcgtggctacaagttgtgggcgtgttcgaattttgggtatgtgcgtacagtagagactggctgacacggacggaacaaggatttagtacatagaaggagtatcttttctttgaagtttagttttgttcctaattaacattcaaaattatatatctttacataatttacaaaattaaagatagttgggcgaccactgtacacagatttattataaatataaagagcggcaataattgtaaaggccgcgtgtaataaatagcgtataaaccgaatccaatagccatatacgtacgtggatctcgtttcagcccaatcatgtccaagtacttatctgtcctactgctgtccgcggcactcgttggagctgccaagccggaagataatgaatcgtgctattccttcgccggcggctccgtttatcccgaccagccgaagggcgaccatcagctgcagtacaccaaggcagtcagtgagttccattggatgcaaaaaaccagggatcactattaagttgctgctacccttatttccccagtttccaagccagctccgcagttcgagggcaccgccgtggttaataaggagattgtgaagctatcattgtcccagtatctagggaaatatgtggtgctactcttctacccactggacttgtaagtttacatttacatttagtatgatcgcatttctcattgccattttagcacctttgtatgcccaacggagatcattgccttctccgaccgcatcgccgagttcaagaagatcaagaccgaggtgattggcgtcagcgtggactcgcacttcacccacttggcctggataaacacgccgcgcaaggagggcggcctgggcgacgtgaagatcccactgctctccgatctaacgcataagatcagcaaggactacggagtctacttggagtccagcggtcatgcgctgcgcggtctcttcattatcgatcagaccggagtgctgcgacagatcaccatgaatgatttgcccgtgggacgctctgtggacgagactattcgtctggttcaggccttccagtatacggacacccatggagaggtttgcccagcaggttggcggccaggtgccgatacggtaggttttttgaagcattgccttaggtaaattctttttgataccattacctttacagatcgttcccaatcctgaggagaagacgaagtactttgccaagaacaactagggacagatagagatgcacattaccttagtagcctagcccagttacattcctaatgttcacgactgaatcacgatgcaaacgaacaatcgctagagtcctctgtacagaaaatccaaatccgcaatgccaccgattgtgaatatttcgcatttgctttgtacaaaacatagtttgtttattttacagcataactgagatataaataaattcatgaagtacatgtgaaggtgatgaaaattgcgcggcgccacaggagcggtaccaaaaaggaggagatgttttcgatctcaaaatgccttgaaagctggctcactaggccactctaatgggtaacaattcgattgcaattagtttcatacaaaaatatatgtaatatgtaatatgtagtaggtaaaaggtaatagtaaattagttaggtacgccatggttgcaattaagttatcctgtgctccgacctatgcgtacaacaaagctaggtctgtcgaggtatataaatctggggaaacgggacgggggcgacgacaataactaggacgtcataaggcactcgttctcgtcggattcttcgtgtgtagtctgctttctgttttccgttttgtgcgtttgtcagtaagtgcttcattgtggtgagctttaaatgccaaaaccgaggttcataaaataacgaaggtgcaactgcggttcagatccaagttgtgcgggagattcctttgctgcggagattccgtatcgatcaaagcgttgcactgttcagattcccggaaacgttaatcaaataaggggttaaaaagttcttagagctatgaccatgcaacacgtcgaaccaaaaagcagtcggcgattataatgtttgggcgtttgttcctttagaatgcgattcatcatacagcctactgctcgtagtaaaccgcgtcctggaattaagacaaacacaaatcaatgaagggaaacgagtatatagcactggcatatgctttatttcactcagtgatatatatga

SEQ ID NO: 632 - DNA, 804 bp, DROSOPHILA
cggtcacaccaatgccggcagaacaatttgttattaaaacaaaaagagttaattatagcgcttaaaagcccaatcatgtccaagtacttatctgtcctactgctgtccgcggcactcgttggagctgccaagccggaagataatgaatcgtgctattccttcgccggcggctccgtttatcccgaccagccgaagggcgaccatcagctgcagtacaccaaggcagtcatttccaagccagctccgcagttcgagggcaccgccgtggttaataaggagattgtgaagctatcattgtcccagtatctagggaaatatgtggtgctactcttctacccactggacttcacctttgtatgcccaacggagatcattgccttctccgaccgcatcgccgagttcaagaagatcaagaccgaggtgattggcgtcagcgtggactcgcacttcacccacttggcctggataaacacgccgcgcaaggagggcggcctgggcgacgtgaagatcccactgctctccgatctaacgcataagatcagcaaggactacggagtctacttggagtccagcggtcatgcgctgcgcggtctcttcattatcgatcagaccggagtgctgcgacagatcaccatgaatgatttgcccgtgggacgctctgtggacgagactattcgtctggttcaggccttccagtatacggacacccatggagaggtttgcccagcaggttggcggccaggtgccgatacgatcgttcccaatcctgaggagaagacgaagtactttgccaagaacaactag

SEQ ID NO: 633 - protein, 242 aa, DROSOPHILA
MSKYLSVLLLSAALVGAAKPEDNESCYSFAGGSVYPDQPKGDHQLQYTKAVISKPAPQFEGTAVVNKEIVKLSLSQYLGKYVVLLFYPLDFTFVCPTEIIAFSDRIAEFKKIKTEVIGVSVDSHFTHLAWINTPRKEGGLGDVKIPLLSDLTHKISKDYGVYLESSGHALRGLFIIDQTGVLRQITMNDLPVGRSVDETIRLVQAFQYTDTHGEVCPAGWRPGADTIVPNPEEKTKYFAKNN

SEQ ID NO: 634 - DNA, 8538 bp, DROSOPHILA
cctcagcttttggcaaaccactcgagcgagcaaaatgcaccacaaggtggacaggattagcaggagggattcgccgctctggaccagggttccccaccagtcccagtcgtagacttgtactagatccaatcccaggcgctcctcgagggtttggttgaccgcactcggattcggaaatggactcgggctcacatggggaatgggttctgctgccgctcgactgtccatggcgactggcggcgggataccacttggactcgctcgtcggtggcctgataaaggtagaacttaatctgcccgttgatagtcgccacttatcggaaaccgtgagataggcatagtcatagccgatcgattcggggctccagtaaaaagcacgaaattctaaacaaaattcgttaaacttcaaacatctgaatgtcgctgatagcgactgaagtatttcgccaatgaatcgaggcattccgttggaagccactatatccgcatagccagcgcagtgataaggaagtccactcaatcatctcctatttggatcacttgtgtcactactacagcccttcaagattagggataacaatttcggaactcgtgccttgtttctcacggtgtacttacacacaattcctatctatgctctatttactttattcagcatttcgaagaccttggctactgataaattcaaaccacaatttgcttttatgggctgatatggtgtaggaaatcgtttggaaatgcacaagaatttacacaaaattatttatttacttgcatttgtattagtatttgacacctacgacatttacttcaaacataattataacttatttaccttgactaacactcattttaaatctaactttacaagccgatccattagtgtttgaactaggcgccacaataatcgattgctgacgttcgatagctggacaagtgaccacgaacaaaatcgtccagtctggcatcgcctgagcagttggtattttttagtgcttcgttaaattggcaaaaaagaggctcgtctgcggtcgcaaagtgataaaaccgcaaaaaagtccataaaatgttgtttatccagcaaataaagtgctctgactcaatgtcggatgcctagtctaagcgttcgcgaccaagtcagctggaactaaagttggggcagtgctaatgtgggtgagtattttcactttgccggcacgtgtttacttattttctatttattacccaataaagttggtaattaatgcttgtagagtgaagtgttaattactaaacaagctattttattaattaaagcctaaagcacagtgtccagtggtttagtttagtgcgctttagcaacgattacgtagctttgttgtgcttttccactccgtgacgtcatggggcgttggaccaatcggaatgcagcttgcgaggggcttgtccaccgatgacgtaggcgtaggcaacagccgacgtctagtcggaaaattgattccgttgcttgtgcagcgaaccacgtgagttggccacgtttgctctccgccccctccgatcgtcgagcgatgtgtatacgccgtgtgtgcccttcagttcgatggatattctcattcaatagccaactatcgtcgcagctagatcgcaaatacggaagcagatagtgcagcttattttctaaatattgctgctggctgtgcagtgcacatttacgtaactaattgcgggcaagtgctaagaatattacatgtttgcatagtaggtgtggccgagaaaactatttgcatccctcattgcaaggtgaatctaactgaaagcaatccattctaagctgttcttctcgcattttgcatattaaaatatatctggaagtcaaaagaaacttctaaatatattattttatctataaaataattagagcttccgttctgtagtcaagtataagaaccattttcctgtaccgctggcatttgattcgcctgaaaagctcttaagttcctttatcaacaacgcgagtgtttgcacattataatgaatgcaactagaagattaaacaacggccggcgcctgaggagcttgctaatcgagtgacctttgacctggcctgactgcgaaattcattacatgttcaataacccgcatctgcccccttttgcgctgcaattgtcagtcggcttatcaaaaacatcgcacacccagcaattaaatgcaatcgcaacagaaacacgctttatcagcgaccgcaaatattttagcaatcgctacgggtgggaaatcaagtcgtacgatacgatatcgctgtgataagcgagctattcatagtccacaggtcgtatgcgtaatttaatttatgcatgtagttgcaaaagttgagtgaacctttgcacccctgatgtaatcattaatcgcactgcccgcactcgaattacaccactagcaacagagaacaaggcagcataaagagaaatcaaagtgacgatgtcgcactcgttcacttatttacttcaagtgcaattcaaaaccggtgactgaaattacaggtcaataataatacgataatttgtacgatgactttaatgggttctaccaatgcacacactcccacattgtgcatatagtatgtagctgtatgagcgtaaacaaaattcgcacatcaaggaaatacaacgctgcgcagtgatcaagtcgaattgtgaataccctgctaccatgggtttgaatttgtttgaaaactctgttttcaacttgtattgttattactcgaacccaatagattgattattgtttttatttcgggtacttaaacaagtccctagtacttatataccccaatccaggcatcatttccctattaaaggccatcattcgggccaaatgactctcatttgtgggccaaccactcatcacatgcatataaatatgttttcacagcgacatttggctttaacgaactcgccttcgttgaccaaaacgatttcattaacttcgtttatataacgaacacactcccccttttcgcttaatggatgcaaatatttaaatgccatcatttgcatttggctctatttcgttttgttggcctgctcttgaaaatgtcacagaagcagcgtttggtttatttggttgtccctcaatggaatattttcaatatttgttgtatctttaaatagaccagcctataagtatcagctgaatggacgcccacacatgagaagattgcgtatacgaattgtctttgaaaagctgaagaatttatgtgtgggataattttggtggaataatttccgcccgtgaaatgggacattgttgcgtacgtgcacataattgtggggaaatgggagtaaaactgatatatatacagtataattcgcttagctgcatcgatagttagctgcatcggcaagatatctgcattatttttccatttttttgtgtgaatagaaaatagaaaatagaaaaaaaaaaattaagttagctgcatttttaagttacctgcatcgaggcattgtgcaaagtactcgaggcagctaagcgaattatactgtatatatataatacccatttatatacaagaggcgtgagaatctcggtttttttttacagtggttagaggttttatttccatgatcattaccattgcacatgatagtccgtaaggtgttttacgtctaggttagcactatctttttcaaaatttcttgagattacaaccagacaaatttgtagttttccgctcttgatagtgagaattcgagtaaagcattttcgtgttctcaaaatttttaagatattttgcgctattttcagatttatgtgttggaccttctttatgccaacaatcttcttgatttatatgactttttgggtgactgaaagtgaactacttttctgacactacaattgcaggattcctatacgattgacccactgtgctggaccgatatccgtctggggcgaatgcaaatgagtatttttaaatgccaaggctgtcgcaaccagttggcagtttattgcaccgcaaagtgtctaaggcagcgcaatcctccagcccacctccgcccaatggacccctagtccacccgccgagccagacatcgcagcgctttgccggcttgtcttatcagctatcggcaattggtgctactgccggtgccatttggtcggttgatttacctagtcccatgcccgtccactcaccaaactcgaccatttaccagctctatgaaagctctatgtgcgggtatttcactgcgctgccgcgccttcgaatcgtttgattttcaacgttcagatacattttggcgctcgacgtggtcggttgtgttttgctcgtcgcgctctgtcctgctcattcgatcgatttgctgcctctctttcgtcgcgaactgtcgcctctttgggatttgaaaatatttaaacaagtgttatcagcggccataaacaacaatcgaatacaaaaagtgaggggacgagtgtacaatgtcaaaatactcatcaaatatcgttcatcgcagttatcgtagttggttattggtaatcgcagttatcgcaaaatatcacttgtaatagaagccatcgtaaattatcccctttaattctttgagggctttcgctttgcggctttgctcgagagttcgagcaagtgggggaaggcaaatattggtcggatcagcccacaaagtgctttccatatcttatctgcgatttctggtaacatacagtttatgggccgtgtatcgatggggccttatcagtgaacagtgcctaacaaaggtactcagccataaacaggcgcatataaaataatgagcggaatgccgactttcaacagggtcgccggctaatttgaactgattaccagatgaatccgaaaagcgcggaaactgtggaaagtttccgaacgtaaatgccgatgaagccaaatcgaattaaatcgaatggatgtagtcacccagtgcactcggtcattaggctcttatctccgttccgagcacttgaccttgtcgcagggatcgcaatcggtagttggaaccagtggcttaacataatttatgtattctagtccgcttctgggcaacaagtgtttctgtgtatatgagagtgggaagagggctcgaccaccaacaactcggagtgggaatcaagccccccaacgggccaagcgagtacaaagtcaacaatggccaaacaagtgctcgagcagggcgtactcttgtatgtacacaagtccattccagatgatatcgctggacaggtccacatggaagtgcgaaaggcaaatatattcttcccagtttttcgactttatcttagattgctatcgtagattgattttatggttatggttattgtattgaaatattggttggcggccctccccactggaataccttgagtgttacgttcgctttttgacaactaataaataaactgaactgatttcaaacattaattaataatgtaatgagtccctaccaaaatgagtttatggtacattgtaaagcctgcttctatagatcatcatattatcattatcatatcattagtatgttataaagaagccaacccatttaattgatacatatatgtacatcccattattatgcaattactacccaagactgactggcttatctaatctgcgtcctatcttgcaggcagcatgaccgagggcaagaacttaccccactctagtgcggatgtgccgttccgcagcaaggagctgcgcaagcaatcgctcatccagcacaccggcctggtcggagtcatcgatgagggcaccaagaccatcggtttctccatctacaccacgccggacttcaaggagatcgccgcacaccgggtggagctgagcgtgatcacgccccaggatggctggtatgagcaggatccgctggagatgatggcctcgatcaacaagtgcgccgaggaggccatcaagcagctacccgaacagggtttctctgccagcgacattgtcaccgtgggcataaccaaccagcgcgagacgacaatcgtctgggatgcggtcaccggcaaaccgctgtacaatgcgctcctgtggaaggacatccgcactagcactacagtggagcagatcgtggccaaggtgcaggatccgaaccacttccgcagcagcactggcctgcccatctccacgtacttctcggccctcaagatccgctggctgcgggacaatgtgcccgaggtgcgacaggccatccgggaaaggcgatgcaaggcgggcacagtcgacagctggatcgtctggaacttgacaaacggtatgagaagtttaggattacaaaatttgtagtctaattacttaactgaattgatttgtttctctccaggagctctccacatcacggatgtaacgaatgcctcccgcactctgctcatgaatctggagacgcaagcctgggatcctgttctgctcaagacgttcggtatcagagaggagatgctgcccaccatccacagctgttcggagatatttggcaagatcacttcggagcgaagtccactgcgtgggatgaccctaagtggaataatgggcaaccagcaggcctcgcttctgggccagatgtgcgtgaagccgggtcaaacgaagaacacctaccgatccggctgttttctgctctgcaatacgggggacaagccggtcttttccaggcacggtctgctcaccaccgtggcttacaaactcggtccccaggcaccgacgatttacgcaattgagggagctgtgtcggtggccggacatgcgctgtcctggctgcaaaacaaggtgcgtatcctgccggactccagagatgccgagaaatatgcggagatggtgcccacatcgggggatgtgtacttcgtgcccgcctttacaggactatatgctccctactggcggcagaatgctcgcggcatcatcattgggctcacgcagttcacccgtaagaatcacatagtgagagctgcactggagagcatctgcttccagacgcgcgacatcctagagtgcatgcatcaggagtgcggttacgaaatcaataagcttcatgctgatggcaagctcaccacgaacaacctgttgatgcaactccaggcggacaccattggcatgcccgtcttccgctcccagctaatggactccaccgctttcggggcagccatgtgcgccgcccaggcagatggtgtcaatctctgccagttcgagcctgagaagcgatactacgagaacgtgcactacgacaccttcctggccaccaccacggatgtagagcgaaaggagcgatacggcaagtggaagcgggcggtggagcgcagtttgggatgggtcatcaagcagaagaagacgcgtgagtacacggaggagaactaccgcatgctgtcctctctgccagcgagcatcttcctcatcagcagcttcgccatgctggtgcattccctcgctgcgagtggccagtaaatacgacagtcgcctgacacttagatcgattctaggttgtgataataattatttgtccggatttcgtttggatcttatacacacactctgtacatagtcctcgaaggacagtgggtggttgaacgtgctttaaaccctgtaaatagctggactaagctccgtactactttaagtatcccgtatcctgactatcttaacgtgttttcgttgcatattctgtacgtcttagccgtagttccattgacgttggctggacttccgcgcgccacgcaggcccatatcagcggaattgtatatagccaaagtgcaaacgacatttctaatttaagtaggtcccgtactcgtatgtgtatgtatatgtatgtagtgattacgccccttaaacaataaacagatataatacgaatcgaaacttggagtctgaatgcgaaataccaggaacttttgtgcaatatctgtgagatcgctgattaagcggtcatttattggggcaattgtgcgtagaaaaataaagagttggttgcttaggtaggaccattagtaaatcattagcatgttatctagaaactcattgaattctgcagtaaaataagcaaaagttattagtttattacttgaaagaatcatagcacttgtacccctagctagagtatcccttggtgcaatctcacactatgtggggtatgttccagtatcagtttcgttatcatggagcggaaatgtcaggtatcagttaaatatgactaaggtaatcgattgattaatagctggtgggtgtgtttgttattggtgtttaacgttcttaagacttttgggtgtgtccgcggtaagaaaacagatatcaagttactaaaatagatggaaccacccatggactaattaaatcgtttttactgctgattttgaaataaaagctatcgtttatatttttaaataatcttttgaaaactttaattgaaaatcactgaatgaatttagttcaaatgtatgttatatttcttgtgtatttagtaatatcggggtcaccaaacatatcaatggagtttggaagagcctgtggtggatccctgctgagcgacactaatttgaatagggga

SEQ ID NO: 635 - DNA, 2001 bp, DROSOPHILA
ttaaattggcaaaaaagaggctcgtctgcggtcgcaaagtgataaaaccgcaaaaaagtccataaaatgttgtttatccagcaaataaagtgctctgactcaatgtcggatgcctagtctaagcgttcgcgaccaagtcagctggaactaaagttggggcagtgctaatgtggatgaccgagggcaagaacttaccccactctagtgcggatgtgccgttccgcagcaaggagctgcgcaagcaatcgctcatccagcacaccggcctggtcggagtcatcgatgagggcaccaagaccatcggtttctccatctacaccacgccggacttcaaggagatcgccgcacaccgggtggagctgagcgtgatcacgccccaggatggctggtatgagcaggatccgctggagatgatggcctcgatcaacaagtgcgccgaggaggccatcaagcagctacccgaacagggtttctctgccagcgacattgtcaccgtgggcataaccaaccagcgcgagacgacaatcgtctgggatgcggtcaccggcaaaccgctgtacaatgcgctcctgtggaaggacatccgcactagcactacagtggagcagatcgtggccaaggtgcaggatccgaaccacttccgcagcagcactggcctgcccatctccacgtacttctcggccctcaagatccgctggctgcgggacaatgtgcccgaggtgcgacaggccatccgggaaaggcgatgcaaggcgggcacagtcgacagctggatcgtctggaacttgacaaacggagctctccacatcacggatgtaacgaatgcctcccgcactctgctcatgaatctggagacgcaagcctgggatcctgttctgctcaagacgttcggtatcagagaggagatgctgcccaccatccacagctgttcggagatatttggcaagatcacttcggagcgaagtccactgcgtgggatgaccctaagtggaataatgggcaaccagcaggcctcgcttctgggccagatgtgcgtgaagccgggtcaaacgaagaacacctaccgatccggctgttttctgctctgcaatacgggggacaagccggtcttttccaggcacggtctgctcaccaccgtggcttacaaactcggtccccaggcaccgacgatttacgcaattgagggagctgtgtcggtggccggacatgcgctgtcctggctgcaaaacaaggtgcgtatcctgccggactccagagatgccgagaaatatgcggagatggtgcccacatcgggggatgtgtacttcgtgcccgcctttacaggactatatgctccctactggcggcagaatgctcgcggcatcatcattgggctcacgcagttcacccgtaagaatcacatagtgagagctgcactggagagcatctgcttccagacgcgcgacatcctagagtgcatgcatcaggagtgcggttacgaaatcaataagcttcatgctgatggcaagctcaccacgaacaacctgttgatgcaactccaggcggacaccattggcatgcccgtcttccgctcccagctaatggactccaccgctttcggggcagccatgtgcgccgcccaggcagatggtgtcaatctctgccagttcgagcctgagaagcgatactacgagaacgtgcactacgacaccttcctggccaccaccacggatgtagagcgaaaggagcgatacggcaagtggaagcgggcggtggagcgcagtttgggatgggtcatcaagcagaagaagacgcgtgagtacacggaggagaactaccgcatgctgtcctctctgccagcgagcatcttcctcatcagcagcttcgccatgctggtgcattccctcgctgcgagtggccagtaaatacgacagtcgcctgacacttagatcgattctaggttgtgataataattatttgtccggatttcgtttggatcttatacacacactctgtacatag

SEQ ID NO: 636 - protein, 578 aa, DROSOPHILA
MWMTEGKNLPHSSADVPFRSKELRKQSLIQHTGLVGVIDEGTKTIGFSIYTTPDFKEIAAHRVELSVITPQDGWYEQDPLEMMASINKCAEEAIKQLPEQGFSASDIVTVGITNQRETTIVWDAVTGKPLYNALLWKDIRTSTTVEQIVAKVQDPNHFRSSTGLPISTYFSALKIRWLRDNVPEVRQAIRERRCKAGTVDSWIVWNLTNGALHITDVTNASRTLLMNLETQAWDPVLLKTFGIREEMLPTIHSCSEIFGKITSERSPLRGMTLSGIMGNQQASLLGQMCVKPGQTKNTYRSGCFLLCNTGDKPVFSRHGLLTTVAYKLGPQAPTIYAIEGAVSVAGHALSWLQNKVRILPDSRDAEKYAEMVPTSGDVYFVPAFTGLYAPYWRQNARGIIIGLTQFTRKNHIVRAALESICFQTRDILECMHQECGYEINKLHADGKLTTNNLLMQLQADTIGMPVFRSQLMDSTAFGAAMCAAQADGVNLCQFEPEKRYYENVHYDTFLATTTDVERKERYGKWKRAVERSLGWVIKQKKTREYTEENYRMLSSLPASIFLISSFAMLVHSLAASGQ

SEQ ID NO: 637 - DNA, 2947 bp, DROSOPHILA
ccttggaacacccaaggcgattcattaggggcaaattacgattagcttaaaggatcaacgaacttatatcgcaggcgggtcctccgtaaccatgatcacacttgcacttctccggggagatgcatctaccgtgctggcagggttccgaacaatgcggcacgcattctcctgcgctcgcgatgtagccatctaaaagcggttaaaaatggtaatatgtaaagtaaagtcaaacatccagactcatccaactcaccacaacagtccctcacaatacggttctttgcaatcgtcttggttttgttgaccactcggtgtttaatgcgataggtggagcacctcggcgggaatgtgacgcaccaggtggagccccgttcctggaacgattgcagttctgtgtagacaacgtctacgttatatctaaaggtaaaagtattcattaatttagttcatttgtcgtgataggggataagcttacagttctcttcttttgcagatattgggtccatccagatctttaagatccgcctgagccagtaccagctgggccaggcaggctatgaggattaccggcaacatggtggcagtggattccaggtcctggaatgagttactcgttctgatgcagcttcactggcggatcacattgaactgataaacacagtcagtataaactaaaggatgactcaagccgagattaaaccggattcaactgcaagaacaaagagagaatgagtttcaataaaaaaaaactttctccgtatgattttacatactacatattatatgtataatatatatggggtatagattaataaatacatatttttgaaaagagctagatttaattgttagaaaacatccatagtatttcccgtcggatgagtttatgacgtaaagctttttccgggtcgtagccaccggtccagggtagtccagtctaaaagtagaaaatttccaacacagtcagaaattgaaagctgcttaatatccccagaggtgccaggaattcgattcttctataaatcaagagcgcagcagtagaggatgcacaaccaacgttcacccttcaatggaggcccgggaggattcggagccagtgccttcaacttcaatgcaccacagttcggcgacggcgctgcgttctccgagggtctcaacgggatgccctttctgggcaagatgcccaccgaaccgatgatgcgctccattagccgccaacgctcgctggttgatggggctgggctacccaagatgccggcacctcttcccgcgatggcccagcaaatcttgagcggcgccggagtgggacgtagtcaacgcttcccagtgccacctatctccacttactatgggcactacgagggcgacttttcgatgtcttcaatgtcaaagctaaaggacactgcctcacccccacagacccaatggcaggagcataaaacaccgcgtctagccgcactttcagaaaccgactccgagagcgacatatgcagtcagcagaacagagcgaaattgcctgaatcccgttggcgtcgtgccattaactacgtaacggccgctctgccggagcaacagcgccaacgcatggaggtgatggtcaagcgctgtggccagtcggctatcgccaagcatcttctgttggtgctgcatctgatcgccctggtggtggttgtgtgtttccgccaggtcgcgcgacttggatggctctgcggcgacattcgctctcgcctaggacgcgtcaagtaccagtcgcgcagctacctgcgccacatgctgtggcggctggccattgccaagagtaacgacacctttctctttctcatcgtggtgctggtgacgccctggctattccttctcagccttgtcggcttcgccatatccttcgtcttctccatgaggaccacgttggcagagggagtccgtcagctgcgccgtcgcgtattttagaccataagtggagggaaatggctttaggagcagcacccacaagctccatcgcccccaagttatcacacaaggacactaaagcagcgcattccacaaaataacacatgacatacagcaagatgaaaccactcgaattttaactatattttgtgttgcagcaacgaaatagaactcaagtaacgtttgtgtttccatggattcaggcttgggtttatattccgtagagcaatattgcatcattccccatttcgaatgttgttttgattttggaaaattgcgatctgctcaaaggtgttaaatatctggccatcagcttatgtgtgatctgatcaataaatcgcaatcgtatttatttgtttacagcttaatccgctcgctggccacttgttcgccactcatcaaacccatttattgtgtgtattatttttgccatttattctgctcgataaatatgaatgcgaacaaatcaaaacgaaaacatttccgccgctcatggggcagaaccacagattgtgggcctttgttgttcatgctctccgtaatttcactttcaattgcatcccaccagcaaaaagccccatttgtagtatattatatgattcactggctaccgacagtcacatctgcgttccacggcatatgaaaagcgttcagtgactcgggaaaacccaggagaacctcctccagtttccattcagtgccccagggcccacttcacaaatattcagaggtcacatctgggatttctcaaatttcaactcaacatggggctaagagatattgagaacttgccattaattatgtcaagtctacgtgtgaactgggccaagtaatatccgaatgtggtttacaattaccagtgacccatcaagaatggattgcataaacgtggatcgctatctgtaaaattatccaggccgaaccatttgcaattgatgccagcacggtttttcaggaaataaagatccacttttaataccaaacattaggtataatatat

SEQ ID NO: 638 - DNA, 947 bp, DROSOPHILA
caggaattcgattcttctataaatcaagagcgcagcagtagaggatgcacaaccaacgttcacccttcaatggaggcccgggaggattcggagccagtgccttcaacttcaatgcaccacagttcggcgacggcgctgcgttctccgagggtctcaacgggatgccctttctgggcaagatgcccaccgaaccgatgatgcgctccattagccgccaacgctcgctggttgatggggctgggctacccaagatgccggcacctcttcccgcgatggcccagcaaatcttgagcggcgccggagtgggacgtagtcaacgcttcccagtgccacctatctccacttactatgggcactacgagggcgacttttcgatgtcttcaatgtcaaagctaaaggacactgcctcacccccacagacccaatggcaggagcataaaacaccgcgtctagccgcactttcagaaaccgactccgagagcgacatatgcagtcagcagaacagagcgaaattgcctgaatcccgttggcgtcgtgccattaactacgtaacggccgctctgccggagcaacagcgccaacgcatggaggtgatggtcaagcgctgtggccagtcggctatcgccaagcatcttctgttggtgctgcatctgatcgccctggtggtggttgtgtgtttccgccaggtcgcgcgacttggatggctctgcggcgacattcgctctcgcctaggacgcgtcaagtaccagtcgcgcagctacctgcgccacatgctgtggcggctggccattgccaagagtaacgacacctttctctttctcatcgtggtgctggtgacgccctggctattccttctcagccttgtcggcttcgccatatccttcgtcttctccatgaggaccacgttggcagagggagtccgtcagctgcgccgtcgcgtattttag

SEQ ID NO: 639 - protein, 300 aa, DROSOPHILA
MHNQRSPFNGGPGGFGASAFNFNAPQFGDGAAFSEGLNGMPFLGKMPTEPMMRSISRQRSLVDGAGLPKMPAPLPAMAQQILSGAGVGRSQRFPVPPISTYYGHYEGDFSMSSMSKLKDTASPPQTQWQEHKTPRLAALSETDSESDICSQQNRAKLPESRWRRAINYVTAALPEQQRQRMEVMVKRCGQSAIAKHLLLVLHLIALVVVVCFRQVARLGWLCGDIRSRLGRVKYQSRSYLRHMLWRLAIAKSNDTFLFLIVVLVTPWLFLLSLVGFAISFVFSMRTTLAEGVRQLRRRVF

SEQ ID NO: 640 - DNA, 5255 bp, DROSOPHILA
tgttgcgtacgtgcacataattgtggggaaatgggagtaaaactgatatatatacagtataattcgcttagctgcatcgatagttagctgcatcggcaagatatctgcattatttttccatttttttgtgtgaatagaaaatagaaaatagaaaaaaaaaaattaagttagctgcatttttaagttacctgcatcgaggcattgtgcaaagtactcgaggcagctaagcgaattatactgtatatatataatacccatttatatacaagaggcgtgagaatctcggtttttttttacagtggttagaggttttatttccatgatcattaccattgcacatgatagtccgtaaggtgttttacgtctaggttagcactatctttttcaaaatttcttgagattacaaccagacaaatttgtagttttccgctcttgatagtgagaattcgagtaaagcattttcgtgttctcaaaatttttaagatattttgcgctattttcagatttatgtgttggaccttctttatgccaacaatcttcttgatttatatgactttttgggtgactgaaagtgaactacttttctgacactacaattgcaggattcctatacgattgacccactgtgctggaccgatatccgtctggggcgaatgcaaatgagtatttttaaatgccaaggctgtcgcaaccagttggcagtttattgcaccgcaaagtgtctaaggcagcgcaatcctccagcccacctccgcccaatggacccctagtccacccgccgagccagacatcgcagcgctttgccggcttgtcttatcagctatcggcaattggtgctactgccggtgccatttggtcggttgatttacctagtcccatgcccgtccactcaccaaactcgaccatttaccagctctatgaaagctctatgtgcgggtatttcactgcgctgccgcgccttcgaatcgtttgattttcaacgttcagatacattttggcgctcgacgtggtcggttgtgttttgctcgtcgcgctctgtcctgctcattcgatcgatttgctgcctctctttcgtcgcgaactgtcgcctctttgggatttgaaaatatttaaacaagtgttatcagcggccataaacaacaatcgaatacaaaaagtgaggggacgagtgtacaatgtcaaaatactcatcaaatatcgttcatcgcagttatcgtagttggttattggtaatcgcagttatcgcaaaatatcacttgtaatagaagccatcgtaaattatcccctttaattctttgagggctttcgctttgcggctttgctcgagagttcgagcaagtgggggaaggcaaatattggtcggatcagcccacaaagtgctttccatatcttatctgcgatttctggtaacatacagtttatgggccgtgtatcgatggggccttatcagtgaacagtgcctaacaaaggtactcagccataaacaggcgcatataaaataatgagcggaatgccgactttcaacagggtcgccggctaatttgaactgattaccagatgaatccgaaaagcgcggaaactgtggaaagtttccgaacgtaaatgccgatgaagccaaatcgaattaaatcgaatggatgtagtcacccagtgcactcggtcattaggctcttatctccgttccgagcacttgaccttgtcgcagggatcgcaatcggtagttggaaccagtggcttaacataatttatgtattctagtccgcttctgggcaacaagtgtttctgtgtatatgagagtgggaagagggctcgaccaccaacaactcggagtgggaatcaagccccccaacgggccaagcgagtacaaagtcaacaatggccaaacaagtgctcgagcagggcgtactcttgtatgtacacaagtccattccagatgatatcgctggacaggtccacatggaagtgcgaaaggcaaatatattcttcccagtttttcgactttatcttagattgctatcgtagattgattttatggttatggttattgtattgaaatattggttggcggccctccccactggaataccttgagtgttacgttcgctttttgacaactaataaataaactgaactgatttcaaacattaattaataatgtaatgagtccctaccaaaatgagtttatggtacattgtaaagcctgcttctatagatcatcatattatcattatcatatcattagtatgttataaagaagccaacccatttaattgatacatatatgtacatcccattattatgcaattactacccaagactgactggcttatctaatctgcgtcctatcttgcaggcagcatgaccgagggcaagaacttaccccactctagtgcggatgtgccgttccgcagcaaggagctgcgcaagcaatcgctcatccagcacaccggcctggtcggagtcatcgatgagggcaccaagaccatcggtttctccatctacaccacgccggacttcaaggagatcgccgcacaccgggtggagctgagcgtgatcacgccccaggatggctggtatgagcaggatccgctggagatgatggcctcgatcaacaagtgcgccgaggaggccatcaagcagctacccgaacagggtttctctgccagcgacattgtcaccgtgggcataaccaaccagcgcgagacgacaatcgtctgggatgcggtcaccggcaaaccgctgtacaatgcgctcctgtggaaggacatccgcactagcactacagtggagcagatcgtggccaaggtgcaggatccgaaccacttccgcagcagcactggcctgcccatctccacgtacttctcggccctcaagatccgctggctgcgggacaatgtgcccgaggtgcgacaggccatccgggaaaggcgatgcaaggcgggcacagtcgacagctggatcgtctggaacttgacaaacggtatgagaagtttaggattacaaaatttgtagtctaattacttaactgaattgatttgtttctctccaggagctctccacatcacggatgtaacgaatgcctcccgcactctgctcatgaatctggagacgcaagcctgggatcctgttctgctcaagacgttcggtatcagagaggagatgctgcccaccatccacagctgttcggagatatttggcaagatcacttcggagcgaagtccactgcgtgggatgaccctaagtggaataatgggcaaccagcaggcctcgcttctgggccagatgtgcgtgaagccgggtcaaacgaagaacacctaccgatccggctgttttctgctctgcaatacgggggacaagccggtcttttccaggcacggtctgctcaccaccgtggcttacaaactcggtccccaggcaccgacgatttacgcaattgagggagctgtgtcggtggccggacatgcgctgtcctggctgcaaaacaaggtgcgtatcctgccggactccagagatgccgagaaatatgcggagatggtgcccacatcgggggatgtgtacttcgtgcccgcctttacaggactatatgctccctactggcggcagaatgctcgcggcatcatcattgggctcacgcagttcacccgtaagaatcacatagtgagagctgcactggagagcatctgcttccagacgcgcgacatcctagagtgcatgcatcaggagtgcggttacgaaatcaataagcttcatgctgatggcaagctcaccacgaacaacctgttgatgcaactccaggcggacaccattggcatgcccgtcttccgctcccagctaatggactccaccgctttcggggcagccatgtgcgccgcccaggcagatggtgtcaatctctgccagttcgagcctgagaagcgatactacgagaacgtgcactacgacaccttcctggccaccaccacggatgtagagcgaaaggagcgatacggcaagtggaagcgggcggtggagcgcagtttgggatgggtcatcaagcagaagaagacgcgtgagtacacggaggagaactaccgcatgctgtcctctctgccagcgagcatcttcctcatcagcagcttcgccatgctggtgcattccctcgctgcgagtggccagtaaatacgacagtcgcctgacacttagatcgattctaggttgtgataataattatttgtccggatttcgtttggatcttatacacacactctgtacatagtcctcgaaggacagtgggtggttgaacgtgctttaaaccctgtaaatagctggactaagctccgtactactttaagtatcccgtatcctgactatcttaacgtgttttcgttgcatattctgtacgtcttagccgtagttccattgacgttggctggacttccgcgcgccacgcaggcccatatcagcggaattgtatatagccaaagtgcaaacgacatttctaatttaagtaggtcccgtactcgtatgtgtatgtatatgtatgtagtgattacgccccttaaacaataaacagatataatacgaatcgaaacttggagtctgaatgcgaaataccaggaacttttgtgcaatatctgtgagatcgctgattaagcggtcatttattggggcaattgtgcgtagaaaaataaagagttggttgcttaggtaggaccattagtaaatcattagcatgttatctagaaactcattgaattctgcagtaaaataagcaaaagttattagtttattacttgaaagaatcatagcacttgtacccctagctagagtatcccttggtgcaatctcacactatgtggggtatgttccagtatcagtttcgttatcatggagcggaaatgtcaggtatcagttaaatatgactaaggtaatcgattgattaatagctggtgggtgtgtttgttattggtgtttaacgttcttaagacttttgggtgtgtccgcggtaagaaaacagatatcaagttactaaaatagatggaaccacccatggactaattaaatcgtttttactgctgattttgaaataaaagctatcgtttatatttttaaataatcttttgaaaactttaattgaaaatcactgaatgaatttagttcaaatgtatgttatatttcttgtgtatttagtaatatcggggtcaccaaacatatcaatggagtttggaagagcctgtggtggatccctgctgagcgacactaatttgaatagggga

SEQ ID NO: 641 - DNA, 1985 bp, DROSOPHILA
ctcgacgtggtcggttgtgttttgctcgtcgcgctctgtcctgctcattcgatcgatttgctgcctctctttcgtcgcgaactgtcgcctctttgggatttgaaaatatttaaacaagtgttatcagcggccataaacaacaatcgaatacaaaaacatgaccgagggcaagaacttaccccactctagtgcggatgtgccgttccgcagcaaggagctgcgcaagcaatcgctcatccagcacaccggcctggtcggagtcatcgatgagggcaccaagaccatcggtttctccatctacaccacgccggacttcaaggagatcgccgcacaccgggtggagctgagcgtgatcacgccccaggatggctggtatgagcaggatccgctggagatgatggcctcgatcaacaagtgcgccgaggaggccatcaagcagctacccgaacagggtttctctgccagcgacattgtcaccgtgggcataaccaaccagcgcgagacgacaatcgtctgggatgcggtcaccggcaaaccgctgtacaatgcgctcctgtggaaggacatccgcactagcactacagtggagcagatcgtggccaaggtgcaggatccgaaccacttccgcagcagcactggcctgcccatctccacgtacttctcggccctcaagatccgctggctgcgggacaatgtgcccgaggtgcgacaggccatccgggaaaggcgatgcaaggcgggcacagtcgacagctggatcgtctggaacttgacaaacggagctctccacatcacggatgtaacgaatgcctcccgcactctgctcatgaatctggagacgcaagcctgggatcctgttctgctcaagacgttcggtatcagagaggagatgctgcccaccatccacagctgttcggagatatttggcaagatcacttcggagcgaagtccactgcgtgggatgaccctaagtggaataatgggcaaccagcaggcctcgcttctgggccagatgtgcgtgaagccgggtcaaacgaagaacacctaccgatccggctgttttctgctctgcaatacgggggacaagccggtcttttccaggcacggtctgctcaccaccgtggcttacaaactcggtccccaggcaccgacgatttacgcaattgagggagctgtgtcggtggccggacatgcgctgtcctggctgcaaaacaaggtgcgtatcctgccggactccagagatgccgagaaatatgcggagatggtgcccacatcgggggatgtgtacttcgtgcccgcctttacaggactatatgctccctactggcggcagaatgctcgcggcatcatcattgggctcacgcagttcacccgtaagaatcacatagtgagagctgcactggagagcatctgcttccagacgcgcgacatcctagagtgcatgcatcaggagtgcggttacgaaatcaataagcttcatgctgatggcaagctcaccacgaacaacctgttgatgcaactccaggcggacaccattggcatgcccgtcttccgctcccagctaatggactccaccgctttcggggcagccatgtgcgccgcccaggcagatggtgtcaatctctgccagttcgagcctgagaagcgatactacgagaacgtgcactacgacaccttcctggccaccaccacggatgtagagcgaaaggagcgatacggcaagtggaagcgggcggtggagcgcagtttgggatgggtcatcaagcagaagaagacgcgtgagtacacggaggagaactaccgcatgctgtcctctctgccagcgagcatcttcctcatcagcagcttcgccatgctggtgcattccctcgctgcgagtggccagtaaatacgacagtcgcctgacacttagatcgattctaggttgtgataataattatttgtccggatttcgtttggatcttatacacacactctgtacatag

SEQ ID NO: 642 - protein, 576 aa, DROSOPHILA; identical to SEQ ID NO: 330

SEQ ID NO: 643 - DNA, 11655 bp, DROSOPHILA
cgtgatgcagtgcgttgctctccaagcaatctataaatacgtatactctagatctacttagttttatggcttcacacttaagtacctacagtgctagaaaagactggacgaggacaagagatcggcaacattgccgtggtcacatcacaaggttggaatttcacttttctatggcaaagtaaaaataaatttcgcattagtgctaggtaaatgaggcgtctctcttctttccaactggtgttatctggtcttcggattgtgcgaggtggtcatagtcatgtgagtggcgaatgctaaaagcatttccatcacttctcacctctgacgtcggcggatggtggagttgagcaaagtcggaggcccggctggagccccttgaggtgcaatgaaaatctgctctggtcgtagcattttatattaactaagtttttaattttctcattttcagtttgtttgttgttgtttgcttgcttggttggttggttggttggttggttgtgtgtgtgtggttttgcattataactgtagtacatggggatcttaggtggtaatagatgatatatattttaatattaatagataatgtgtaatataaatataagtttaaacttgtacacaaaaattaaaatgtcgaacgtctcgtcgtctctcagatcagtttagaagagtccttcccccccacgcttcgcttcatgcaacttcctcctctctgcctcatcatcatcatgactgttcgtacaaataagctagaagattcgagagaagaacgaagcgaggcacgtcatctatctgcggggcggggaccttttcaaaatgtatatacatactgcaacacacatttggatactcgtagttctcgtataaatagtttagtttttaactaatttacatagtcatcatgctgacgatgcgctctggcggcttcttcataatatgctttaaatatagttaaatatatatgtatgtatgtggtatattttagtagtagctacaacttcaacttatgtgcacactccaaaacgtatgtaactaaaatccgtaactagtatctctagtgaatctatgccgttagcgttatgtgtatcgcgtatcctgtagccgcagcaagtgacgctggcttgtccctcgttttatcaggtcaggtggtcaacggcttcaacggcgacggcttttgccactctgcttttccctcaccatccgccccaatttctgattattttcttgttctgcataccgacatccgacttacagaagtaaaggagcgggaccgtgaggcgccaatgtcgcgttcggcttaaaaacgaaactaatgttaaagcgctgtcaatgctgcaaacgttgcgagattaggtttttggttgatccaacatgctctttaatctgcaaagacaaaaacaaattattaaaatattatcataatgttactctaaacattttcaatccattgatctggaaaatcacgtacctatgacatgactctccatatttgtgatgcgtggcttcgatgcgggctgtggtatgatggtgatctcatcgttgatcttaagcggcttcaacagagagtcattggccgctcccagcgaactgcgcgacatccctgccccagatcccgacccgctggactgcgcactgttcttcttgctgtccatcgcttttctggccacggtactgtgggcggtgtaaacgtgcgtctcaaactgtttgtacatgccgaaggtcgccgtgcaaacggtacacttgtaggacaggtgagcgggcttcagggtcatatgatgatcgcgcgacacgtgattcagcagcttccattggtacatctaaagggagagcggcgattttagacattgttttcatcgtccatttatacgaaaaactcacccttccacagaccggacagcgaccagcatccttgcccttgttggcagcctcctgcatggaacttgtgaccaagccatgtgagcccagcaagtgtcgctccaatccctgatccgtaaagaaccggaactggcacttttggcaattcaaaggcggcctattgtagatcatcttggggtgaatctgttgcaaaacaaagcatttgttagcaaaggggaaaatcggggaaaatggaaactcagctctaccttcactttgtgcatccactgcatgtggttgcgcagctgctccagatccttgatgtagccatcgcagatctcgcaaataacaaattgcgccttattgttaccgctgggactctggccgggcttcattcctgctgccgcttggggcgctttgctggacgaggcacccgcaccggcgcccaccgagctctgacgaggtaatggcgttatcgagatgctgggctgtccggccatcggcttcttggatgcctgtataaatagatcgatattcgattaaaaccggtttttaatgggagagtctattttggtacagctaaacatgctacacatataccctttaaaacccaattccaatgtttaaataatttaatgtagattatagagcgtataaatgtagtttacctggacaagctgtccggctgccagctgatagctgttgggtaacgagagtcccgcattcatcgcgttgcctccgcgcacaggcgccggatttcgcactatgttctgtttgggtggctgcggggctcgctgacgcatcttggccgcattctgggcagctaacgcggctgcctggaggttattcctcgcctgcgccgccgcttgctgctgctggatgttggccaaagcggccttttgtgccgccgcctgtgctgccatagcctggaagggattaaaccgattataaacttattgcaaaagacttaggtgtagatattcctacctgataggcggtggcagtgcccacaagaccatgacgaggcttaatgcgcggtatcttagccggtgcctcccagtcgtttggcggcgccaggttaagctccggccggaacttcttagcgcagacgggctgatgtcgggccagctttgccttgccattatcctcaaagccgcagttgggacactggtggtagggcagtggctttataaggcgcgcctttatgttgtgcacagcctccatgtggtagacaatctccgtggcgttccgtatctcaaacgtgcagaagttacacttgtacagcactccgttcatgtgcggcgtctcgtagtgattagccatcgccatggcagactccgacttaaagttgcagaactcgcatcgcttcatccggaacttgaagggcgcgtttttcgtcttggatgcctgcaggttgccagagagcgcattgatggccatttcaaactccttggaattttgcacctgcgccttgcgcatcttgcgcttctgcagacgcagcagatccgactgcacgtactcctgcaccagacccacgccaatgtccatgaagaacttgcccaacggactctcaaagtagttctcctgtcctggcttgttgccgcccggattgtttaccgacactccgcccgctgttgccaaggcagcggcgggcttgatggccaccttcaaggcgctcaggtcatcgtttgcctccttgatcagcaccttagtccgtacgcccgactccgagtcgtcgtcgtcgtcttcgtcgtcatcatcgtcagactgctccgaccaggactcgtcgtcacctcgctttttctttttctttttgccgctttcatcggcctgatccgctggcttgtcctctttgttttgctcggtcatcatgtcgaactcgtcgcccttgtctgcctcggccaaatcctcagccgacagcgcatacttggtctcaattgctttgacgacctcgcagatgttttcgcgtggtggcttttcatagatgtagggtacaatgaaggagggcgcttccaggacaaacatgtcgtcagtgagaccgggcagcaggttggcgttgttggtcatgctgggcagcccggtaagcgataacgttggcggattcagctgcactggactggcgctcatgccgcccgccatgggaactagcttaggcggcacaacacccagattggtggccgctcccgtcacagcattcgttatggtcaccgggtagatagaatctcggggacccgacacagagctcggactgccatcgagaggcatcaacgagcgggcatccttaatggtcagctggcccattcccgagggcgtcgaacttcgctgtctcttgtggctgggctgttgcagctgcaggtcatctaggtcgctcttgcgcttgccgctgggcgaaatacttagcggtgtgtcatcttcaatcacgacgcagtcgtcgtcatcatcatcatcctcatcatcctgcacgggcgggggcgggatggccttgacaactggcgggagcttctttactggcggcggtggagctgcggattccgtatccgaatcggaggctatcagaacagcatcgtcggaggattcaccaccactagaggaagccggtttggctgccttttcggtgggcttggccggctccttgtgctccgtaatatcctccatttcctcgtcactatcctcatccaggttaaccacaccaccatcggagggagctattgccgccctggcctctgctatgctggcttggccgttctccttctggttgggactggccccaaacccattctcctgctttgctgggggctcttcctcgacgaccccttcgctagctacgctctcctcgccatctaggtgcgctttcttcccgctggccagttcatcgtcaggaactgtgactgctcccaggggatcttcggcctcgcagctgttttccgctgtgctaccgatcttttgggcatcgtcttcgtcctctggctcgtgatctccatctccgtttgtggtagcctcctcgtcttcttcatccagttttggctccttcgagctgctgctggtaatctgtgagtcttcgtcgtcgttctccacttcgttttcctccacgtcttcggtcccgtccacctccattatctcgtcggccactggagcttgtggagatgcctgggcaacatcctctttactgatatccttgccgcccgcggaaagcagctcgagcttttcattggagggggcctccggcaagtgcacatcttcctcctgctgctcctcgaccacctgctcttcatcgtcctccacagttgtgacctgctgctcaacatcatctgctgatggtttactctgttttggggaacttgatgcgctggcaagctttgtcgtgggctcggccacgccctccggcaaaacgacatcaacttcagtcatttgaggtccgttctctgctccgtggaatgtgcccaagtcggtttttcttccagctgtttgtgtttctgcaagagacacaataaaattgaagaattatcaaaactgagttgggaatttaaatttttacttaattttacttaatggcagcttcttcttaagaccaaccggaaaaattggcacgtaaaagaaaactaaagtatcaaaaagcaacgaatgagcagcacaaagcgcagcgggcgaagagtaaaaataaaaagagctaaaactgcagaaagaggacggcgaaggggcgaggcgaggcgaaaaattaacaatcaccgaaaaatatttgaaaatctaggtgaattaagaaggtgaactcaagaaaaggcggaccaaaaacagggcagcagcggtagggcaaggggagcgggggaagttgaaagaatggtttgatacaaaatggctgccatattggattaaaactaaaatacaatttaatatgtaatgtaagtatgtaaatggctttacactgcaagaaaaaagagaatgcagaaacgggggggggagttatggtttggcgatatatgcaatttatatactttggtattaacacacttgcctataaatatatattaaacatatatttatatatgtttatgtgaaatgtttgtatgtacaaacgaacagttaccgagcagagccaacaaaacgattgacatacatacagacacaaacgcacacacaccgcctgcacacacaaatatacaatctatatatacggcacatatatatttgtacgcttgtaagcacagggggagggacgcagggcggggggcggcacggatgacgacgtttggctttagctttattttttgtagttgtttttgttgctcggctggcggcgtggtggagtatactaccgctgttgttgctggtgttgttgttgtactttttggtacaggagcgtgtttttgcgctagtgtttgtccctgtgtgcgtgtgtgtgccgcgcttgcttgcgtatgtgtgtgtgttttttctgctgctatgttggatctcaccttacttttcaatattctaggtttctttcaaactaaagacgattttcagcggcatttagcattgtttttgttacttggcggcacttacattcacattttcccctcacaatcggcaggttgttgttttgtttcgcctcccttttggtcccttgatcacaataaacaaaaaacagagctgccaataaatgaaagatcgttttctttacgaaataaccagggaaaatccgaaaattttgcgtggggtttttttaattggagaaaaaaaactgagcagaaagaacgccgaaggcggagacacaagagacgaggaacgaacaagcaggcaaggcaaactggaaatgtgtgaggcggaaaaagcaaaaacagagttgcaacgaacagcagggcgcgcgcagggttgcacggcttatcggttatcgattaccggccatcgatagtgagccacccaaaggtgccaattgctgatttcgcaattaatttttaatttaattcatattttcgctcattttccttctctagtaacggtaatagcttttacattgccggctatggagagggctctctttcacttgaacgcctctcaaaaatagcgaataagcgtgtgaagcgcatggcccgcacacatgggcctttgtgcatgtgtgtgtgtgtgcatgaatggaatggcgtggaatgggagggaaaacaaatttgacaattgtacgcgcgccacgaacgaaatgaacaaaacaaaactgaaacggcattgcttgtcgccggttttactttgatggatttatgcgaatcggcatgtgcggaaattcaaacagagcgcgcgaaaaagtctagatggctttaaatatcgcagataaatatggcaaattgcaactcccccgccgccgcacccctctcaccaacacactcactcatactagcacacacactagcgtcttaaactgtatactcatcacgatacttttgctgatgcttcttctttctcctccaacttatttcagattacgctgtccctctctttcgcacccacggccccggggtatatacaatcgtacatatctatctatatgtatacatacaactaaatatgtatgtccgtatgtaagtcgccctatgcatgtgtgcgtgtgtgtgtgactgtgcgatttggtctatatgcaagtacaaaatttgaaagtaacccgcttctggcgcattttccatccccgtcccctgacctctgcccaccccctcccccatgatcgacaacttggtagaggtcgaagggcatccggagcaaggagcaagccacctaaccaatcgccatcatcattaaagaccccgaactcaaacccaaaccccaactttatgttatacatacacgtgacccttttcgatatcgagtaaattagccaattcatattttccagtgcaaatttacaaagttaagcggaaattactgtggcagttgggtcttaatatcttagaggtgaagtcaattgaatcgaaagtaaagatacaagatactaatttaagagattgatcgcatgtatcaaaaaggactttaccacatttcttctaatcaagtgattaaattataagatattaggtatcagagtttagataatcctgttgtccgaggactttctctagcagatttcggactttgatcaagatttaagatcaatctgtattgggattgaatatcaaacccaactaagaactcacaattgaaatggaaaaatgtaacattagatacattaaaaaaaagaagaaaataacataaaatttcaccacaaatattcggttttgagtcactaatatttttccaagtagtatgattcacgtaaagtacattacgtgataataataaatataattagtatgctaataatttacttaaaacgtgtaacacttatttaaaaaacataaatttggaaaagctttaggaaaaaatcatgttgtaggaatctaagggatctttaaagaattctataattatttttacgatcgacgtgtcaaaaccatgatctaatctcaatgattcatttctaaataacaataaatcagcaatacatgcatatgtttaatgcaaaaactcaaatatatactatatcatatcaacttgagtatacagtttagttctttggtgaaaaatctacaatctatgatgacagcgtcattgcgagttggattttaacacatacatatggaaaccccattattaaactcataaattcacatggcaacaaagaaatacaaagcatagttaacaatcatttgctgtttttgacctgaatttctcaccttaatcattcgctgcaggttaacttggttggttcaacttatagccagataactaaggtgtgatcttcaatcctcggcagtctcgtcctcctcgtcctcgttgaaggacagcttactactggcggccttggacttcttgctcttggatgtgctggatttttcggacttcttgttggtttcagattgggactcttttttctcgatgttgggctgcttgacacagtgtttgaagactattggctgcgtcagatccgctcgcttttcggctaattctggaagattgaaaatgggagttagttatgggtcagcaatcatctgtacttattatgatcgtagtaaagcgtgtaagtaaacacctatttacaagttaaatggagtatttaagttatataaactatcttagaatgaaaaatattttggggaaagtagtatgcacaaatttagggagaaaaatgccaatacatatatcaaagctgatataaataaaataaatttaaaaattgcattaactaaaaggaatacaagaaagtttttgaaaattgatctgcttataaaattgccaggaaggtgactaatatgccagcaattcattattggattggaaaatgtatctgggttttaaaaactgcagcatgacaaatggggaggagggaggtgtaaatcagaacaagccacccaccgaccccccccttttccaagcagcacccacaagatgtttttctcggccctgggaagccccttctcgcccgacgctcccgcttcactccccctcccgctccacccactgattcgcaacccgcccccgctgttccgccagccccttcttcaacgcctaccccctccccgcagcgcctttgccaccgccaccacgtcgtcaagccactttggcccgctcttttcctctttgctcgcctgcttcgttcatcattgtctctccgctttgcccgcctccttcatccgttcgttcttgcacacgttgttttcacccgattttctgcgctcttccaagtggggctgaaaggggcaggggggcgagcggaagaggcggacaaagcgagcggcggcagctgctgttgttaacttctttgccggctgctttatcgccgcgcccgctttgccaacgattttcatcacatgctctgctttggcggagcccccaatgaaaatgtcagtgtgtatgcctcgtcggctagctgctgcgggtgtgtgtgtctgtgtgaggggtgctccgctgggcaaaaaagggaatctttaggacggaaatgaccaagattgccatggcaacatagggctttaaaaagattgaaaaaccgaaggtgcttttcgaaaaaaaaaacacatacttcttgcaacaaactgctgttttcgcactaccgttagattttcatttggcaaaaatgcacaagcacacgcgcgcactcatacataagcaacggtatatacgcagttatgtatatatacatatatgatttagatatatgtaacgccgggcagaagaagacaaccgctcgattctgactgaaaagttaaactgaaagacaaactacaacatcctacctacgcacacacgtgcaactgccgccgccgccaccgtgggctatatgcatgtgtgtgtgcgtgtgcgagcgtgtaagtatgtatgtactacagcgatatgtatgtatgtatgcttgtacatatgtaccgacctttggaggccaacagtttctccgttttggcctcttcggcggatagatctcccggcctaaggacgaccacctgcggctgttcgtcctcccgtgaatcttcctcagaatcgtagtcctcctggtcctgcggatccaatcgctgacgctaaccaatggttatatatccgcattagaatgctgcagaggccttccccgtagaactcaccttggtctctacggtgggtccctccttgtagccaatttcagccttcaacttggccagaaaactaggttcttgcggctttacgtacgttatgttgcgcttggacatatcagatatggcggctatatcattgcacttcttgaccgatttagcagcggtttttgcactttttatttaccacaaatgtcgataagaaaaacatatgcttatcgagcagtgtgggaaagcgcgcgttgacaatactaaatcgatttcaactgctatactttaaagtaacgtaagacaattgtaaatccagttttaatagttataatgttaaagtttaagcttgctcttttaatattattagtcccaatttttgagtccttgatatttatcgatagcaccgataagtaacagctgtactgccgtgtgcatagtgctgcctgaaaaccaattgtagatgggcagcactgttaggcaaaagcggttactttttgaaaatgcttactgttgataaagagttaatatttcttaaaaatttctataaatatataatatttatcctattatttttgatgcatttctttaagtatcttaagttcccatttccaactggcatttccgctgagaaaaccgattgccccgagacgtgccatcaatttgcgaatcctcgctgccaatcaaaaaatgggcgcataaaactgtcgcataacttgcaaattttccgcttcacctggaattccgtgctccaaaacagaaatttgatcgcttctgacagcaaaacaatacacagcggcattcatcaacgtcagtggcttccatttgcaatgtcgtatgcacagactcctcctcgattgaagccccctattcgttcctgggaacataataaatcatctgcaaattgatttcaaaacttcgacagctaaccaaaaaagagctgccgaaaaaaaaaggcaaatgaaaactgcagcaaagcggagaaattttatgagctgcagcatatgttggcaaaaacacaaataggatgcactgagaaaacagcgtttcatatatttagtttagttataaataaaatacgtgagaggagctaaacaaaagttttttttttttggttttttttttgcataaacccaaacaaatatctgtagactgacagatagagaagaattaaattagtgtcatatccagtgaaaaatatgac

SEQ ID NO: 644 - DNA, 4496 bp, DROSOPHILA
ttgtggtaaataaaaagtgcaaaaaccgctgctaaatcggtcaagaagtgcaatgatatagccgccatatctgatatgtccaagcgcaacataacgtacgtaaagccgcaagaacctagttttctggccaagttgaaggctgaaattggctacaaggagggacccaccgtagagaccaagcgtcagcgattggatccgcaggaccaggaggactacgattctgaggaagattcacgggaggacgaacagccgcaggtggtcgtccttaggccgggagatctatccgccgaagaggccaaaacggagaaactgttggcctccaaagaattagccgaaaagcgagcggatctgacgcagccaatagtcttcaaacactgtgtcaagcagcccaacatcgagaaaaaagagtcccaatctgaaaccaacaagaagtccgaaaaatccagcacatccaagagcaagaagtccaaggccgccagtagtaagctgtccttcaacgaggacgaggaggacgagactgccgaggattgaagatcacaccttagttatctggctataagttgaaccaaccaagttaacctgcagcgaatgattaagaaacacaaacagctggaagaaaaaccgacttgggcacattccacggagcagagaacggacctcaaatgactgaagttgatgtcgttttgccggagggcgtggccgagcccacgacaaagcttgccagcgcatcaagttccccaaaacagagtaaaccatcagcagatgatgttgagcagcaggtcacaactgtggaggacgatgaagagcaggtggtcgaggagcagcaggaggaagatgtgcacttgccggaggccccctccaatgaaaagctcgagctgctttccgcgggcggcaaggatatcagtaaagaggatgttgcccaggcatctccacaagctccagtggccgacgagataatggaggtggacgggaccgaagacgtggaggaaaacgaagtggagaacgacgacgaagactcacagattaccagcagcagctcgaaggagccaaaactggatgaagaagacgaggaggctaccacaaacggagatggagatcacgagccagaggacgaagacgatgcccaaaagatcggtagcacagcggaaaacagctgcgaggccgaagatcccctgggagcagtcacagttcctgacgatgaactggccagcgggaagaaagcgcacctagatggcgaggagagcgtagctagcgaaggggtcgtcgaggaagagcccccagcaaagcaggagaatgggtttggggccagtcccaaccagaaggagaacggccaagccagcatagcagaggccagggcggcaatagctccctccgatggtggtgtggttaacctggatgaggatagtgacgaggaaatggaggatattacggagcacaaggagccggccaagcccaccgaaaaggcagccaaaccggcttcctctagtggtggtgaatcctccgacgatgctgttctgatagcctccgattcggatacggaatccgcagctccaccgccgccagtaaagaagctcccgccagttgtcaaggccatcccgcccccgcccgtgcaggatgatgaggatgatgatgatgacgacgactgcgtcgtgattgaagatgacacaccgctaagtatttcgcccagcggcaagcgcaagagcgacctagatgacctgcagctgcaacagcccagccacaagagacagcgaagttcgacgccctcgggaatgggccagctgaccattaaggatgcccgctcgttgatgcctctcgatggcagtccgagctctgtgtcgggtccccgagattctatctacccggtgaccataacgaatgctgtgacgggagcggccaccaatctgggtgttgtgccgcctaagctagttcccatggcgggcggcatgagcgccagtccagtgcagctgaatccgccaacgttatcgcttaccgggctgcccagcatgaccaacaacgccaacctgctgcccggtctcactgacgacatgtttgtcctggaagcgccctccttcattgtaccctacatctatgaaaagccaccacgcgaaaacatctgcgaggtcgtcaaagcaattgagaccaagtatgcgctgtcggctgaggatttggccgaggcagacaagggcgacgagttcgacatgatgaccgagcaaaacaaagaggacaagccagcggatcaggccgatgaaagcggcaaaaagaaaaagaaaaagcgaggtgacgacgagtcctggtcggagcagtctgacgatgatgacgacgaagacgacgacgacgactcggagtcgggcgtacggactaaggtgctgatcaaggaggcaaacgatgacctgagcgccttgaaggtggccatcaagcccgccgctgccttggcaacagcgggcggagtgtcggtaaacaatccgggcggcaacaagccaggacaggagaactactttgagagtccgttgggcaagttcttcatggacattggcgtgggtctggtgcaggagtacgtgcagtcggatctgctgcgtctgcagaagcgcaagatgcgcaaggcgcaggtgcaaaattccaaggagtttgaaatggccatcaatgcgctctctggcaacctgcaggcatccaagacgaaaaacgcgcccttcaagttccggatgaagcgatgcgagttctgcaactttaagtcggagtctgccatggcgatggctaatcactacgagacgccgcacatgaacggagtgctgtacaagtgtaacttctgcacgtttgagatacggaacgccacggagattgtctaccacatggaggctgtgcacaacataaaggcgcgccttataaagccactgccctaccaccagtgtcccaactgcggctttgaggataatggcaaggcaaagctggcccgacatcagcccgtctgcgctaagaagttccggccggagcttaacctggcgccgccaaacgactgggaggcaccggctaagataccgcgcattaagcctcgtcatggtcttgtgggcactgccaccgcctatcaggctatggcagcacaggcggcggcacaaaaggccgctttggccaacatccagcagcagcaagcggcggcgcaggcgaggaataacctccaggcagccgcgttagctgcccagaatgcggccaagatgcgtcagcgagccccgcagccacccaaacagaacatagtgcgaaatccggcgcctgtgcgcggaggcaacgcgatgaatgcgggactctcgttacccaacagctatcagctggcagccggacagcttgtccaggcatccaagaagccgatggccggacagcccagcatctcgataacgccattacctcgtcagagctcggtgggcgccggtgcgggtgcctcgtccagcaaagcgccccaagcggcagcaggaatgaagcccggccagagtcccagcggtaacaataaggcgcaatttgttatttgcgagatctgcgatggctacatcaaggatctggagcagctgcgcaaccacatgcagtggatgcacaaagtgaagattcaccccaagatgatctacaataggccgcctttgaattgccaaaagtgccagttccggttctttacggatcagggattggagcgacacttgctgggctcacatggcttggtcacaagttccatgcaggaggctgccaacaagggcaaggatgctggtcgctgtccggtctgtggaaggatgtaccaatggaagctgctgaatcacgtgtcgcgcgatcatcatatgaccctgaagcccgctcacctgtcctacaagtgtaccgtttgcacggcgaccttcggcatgtacaaacagtttgagacgcacgtttacaccgcccacagtaccgtggccagaaaagcgatggacagcaagaagaacagtgcgcagtccagcgggtcgggatctggggcagggatgtcgcgcagttcgctgggagcggccaatgactctctgttgaagccgcttaagatcaacgatgagatcaccatcataccacagcccgcatcgaagccacgcatcacaaatatggagagtcatgtcatagattaaagagcatgttggatcaaccaaaaacctaatctcgcaacgtttgcagcattgacagcgctttaacattagtttcgtttttaagccgaacgcgacattggcgcctcacggtcccgctcctttacttctgtaagtcggatgtcggtatgcagaacaagaaaataatcagaaattggggcggatggtgagggaaaagcagagtggcaaaagccgtcgccgttgaagccgttgaccacctgacctgataaaacgagggacaagccagcgtcacttgctgcggctacaggatacgcgatacacataacgctaacggcatagattcactagagatactagttacggattttagttacatacgttttggagtgtgcacataag

SEQ ID NO: 645 - protein, 1152 aa, DROSOPHILA
MTEVDVVLPEGVAEPTTKLASASSSPKQSKPSADDVEQQVTTVEDDEEQVVEEQQEEDVHLPEAPSNEKLELLSAGGKDISKEDVAQASPQAPVADEIMEVDGTEDVEENEVENDDEDSQITSSSSKEPKLDEEDEEATTNGDGDHEPEDEDDAQKIGSTAENSCEAEDPLGAVTVPDDELASGKKAHLDGEESVASEGVVEEEPPAKQENGFGASPNQKENGQASIAEARAAIAPSDGGVVNLDEDSDEEMEDITEHKEPAKPTEKAAKPASSSGGESSDDAVLIASDSDTESAAPPPPVKKLPPVVKAIPPPPVQDDEDDDDDDDCVVIEDDTPLSISPSGKRKSDLDDLQLQQPSHKRQRSSTPSGMGQLTIKDARSLMPLDGSPSSVSGPRDSIYPVTITNAVTGAATNLGVVPPKLVPMAGGMSASPVQLNPPTLSLTGLPSMTNNANLLPGLTDDMFVLEAPSFIVPYIYEKPPRENICEVVKAIETKYALSAEDLAEADKGDEFDMMTEQNKEDKPADQADESGKKKKKKRGDDESWSEQSDDDDDEDDDDDSESGVRTKVLIKEANDDLSALKVAIKPAAALATAGGVSVNNPGGNKPGQENYFESPLGKFFMDIGVGLVQEYVQSDLLRLQKRKMRKAQVQNSKEFEMAINALSGNLQASKTKNAPFKFRMKRCEFCNFKSESAMAMANHYETPHMNGVLYKCNFCTFEIRNATEIVYHMEAVHNIKARLIKPLPYHQCPNCGFEDNGKAKLARHQPVCAKKFRPELNLAPPNDWEAPAKIPRIKPRHGLVGTATAYQAMAAQAAAQKAALANIQQQQAAAQARNNLQAAALAAQNAAKMRQRAPQPPKQNIVRNPAPVRGGNAMNAGLSLPNSYQLAAGQLVQASKKPMAGQPSISITPLPRQSSVGAGAGASSSKAPQAAAGMKPGQSPSGNNKAQFVICEICDGYIKDLEQLRNHMQWMHKVKIHPKMIYNRPPLNCQKCQFRFFTDQGLERHLLGSHGLVTSSMQEAANKGKDAGRCPVCGRMYQWKLLNHVSRDHHMTLKPAHLSYKCTVCTATFGMYKQFETHVYTAHSTVARKAMDSKKNSAQSSGSGSGAGMSRSSLGAANDSLLKPLKINDEITIIPQPASKPRITNMESHVID

SEQ ID NO: 646 - DNA, 3582 bp, DROSOPHILA
attctattccaatacattattcaagagtttttctgaaatagaatttacacacctactgatcgtttcaaaaaactgattgcaatagatctgatttcgtatcgttgaatttaccagaacatctttaagtaatttatcgaaatatctgattaaaattggtacattttttattcacgtatatatttaggtgcttaaggtcaatacaaacccctttttttaaattgttctgatcatagcaaaagttttgcttttctgtgtagaagaattgatttatattctgatttcgtatcaccaaaaatagaaataaccatcccaaagtacacgcattctgcggaatggaactttttaaagtagtgtattttaaaagataaaagataaatggttcaaaagtgtggacgtgacagatttggttggtttgtggtcgttagagtgggcgtagcagatcaaaggaaattaacaagactgatacaaatatcaaaacatgtttcttgacttgaccggggtaggcttgtggggctcagagtggaaaaaaatttcgacatatggatggaaactaataaactaatacaaaaattcacaaatatcaaaaaaaaaaattcgaaagtgtggaggtggcagttttgactcgtttttggccgtaacaaaccagtcatatcaaaaaagtgaaacggcgagacaaaaagtaaattatgttgaacaatattttcctggtgatctgtggcacattgtatattatacaattattatattatattaatattatatattaatatataataattatattatacattattattataccaacttcaatgccattaatttgttttatatttatcttggtcttgatttaatttaataaaaagggaaacaaattggttttactcacactacggacgggatcgcgccgttaaaaattcacttcgccagcacacacggaattagatacagatttatacaaagactttgaagataagttttccgtacataaaccaccattatctgtattaaatatttgaaaatgtttttattttaattacttttaaatttgattctacataaagcgctttaaatttgaaataattacgttgagttttaagtttttcatacgagaaactagttgtgcttctttttcctgtgccgactaatcgtattttaggttaacccgagacacactttcggatggctcagaattaacagcctccttgagaggaggaattgtcatgcagttcctaataaaattacacacacactggacgtactgcttgggatatttggtgtaaatcttaacgtgctcggcatcctcaaagcatactgacgatacctgaataccctgatcgcgtctaagacgaataaatttttccacatctcgatagggaatcacaatgtcacctttcgaatacagaaaaagctgtgggtatctattggcttcgtttttaaggtcgcaaaatggactggggcgtactggcgaagacggcacgaataggcttttcaaggcagaaattgattcctgaaaagaagtcaattgtttatgtttacaatctttttctatttgattcaacgtcacccacctccacaaaccacataatactgagtgtaatggttataaccagtgcggccaaacagttgcagcgtttttccctaccatagatggctgtaatggcgcgatacaggcttattatcctacgctccccaggagcagagtcaaaaatcacgccgcgaacttgcagcggagacttgtgcttgatcacagctaaattaatatgttggtacaagtaggctccgccattggaaaatatgtgaaatattagtggatgggcgtcaaaattcatgtcctggattagtttaaggattttctcgccgataggaatcatttcagatcgcttccaaaataggctgtctaccggagccgtgtatcgcacagtaattaagctaggaataacgaaatgtcataagttatgattgcgttgatgtgtcagccttcacacttacccccgctcctcgtaaatttttgagtatttcatgaggtatcgatcctgacagcccgcccaccccaacagcatgacaatgggcacgtggctgtcctcgccatcatggtccttagctagtacaaactcatttttagatgaaggcttcggaaactttatgaagtactctaacgtatcctctcgctctggtagaaaggacctaggtgatgactgaagaccagaagtttgtatggtggccgtagattctttatactgggtggctgtgccatcagcgtttaacccgcacgggtgcgaagctgatatcgacatattgacatactaatagttctattggaaaagaaattatttttcggtcggtcgggttacgcaaagactacttttcgtatacggttggcacgagctacatacatatgtatattgattttgtgaacttcacgtagttacaaaattcgagcgtgtcagacaccgcgtctgttaatttgttaataatttacctttcagcccaaagatttgtgacataggacagtcattatagttttactggcctctgcgggtgatgtgattcacctaaaattcctggcaacagcaaccgtgtgcattccaggaaagtaatccattggggttgctgctttctgacgcgggggggtttcaataggcttgtcatgcgcattaacttttgaattctatttggcttgtttaaatttgtgccctactataggactttggcgagcgagattttataagccaatcgacttcaaaccatttacagaaatattattgaaaaataaataataataaaagctgttaagtatagtaaagcttggtctttataaagcatagaattaaggaatggggtaggcaatatcttgtatatttgttagtcctacaattttgaatatttacgattgaatataatggcgggcacattattgttcatacttataattaaacaattttaagtaatttgaaacaataaagtcgaattcctaagctatttgatttccataattcttttagtgcgagtccgttgtagatcccaaccctaattacaaaaattaaaatatcatgaaattgtattagacatttgtttcctgaactctctaaagcgttaataaccaaaatgcattcgtttaacgaaatagaaacagatctagagataaagctccgagctccagcaatgtgaattgttattattataccttcaatggaaaataataattaactgcctgaattttgtctcaaatgtgggaaactcatattaaagcaaaatatctgtttaagaagtcgacaataagaacacttgtttgaaaaataaattctcctctattaattcatcctgctagcacaaaagctatacagctttgaggaactgctagcaactataatattaagataattcagctttaccagtcaaaaacattactataaactggcactggtcctgtttatgtaactaatgcaaatatttataaagctcttaatattaaaaccatttagtaaaaaaacagtgatcctcaagtctagtagacattagtctcagcgtatatatggacagacagactcttatggccggatatactcgtctagagatccagtt

SEQ ID NO: 647 - DNA, 1294 bp, DROSOPHILA
gcacacggttgctgttgccaggaattttaggtgaatcacatcacccgcagaggccagtaaaactataatgactgtcctatgtcacaaatctttgggctgaaagaactattagtatgtcaatatgtcgatatcagcttcgcacccgtgcgggttaaacgctgatggcacagccacccagtataaagaatctacggccaccatacaaacttctggtcttcagtcatcacctaggtcctttctaccagagcgagaggatacgttagagtacttcataaagtttccgaagccttcatctaaaaatgagtttgtactagctaaggaccatgatggcgaggacagccacgtgcccattgtcatgctgttggggtgggcgggctgtcaggatcgatacctcatgaaatactcaaaaatttacgaggagcggggcttaattactgtgcgatacacggctccggtagacagcctattttggaagcgatctgaaatgattcctatcggcgagaaaatccttaaactaatccaggacatgaattttgacgcccatccactaatatttcacatattttccaatggcggagcctacttgtaccaacatattaatttagctgtgatcaagcacaagtctccgctgcaagttcgcggcgtgatttttgactctgctcctggggagcgtaggataataagcctgtatcgcgccattacagccatctatggtagggaaaaacgctgcaactgtttggccgcactggttataaccattacactcagtattatgtggtttgtggaggaatcaatttctgccttgaaaagcctattcgtgccgtcttcgccagtacgccccagtccattttgcgaccttaaaaacgaagccaatagatacccacagctttttctgtattcgaaaggtgacattgtgattccctatcgagatgtggaaaaatttattcgtcttagacgcgatcagggtattcaggtatcgtcagtatgctttgaggatgccgagcacgttaagatttacaccaaatatcccaagcagtacgtccagtgtgtgtgtaattttattaggaactgcatgacaattcctcctctcaaggaggctgttaattctgagccatccgaaagtgtgtctcgggttaacctaaaatacgattagtcggcacaggaaaaagaagcacaactagtttctcgtatgaaaaacttaaaactcaacgtaattatttcaaatttaaagcgctttatgtagaatcaaatttaaaagtaattaaaataaaaacattttcaaatatttaataca

SEQ ID NO: 648 - protein, 343 aa, DROSOPHILA
MSISASHPCGLNADGTATQYKESTATIQTSGLQSSPRSFLPEREDTLEYFIKFPKPSSKNEFVLAKDHDGEDSHVPIVMLLGWAGCQDRYLMKYSKIYEERGLITVRYTAPVDSLFWKRSEMIPIGEKILKLIQDMNFDAHPLIFHIFSNGGAYLYQHINLAVIKHKSPLQVRGVIFDSAPGERRIISLYRAITAIYGREKRCNCLAALVITITLSIMWFVEESISALKSLFVPSSPVRPSPFCDLKNEANRYPQLFLYSKGDIVIPYRDVEKFIRLRRDQGIQVSSVCFEDAEHVKIYTKYPKQYVQCVCNFIRNCMTIPPLKEAVNSEPSESVSRVNLKYD

SEQ ID NO: 649 - DNA, 3045 bp, DROSOPHILA
cacgctctcggacactagataattgccagccccaatatcggtgataggcgtcgacttttgcccccacccacccccgtctcatatatacgtatataactatcgatgacgtcatgtgggaagtgcaggtgcatttgaaatgcaaattgcttttgctgcaaaccatctgtccatataccgcttatataaggcgggcacagatcgctcagactcagttctgcataatttgaacggagttttttagaacacgtacatatagttcgtagatttggaatttttatagaaatgacgaatcgaaactaagcgaatccattttggcaatccatggtcttggacccgaaatgcttttagcactccagtgcgatgttgttgtttgcattgctcgtggcccaattaatttatatccaagtgcgtatttcgatttagtacggcgcattgaaagtctccggttgaaaaagcccaaggttatcacacatcccgaccagaaatcgtactcacagccagtctcctcctggatttgcgcgatctcctcgttccgcaggaaaagcgacgacttattgcccatggtgacggtgtgttgtgcgccgatcggtttgtttaaacattcaacaatcgcagacgagcattgaatggcattcgatttggattggaccacaagtccgatttgtgtacaggctgaatgcaggcggagtgacgggaaaatgccgaaaatcgggtgcaaaaaaatactgaacagccagcgatggttgcactagagacggactttgtcaagtggtggatggtttccctataaatatcgattcacatatttttttgtatctatttaaagtgcacattttttaaggggtcatttgtaagcatttccttacaaacaacgaccaaaaatttgatatattaattaatttcttagaaatatccaatcgtttatgcaaagcctacagtaatttcgtctcatcactagctcgtaactggcaatctcccatctctattggcattcgcaaagaaaacaaagtaaacatttttttttgccggaacgagaattaccgttatggataagttaaattccactctaactgccgtcaaaaacctgcggtccaacgtaaggctgtgcttcgagcacctggccgatggaaccgatggggagagcggcgaggagagccggaataagttcgtaaatgacttccaggagagattcgcagccatcaactcgcaaatacggttagtgaccagttaacctattccagtgaagaatacatttgaattaaaccacttttagtgaggtagagcagctgattaatggactgccggtgccaccaacaccctattctctcgggaacaccgcctacctggcgcaggaaacttcgcaggatcgacaggctctataccctcagctggtgaacagctacaagtggatggacaaggtgcacgaccacagcttcttggccttcaacaatctcaaccagaacacactcaggcgctcctacaattactgctcgcagaagcgccagcgactgcccttctcgtccttcaacaacgatccagagtaagtacgaagtgcgcagcttcactttaatattaacatctttcttcctctgattcttagccacatagataagctcctgagtgagatcaacacccctccgcatacttcgtacagaatttttcgtcccttcggcacaaacgctgtcaccatcgtaacaataagtaacgtgatgaaggcggctattgtcttcaaaggagtgcttatagagtgggttacggttaagggattcgatgagccgctggagcatgacgacctgtgggccgagtcacgttacgaggtgttccgcaaagtccaggatcatgctcactcagcaatgctgcatttcttttcgccgacgttgcccgatctggcagtgaaaagctatataacctggctgaacagccacgtcaaacttttcctggagccctgcaagcgttgtgggaaattcgtggtgaacggattgcctccgacgtggcgggacctgcgcactctagaacccttccacgaggactgccgaaattgctaaggatttttaagtaatttaacgccgatagttgtaacttgtatacttcatttatttcaaaaacaaaaattatatgtactttgaatgcatgcgggcggattttttaaaatcgctgcgcccgactgaataactacaacggtttaatgcgtttcattggccaaccagtgcagaagtcgtccgcttcgatttctgcacctgcgtctgaacgccgtgctgcacgcacagtcgctcgaagttggcgcgcagttttgcgcggagctcctctcgctttcgctgcacttgctcccggtggcacttgaaggccataaccacctcctggggaatgtaatatgtctcctcgtctttgtcgtcgtattcgtcgaagtcgtcctgcaattaataaagttttattactttaatttcgatatggcaaatcatttgcatagcccactctgtctagaatattttctggtaattaattccgaccctaagctcttgatgataagagtcgacagggcttgccgcaagtcttagattatgtttaaaaaacaataattacaattttctttttctatttttccacttcctatttttatagagacaatcttgcgactcacccacatctgcaacaatgaaaacttgtgatccaactgcgactggtgactgtagaagagcaagtcgtctgagtcctcatcgtggacgtcgtgattacacagtccatccgagcaagacacttccgagccttctggtgacgaaatcgcgctagatgtccgagagccggcatgcgaaggtggatcgctgccgtatccagaatcgcgcacatcctgctcgcacgggcagttaggcatggacgccaggcactcctcgcacttatcgccaaccgttttggcgatgcttgacgaaatgcaactggccacgtcaagttgatcgtgatcagcatccagcggctggaccctagccgtggcttgcatctgcttttggttgcccatctttgtgaaggccgctttcttctgcttctttttct

SEQ ID NO: 650 - DNA, 927 bp, DROSOPHILA
aaaacaaagtaaacatttttttttgccggaacgagaattaccgttatggataagttaaattccactctaactgccgtcaaaaacctgcggtccaacgtaaggctgtgcttcgagcacctggccgatggaaccgatggggagagcggcgaggagagccggaataagttcgtaaatgacttccaggagagattcgcagccatcaactcgcaaatacgtgaggtagagcagctgattaatggactgccggtgccaccaacaccctattctctcgggaacaccgcctacctggcgcaggaaacttcgcaggatcgacaggctctataccctcagctggtgaacagctacaagtggatggacaaggtgcacgaccacagcttcttggccttcaacaatctcaaccagaacacactcaggcgctcctacaattactgctcgcagaagcgccagcgactgcccttctcgtccttcaacaacgatccagaccacatagataagctcctgagtgagatcaacacccctccgcatacttcgtacagaatttttcgtcccttcggcacaaacgctgtcaccatcgtaacaataagtaacgtgatgaaggcggctattgtcttcaaaggagtgcttatagagtgggttacggttaagggattcgatgagccgctggagcatgacgacctgtgggccgagtcacgttacgaggtgttccgcaaagtccaggatcatgctcactcagcaatgctgcatttcttttcgccgacgttgcccgatctggcagtgaaaagctatataacctggctgaacagccacgtcaaacttttcctggagccctgcaagcgttgtgggaaattcgtggtgaacggattgcctccgacgtggcgggacctgcgcactctagaacccttccacgaggactgccgaaattgctaa

SEQ ID NO: 651 - protein, 293 aa, DROSOPHILA
MDKLNSTLTAVKNLRSNVRLCFEHLADGTDGESGEESRNKFVNDFQERFAAINSQIREVEQLINGLPVPPTPYSLGNTAYLAQETSQDRQALYPQLVNSYKWMDKVHDHSFLAFNNLNQNTLRRSYNYCSQKRQRLPFSSFNNDPDHIDKLLSEINTPPHTSYRIFRPFGTNAVTIVTISNVMKAAIVFKGVLIEWVTVKGFDEPLEHDDLWAESRYEVFRKVQDHAHSAMLHFFSPTLPDLAVKSYITWLNSHVKLFLEPCKRCGKFVVNGLPPTWRDLRTLEPFHEDCRNC

SEQ ID NO: 652 - DNA, 3633 bp, DROSOPHILA
aaacttacacactagttaatgctgcatacgataggttgttcaaacagctggaggttcctttcgttaagggtaaatataatttccgtaccgaaaaaaactgcattactaacatagatttcatttacagtgaatgccgccactggcataatgggtggcagtgtatcccacgaataccattatgtatcgcccgtgggcgaggacaacctactgcagtgcagttcctgcggctttgctggcaactctgaggttgtaaaggccccagctagctgtccgagctgtaacagctcggatttgaaagaagttcgaggagttgaggtggcccacaccttcctgttgggggacaagtactccaaacccttgggcgccacttttctcaacaccactggcaagccgcaatcgctggtcatgggctgttatggtattggcatcactagggttattgctgccgctctggaagtcctctcctccgaccacgaactccgttggccaaagctcctagcaccctacgatgtgtgtttaataggacccaagcaaggaagcaaggaacagccggaagcggaagtgatagagaatgaacttcttctgaatgtaggagagatttgcggccaccaggagttgttgcatgatgatcgcaaggagctgactatcggcaaacgtttgctggaagccaagcgtctcggacatccgcttacgattgtagtgggagccaagtcagcccgtctggattcccccaagctggaagtgcacaccagcaaaggagaaacatatgagctcgatttcagtgaaaccctgaaactggtggcagaacatagccagcacaaaaagagtctagaacgaggatgttttcagagtgaaactgaagaaagtaaaagtcgatcggttggccatcagctttagctttatgcaataaaggtaacaataacacacaactttttacaaccgcgcatccagactgattaaacgcaaatcaacgcccgagcagcgtgcactactataatgactagtgatccgcgtagtcgggttccggaatctgcgggtagatctgtacttgaagttgtggcttgcgtggcggcggtggtggcttagtcaccatgctggtgtacgaccaaggcatctggttgcgcagctcttcgctaacgcggggatttacgggagcaggatatatctcgctgtagcgattgtttagtggcgacgtcaccgccagttgttggacagccggcgaaggagcacgtggagtttgtggctccgaaggtggatagttgaggtggtcgggatgagcctcggtggtgcgataggtgttgatgtcaggctgcggggacacaacatctctctgctgaggaacttgtggtggtagcaccatcaccggcgattgcaaagtggtgcgatctccgggtgcgaactgctgggagtttggacgctgggcaccctgctccgagggaatgaaaatgggcagcggcttgggtcggatctgctccggatattgagggctctcttgcggggccgaaggctgaatggattccactagcgtggcctccaccaccggctggactaatgccaccgcaggctgtggtgtcggctgtcgggtgggagcctggctcctgctcaaggcggctgatttcgcattctgctccgccatgattccggacaacgagagacagaaggtaactccaatgatgttcagcagccagatgatggctacgcgacttgtgaggcacagtagaagaatcgatggcgtcgagaagtatacgccgaagggctccattagagtccagacattactaacaatttcgctatatgagactccaatgtaatcaagtgcatctttcatggactaaaatgtaagaattataatttatgaagactggaacatagtttaccataccgttgtatgacttatgtcgattccatgatacaccgtggccaccacatctaggatactgccagctagcacggataggaaccagggccaatagaccactccggagatcagcttggtggtgcgattgcacaaagtggctggagtggatcttgagttattataaaaactaaatggctttttgcataactcacttattaccaacaccgaagtggctacccagactccgctaataactgcgtaggttatcatgaagatgaactcccggttggtaatggcataggacgtctgccaatctatgttcaaactaaattgttcgtctgccaccttcagcaccggctcaccacattcctcctctgtagcgcaattgaataatatgttgcaatagcgttctgtgaaacctttgaaacaaacccatactcacgtgcaaagtaaatgagctccatggcgtacttgaagggattttcgctgaaatcagtaacgccatccggacaatctcggaaggtgatgccccagatggacaagcccaagtaggcaactccctggacctaaaatatatatcaatgatgttactgactagcgcaattggaatgttgagcaatctttatggcactcacgagtatgacaattgccatgaagagtataaagcacttggaaaatccagtgcccatgccggccatcttgatggagtgctattccttcggcgcgggatttttgctattccgggtaatgggttgtgcaacctgtgatcgctgggccagccaattgcctactcgataagacaacgcacgctttggggctataaattcaatttgaaattacaattcgtcaatgcgaggtctatctaatcagcttgattagttttttggtggattttgcatatggaatcaggatagctcaatcattcctagctctttccttgccacacttgaggacaacagacttatcattagattggatgaatcacaaagggaaattacgctgtcgtcactacaataaagtatacgcaatgttggccacaaacaacggaaacacactcacgccaaatcacaaatcgttatctcaccgttggaattgaattcgcggctttctcggaggtggaatatggtaggcaaaacgcgttcgccggctgcctcctttggactgagctcttccatcgaatggccatcgactctgggtctccaaatgcttcgctcttccaaagcgataagataaacctaatgaatttaagggttacacctgttatcaaaagcaccagaacggataggtgactaccccagattgtgacccgcagttgcacaatagctgcgctgagtgcaaatatctttcttattttgtaatacaaattgagtgcgttatcaacgagcttttaggtttatcatttgtaaatataggcgaaccagcccctagtcgggtaaacaaataaaggtgtcccaccagttagcaggaactaaattttaactcacagctgatggcgagtttatcggaacgacaagtgactgacatatcaagttggacgcgcacgctgcgtatacttgatatttgacactcagttatgtgactcgtgtgctttggctatcgtctttataagttgtaagtgattgattgggcatcgggggttttctttatcagaactgattcataatacacccaaagaagcacctcaaaaactacatgcagcggtaattgttttgataaaccttgtttactctttgtacatgctgccactgggaaattaaagtttactcaataaaaca

SEQ ID NO: 653 - DNA, 1391 bp, DROSOPHILA
cccagcgatcacaggttgcacaacccattacccggaatagcaaaaatcccgcgccgaaggaatagcactccatcaagatggccggcatgggcactggattttccaagtgctttatactcttcatggcaattgtcatactcgtccagggagttgcctacttgggcttgtccatctggggcatcaccttccgagattgtccggatggcgttactgatttcagcgaaaatcccttcaagtacgccatggagctcatttactttgcacaggaggaatgtggtgagccggtgctgaaggtggcagacgaacaatttagtttgaacatagattggcagacgtcctatgccattaccaaccgggagttcatcttcatgataacctacgcagttattagcggagtctgggtagccacttcggtgttggtaataaccactttgtgcaatcgcaccaccaagctgatctccggagtggtctattggccctggttcctatccgtgctagctggcagtatcctagatgtggtggccacggtgtatcatggaatcgacataagtcatacaacgtccatgaaagatgcacttgattacattggagtctcatatagcgaaattgttagtaatgtctggactctaatggagcccttcggcgtatacttctcgacgccatcgattcttctactgtgcctcacaagtcgcgtagccatcatctggctgctgaacatcattggagttaccttctgtctctcgttgtccggaatcatggcggagcagaatgcgaaatcagccgccttgagcaggagccaggctcccacccgacagccgacaccacagcctgcggtggcattagtccagccggtggtggaggccacgctagtggaatccattcagccttcggccccgcaagagagccctcaatatccggagcagatccgacccaagccgctgcccattttcattccctcggagcagggtgcccagcgtccaaactcccagcagttcgcacccggagatcgcaccactttgcaatcgccggtgatggtgctaccaccacaagttcctcagcagagagatgttgtgtccccgcagcctgacatcaacacctatcgcaccaccgaggctcatcccgaccacctcaactatccaccttcggagccacaaactccacgtgctccttcgccggctgtccaacaactggcggtgacgtcgccactaaacaatcgctacagcgagatatatcctgctcccgtaaatccccgcgttagcgaagagctgcgcaaccagatgccttggtcgtacaccagcatggtgactaagccaccaccgccgccacgcaagccacaacttcaagtacagatctacccgcagattccggaacccgactacgcggatcactag

SEQ ID NO: 654 - protein, 437 aa, DROSOPHILA
MAGMGTGFSKCFILFMAIVILVQGVAYLGLSIWGITFRDCPDGVTDFSENPFKYAMELIYFAQEECGEPVLKVADEQFSLNIDWQTSYAITNREFIFMITYAVISGVWVATSVLVITTLCNRTTKLISGVVYWPWFLSVLAGSILDVVATVYHGIDISHTTSMKDALDYIGVSYSEIVSNVWTLMEPFGVYFSTPSILLLCLTSRVAIIWLLNIIGVTFCLSLSGIMAEQNAKSAALSRSQAPTRQPTPQPAVALVQPVVEATLVESIQPSAPQESPQYPEQIRPKPLPIFIPSEQGAQRPNSQQFAPGDRTTLQSPVMVLPPQVPQQRDVVSPQPDINTYRTTEAHPDHLNYPPSEPQTPRAPSPAVQQLAVTSPLNNRYSEIYPAPVNPRVSEELRNQMPWSYTSMVTKPPPPPRKPQLQVQIYPQIPEPDYADH

SEQ ID NO: 655 - DNA, 5536 bp, DROSOPHILA
gaatacacacacacgcatacacttagggcataagttaatgcttatcggttggaacacgtcgaaaacacttgctgcagctgcgacacaagagcagcagggggctccttcaaagaagttaaaaaaaatagaaaaggtctctccttttcgacggattgttcttgagattgataatacacgcacacacacacacatacacgtgcgtcgggtctcccactaaagggttttcggcaattaaaatgcactttcgttattgttggaaagcctcctcagacacaacacacacgcatacgcacacattggacacacacacacatatgcagaagcgaacacgcacaccgtgaaacggcggcgccgataacgaaagatgatagaaaagcgagtacgcgaaaatttttctcacctccgactcgatacatatttgtggccattttcactacgctaccgcaccaaaactttcacatgcaaaacactcggcacacgcttagcactgtttttcaatggtcctgttccaaactagcgcacatttattagcagaaaactcgagttgttatgattgcatttttcacataagaagacgcgtttttttcgtcgccatcttagaaacaactcaactctaaaaaatacacgcacacacacacaatgccgagtaaacagctgcaccagggatgcactccacggtgcgatagtttggccatcgatagcaatcgatacatggggtgttgggtaaaaacttaatgttaaaatttagttggggcgataagaaaaacgataaggggcttttctaggaatacgatttatatttatttatattatatatacttcttgaataacaatatatatcattaagaaaattaactgaaaaaattatgggcgaaccttgttttatttatcattttcaaaacatatttattttcaccctttttttctcatattaaaacattcattcaatcgcatggggcgcatgcgatagtatcgcttgaaaactgtcttccctaacatgcaacgtttgcacttaaaattctgtaatagttcgtagtctaggtttctacgttttgtacgtttgtataaattgtttccagagtgagtgctttgatttgaagagcctcttaaagactcatctcgcgaatttgtttactttcgcgtgagtattttggccgtcgccagcacgaaaggtgtcacgactcgctgtcaatccgtgacgtggcctgaccgaccgatttttccaattggcagaggtctaacagaggtttttccgatttaagtattacatttaagtgttccggcgatgaccacctacgaggagttcatccagcagaacgaggaccgcgacggagtgcggctgacgtggaatgtgtggccctcaagtcgcatcgaagccagtcggctggtggtgcccctagcttgtctttaccagcctttgaaggagcgccccgacctaccgcctattcaatatgagccggtcttgtgcactcgcagcaactgcagggccatcctgaatccactgtgccaggtggactaccgtgctaagttgtgggtgtgcaacttctgttttcagcgcaatccggtgagctcaatggtgatctttagactctctgcggcagtttatgacagtcattattccagtttccccctcaatatgctgccatttccgagcagcaccaaccagcggagctgattccgggattcagcactattgagtatactattacacgggcccccaccatgccgcccgtcttcattttcctggttgacacctgcatggacgaggaggagctggacgccctcaaggattcgttgcaaatgtcgctaagtctgctgccaaccaacgctctcgtgggtctgataaccttcggaaaaatgatacaggtgcacgagctgggcgcggaaggctgctctaagagctatgtgtttcgtggtaccaaggacctgactgccaagcaggtgcaggatatgctcggaattgggcgtggagcggctccggggccgcagcaacagcagcacctgcccggccagccggctggagcggcggcccctgtgccgcccgcccatcgcttcttgcaaccgatcggccagtgcgacgcggcgctgggcgatctgcttagcgagttgcaacgcgatccttggccggtgccgcagggcaagcgttacctgcgctccactggtgccgccctatctattgcggtgggcctgttggagtgcacttatcccaatacgggcggtcgcattatgaccttcgtgggtggcccttgctcccagggccccggccaggtggtcgacgacgagctgaagcacccgattcgttcgcatcacgacatccacaaggacaacgtgcggtttatgaagaaggctatcaaacactatgatgctttggcattgcgggcagccaccaacgggcatagtgtcgacatatactcgtgtgccctggaccaaaccggactgctggagatgaagcagctatgcaactccactggcggccacatggtcatgggcgattcgttcaactcatcgctcttcaagcagacattccaacgcgtcttcgcacgtgatggtcgcaacgacttgaagatggccttcaatgccacgctggaggtgaagtgctcgcgcgagttgaagatctccggtggcatcggctcgtgtgtgtcgctgaatgtgaagagcccgtcggtgtcggatgtggagatcggcatgggcaacacggtgcagtggaagctgtgcacattgaatcccagctccaccgtagcctacttctttgaggtggtcaaccagcatgcagcccccattccgcagggcgggcgtggctgcatacagttcattacgcagtaccagcacccaagtggacagcggcgaatccgagttaccacactggccagaaagtatgtgttggcataaatcagcccagagtttacttacgtggttcaatctgtttgtttttcagttgggccgatgccacctcgaacgtgcaccacatcagcgctggcttcgatcaggaggccgccgcagttctgatggcccgtatggtcgtctatcgtgcggagactgacgaaggacccgacattctgcgctgggtcgatcgtcagttgattcgtctggtaagttttcaatgtgcaaaattactcgtgcccaattaattagtattgtaaatgctttccttttacagtgccaaaagttcggcgagtactcaaaggacgatcccaacagcttcaggctgtcgcaaaacttcagcctattcccgcaattcatgtaccacctgcgccgctcgcagttcctgcaggtcttcaacaactcgcccgacgagaccacattctatcgacacatgctaatgcgcgaggacctcacccaatcgctgatcatgatccagcctattctctacagctactcgttcaacggccctccagaaccggtcctcctcgatacggcttccatccaggcggatcgcatcctcctgatggacacgttctttcagattctgatttaccacggcgagaccatcgcccagtggagagccctcaaataccaggacatgccagagtacgagaacttcaagcagctgctgcaagcaccggtggacgacgcgcaagagattcttcagacgcgcttccccatgcctcgctacatcgatacggagcacggcggatcccaggcccgcttcctgctgtccaaggtcaatccctcgcagacgcacaacaacatgtacgcctacgggcaggtgagtctcgcagccagcgccatcaactggccacatttgattgatctttgcagcgctccatttggcgtcatcgaaaatttaatctcaatcgaaatctcaatctcgttttatgttggttttgtttctctcattgtataatccgtacccgtatccgtaaccgctcctttgtcaatcgcaggcgcccatcggtcaagtcacggtagtacatatttgtttaattttcaacttttaaactggtggaaaggtggatatttgaaatttaaggggcgggtaaaaaatctttggaaattggatatgtcctttgctcttgatagctataagtccaaaataagtgttttggattttgcaataaatctaagatggccaaccccacacggcttaatctaagcaaagattttgtctgttcctattttttcatattgtttttaataatttcaaacatgatttatatataagtggcttttggtgttggacccttctaggtgcttgtatccctttttcattcatcctcccctccccacttggcacgatcccacccacccatcgcatgactaattttccggacattatctcgacaggatggcggggctccagtgctcacggatgacgtttcgctgcagctgttcatggagcacctcaagaagctggctgtgtccaccaccacataaatcgactctggctctagtttcaggcgcttgcttccctggcgaagtcgaagaaggcgaacgacacctggaatcaatggtccaggcaatgaaattacgaatatacaaccacttattccaattgatcgtcttataacgcaataaactattcaaattatgttcaacaataagtgtgttaatccgcgatgcttttattcgtaagcagctgaattagaatttacgttgagcggaatgagtttgtaattataaaaacaaggcattaacaaaatgaaatgagcatctctttcattcttcataacaactattaatacaagtaaatccgacgggttcctgaaacctacaagatttgtaaaaattatttttttgtaatataagacagcaaaagatttatttatatttttatcataaatatttgatcaaatttccggacgcatttaacttttagataccaagcaattggttatatttttctgtatttctctagcacccgtgatcaaacatatgcattttttgtttaacttgaatgaaatatcttcgataagctttgggcaaattactcaggtttaaaaaactttgcgacactttcattttcattcattaaattgaaacttctaaatggttggaaaacacaactggtataataagaatagcaaccactgctttcaaatcattagagttttcagtaacccgccggaatgcctctcgactaactgcatcctaaactatttggtacacactgactaagaaggtcgctctttcctcgtgattgccgcatccagctagcctagttgagaaaccgtatggacatcttctgatccacgtcggtgcggtccagagctttgcagaagtcctcgaacgagatcttgccctggcagcacaggtccgcctccaggatcgtcctctccgcaatgctgaccaactggtcctggctaatgttcgccccgaccatcatgtgcaggatggagagcagctcgtctctgctgatcacaccatcgtcatccagatcgtacatcttgaaggcgaacttcagcttctcctcccggctgttgagcttactttgcttgttatccctcagcggccggaagtgggccaggacgttcatgaactgccggaagttcacccgatcgtcgttgctctcagcgaaaaaggaatgaactatccgctc

SEQ ID NO: 656 - DNA, 2600 bp, DROSOPHILA
caacgtttgcacttaaaattctgtaatagttcgtagtctaggtttctacgttttgtacgtttgtataaattgtttccagagtgagtgctttgatttgaagagcctcttaaagactcatctcgcgaatttgtttactttcgctattacatttaagtgttccggcgatgaccacctacgaggagttcatccagcagaacgaggaccgcgacggagtgcggctgacgtggaatgtgtggccctcaagtcgcatcgaagccagtcggctggtggtgcccctagcttgtctttaccagcctttgaaggagcgccccgacctaccgcctattcaatatgagccggtcttgtgcactcgcagcaactgcagggccatcctgaatccactgtgccaggtggactaccgtgctaagttgtgggtgtgcaacttctgttttcagcgcaatccgtttccccctcaatatgctgccatttccgagcagcaccaaccagcggagctgattccgggattcagcactattgagtatactattacacgggcccccaccatgccgcccgtcttcattttcctggttgacacctgcatggacgaggaggagctggacgccctcaaggattcgttgcaaatgtcgctaagtctgctgccaaccaacgctctcgtgggtctgataaccttcggaaaaatgatacaggtgcacgagctgggcgcggaaggctgctctaagagctatgtgtttcgtggtaccaaggacctgactgccaagcagcaacagcagcacctgcccggccagccggctggagcggcggcccctgtgccgcccgcccatcgcttcttgcaaccgatcggccagtgcgacgcggcgctgggcgatctgcttagcgagttgcaacgcgatccttggccggtgccgcagggcaagcgttacctgcgctccactggtgccgccctatctattgcggtgggcctgttggagtgcacttatcccaatacgggcggtcgcattatgaccttcgtgggtggcccttgctcccagggccccggccaggtggtcgacgacgagctgaagcacccgattcgttcgcatcacgacatccacaaggacaacgtgcggtttatgaagaaggctatcaaacactatgatgctttggcattgcgggcagccaccaacgggcatagtgtcgacatatactcgtgtgccctggaccaaaccggactgctggagatgaagcagctatgcaactccactggcggccacatggtcatgggcgattcgttcaactcatcgctcttcaagcagacattccaacgcgtcttcgcacgtgatggtcgcaacgacttgaagatggccttcaatgccacgctggaggtgaagtgctcgcgcgagttgaagatctccggtggcatcggctcgtgtgtgtcgctgaatgtgaagagcccgtcggtgtcggatgtggagatcggcatgggcaacacggtgcagtggaagctgtgcacattgaatcccagctccaccgtagcctacttctttgaggtggtcaaccagcatgcagcccccattccgcagggcgggcgtggctgcatacagttcattacgcagtaccagcacccaagtggacagcggcgaatccgagttaccacactggccagaaattgggccgatgccacctcgaacgtgcaccacatcagcgctggcttcgatcaggaggccgccgcagttctgatggcccgtatggtcgtctatcgtgcggagactgacgaaggacccgacattctgcgctgggtcgatcgtcagttgattcgtctgtgccaaaagttcggcgagtactcaaaggacgatcccaacagcttcaggctgtcgcaaaacttcagcctattcccgcaattcatgtaccacctgcgccgctcgcagttcctgcaggtcttcaacaactcgcccgacgagaccacattctatcgacacatgctaatgcgcgaggacctcacccaatcgctgatcatgatccagcctattctctacagctactcgttcaacggccctccagaaccggtcctcctcgatacggcttccatccaggcggatcgcatcctcctgatggacacgttctttcagattctgatttaccacggcgagaccatcgcccagtggagagccctcaaataccaggacatgccagagtacgagaacttcaagcagctgctgcaagcaccggtggacgacgcgcaagagattcttcagacgcgcttccccatgcctcgctacatcgatacggagcacggcggatcccaggcccgcttcctgctgtccaaggtcaatccctcgcagacgcacaacaacatgtacgcctacgggcaggatggcggggctccagtgctcacggatgacgtttcgctgcagctgttcatggagcacctcaagaagctggctgtgtccaccaccacataaatcgactctggctctagtttcaggcgcttgcttccctggcgaagtcgaagaaggcgaacgacacctggaatcaatggtccaggcaatgaaattacgaatatacaaccacttattccaattgatcgtcttataacgcaataaactattcaaattatgttcaac

SEQ ID NO: 657 - protein, 757 aa, DROSOPHILA
MTTYEEFIQQNEDRDGVRLTWNVWPSSRIEASRLVVPLACLYQPLKERPDLPPIQYEPVLCTRSNCRAILNPLCQVDYRAKLWVCNFCFQRNPFPPQYAAISEQHQPAELIPGFSTIEYTITRAPTMPPVFIFLVDTCMDEEELDALKDSLQMSLSLLPTNALVGLITFGKMIQVHELGAEGCSKSYVFRGTKDLTAKQQQQHLPGQPAGAAAPVPPAHRFLQPIGQCDAALGDLLSELQRDPWPVPQGKRYLRSTGAALSIAVGLLECTYPNTGGRIMTFVGGPCSQGPGQVVDDELKHPIRSHHDIHKDNVRFMKKAIKHYDALALRAATNGHSVDIYSCALDQTGLLEMKQLCNSTGGHMVMGDSFNSSLFKQTFQRVFARDGRNDLKMAFNATLEVKCSRELKISGGIGSCVSLNVKSPSVSDVEIGMGNTVQWKLCTLNPSSTVAYFFEVVNQHAAPIPQGGRGCIQFITQYQHPSGQRRIRVTTLARNWADATSNVHHISAGFDQEAAAVLMARMVVYRAETDEGPDILRWVDRQLIRLCQKFGEYSKDDPNSFRLSQNFSLFPQFMYHLRRSQFLQVFNNSPDETTFYRHMLMREDLTQSLIMIQPILYSYSFNGPPEPVLLDTASIQADRILLMDTFFQILIYHGETIAQWRALKYQDMPEYENFKQLLQAPVDDAQEILQTRFPMPRYIDTEHGGSQARFLLSKVNPSQTHNNMYAYGQDGGAPVLTDDVSLQLFMEHLKKLAVSTTT

SEQ ID NO: 658 - DNA, 3056 bp, DROSOPHILA
tactaattgggttgagatcctgtttagctgagcgtttgagcgccaagcgctgctgatccgtggcgttagcaaccaaacgatgctggcgcacaaagttcgtgtactgagccttggcattctccaacaatgcacacgaggacatcttctgaagtgtttcctcattaacagaatgctggcccaggttctccttgatgttgccaaaagcgggtttaaagtagttctgggtcaagttaagaaagaccaattagaattcggtcacattaccaagaagactattacctacttgcatatatttcttaatgagctcattcacctcagcatcaaaggcttgctgtacactgatcctcaaaagttctagagctctcatcgcggactccgcactaccgccactttccatattgtgagagccaccaagtcgctggcgaatgcgttgcaacatgttctcggccatgtctggtgtggttacatatttctgcgggttaaataaatattaggaacttgcttgcacagatatatcgacttcattctccacctgcgaggactctgcatcagaggatgtggattcgcccagcagggacaaggtgattgtgttggtttcgggtaccacatccttttccgtctgctttcggacaccctccaccggactggccacccgtgtgtccatcgaatgtgtggtttgattagagcagtcggagtcgtctgaggaggaattggctgcctgcagttgcatgcccggagatgaacgctgctgcacctcgttagctgatgtggtgctgctgtttatggaaccccccacgtcagtggggatcttccaacttcgctgaatgaccatgtttggttagaaattttttaacaatttcaataagttctgtttgctggtgggctggccgcaatctgggttttctgattttcctgggcgcgagctgaggctatttgtccagggccgtgttttcaaagcgtctgcgcagaaaagccacccccacaccgctgcccatttcgcctagcagccatcagctgatggcggctccgcacagtccatgtcgaattcacctagctccagacgtcgctgttgatccagtactcgctttaagctatcgtactcatcgctttcgacatcctcttccgcctccatggtgtgtggatcctccttctgctcgttcactttctttttctgctctttaagagtccttctgtgctctgccagcttttgttcaaatgcatccatatattgcaaaacatggctgggttggtaatcctccggggccttatagcacttattaacgggcaagccaaggacatcctccatcataaatggaaacagccagcatactaagggagtttcccgacacacataactagcctctttatgataaaataggaagccatctaggtctggcttgttctccgggaaaaaaggatacttatgcagagcctgttctactgcggaggggtcctcgaagtcgaagtgatccaggagcttaaatttcttttcgttgttctcgctaatcttgtcataatcgtgctcctcgaatcgggcgcgcaaccaatagaaacgaaaggacgcctcgcactcctgcacttcctgtagcccaaatgatatggcatccagcacatagaaggtgtccgcatcctcaacatacacgcagtctagtattgtttcacccttttggagctgccagtcgccgggcagcgaggatcggaaattcacgaacatccagccccctttggagtacgccttggtgatccccttgcttgccaccacgaggcaccttttgcccactggacaaggtaccagcagccactcgttgagatcgtcgggcttatggcgcagccactccgagagttgtggtctgtacgggatgcctttttggtgaccagaacgtttcccgcttttctttcttggcaccggtttctcttgattttgcagcggacggtagtcatcctgttcctgctgtcggcggagtttctgctgctttagcagctccttctggcgctgcttctgctgctcacctatatccaggccttttttatacagctcctgaaaactcgactccatattgaagagttaatcaaatcaatgtgccggctagaaatcagtgtgaccgggccgataacgatacaaaacacatacactacaaaaaaagtgttcaagcaccattatagttttaataaaatatgtatatataaaccatttatttaaaataaataactttaatgtgttgcacctatatttacacaaagaataaaaaaataaatttaaaaaataataattatcattgtattcaagtaaataggttatgccgtttctcagttaaatatgtaggtatattttgattacctattgctggtcacactgggaattcatattattgttttgcatttactttgccggtcttttaatggaataatagcaataaaacaatatcaattaagtataaaacatgaataaggcatcccgaattttctgtccagccctgatcacacccaaaaatgcggtggtcaagcaaacggagcaactgtcccgcagccaaaaggtagagaacacttccatggtgttacgaaagaagtagtcattgaaatcatacaaacattccagctgctgacagaacttggcttggtaaaatcgggcagcaatggcacctaccagataatgcccatggcccagcgatcggtagacaagtgcattgacttggtccaaagcaacatgcaacaggctggtgggcagaagatcaccctgcccatcctgacgcccacaggactttggaagaagacggggcgactggacggcgatatatccgagttctacatggtgcgggatcgcagcggcaagcagttcctcatgagtccagtgagagagtgagcagttttcttcatttccgattccaataaacacttatttcattgattagacccacgaggaggcagtgactgccatgctggccaccacctcacctatttcctatcggcagctgcccttgagactcttccaaatcggtcccaagttcagggatgagcttaagactcgatttggtttgatgcgagccaaggaattccta

SEQ ID NO: 659 - DNA, 1056 bp, DROSOPHILA
atggagtcgagttttcaggagctgtataaaaaaggcctggatataggtgagcagcagaagcagcgccagaaggagctgctaaagcagcagaaactccgccgacagcaggaacaggatgactaccgtccgctgcaaaatcaagagaaaccggtgccaagaaagaaaagcgggaaacgttctggtcaccaaaaaggcatcccgtacagaccacaactctcggagtggctgcgccataagcccgacgatctcaacgagtggctgctggtaccttgtccagtgggcaaaaggtgcctcgtggtggcaagcaaggggatcaccaaggcgtactccaaagggggctggatgttcgtgaatttccgatcctcgctgcccggcgactggcagctccaaaagggtgaaacaatactagactgcgtgtatgttgaggatgcggacaccttctatgtgctggatgccatatcatttgggctacaggaagtgcaggagtgcgaggcgtcctttcgtttctattggttgcgcgcccgattcgaggagcacgattatgacaagattagcgagaacaacgaaaagaaatttaagctcctggatcacttcgacttcgaggacccctccgcagtagaacaggctctgcataagtatccttttttcccggagaacaagccagacctagatggcttcctattttatcataaagaggctagttatgtgtgtcgggaaactcccttagtatgctggctgtttccatttatgatggaggatgtccttggcttgcccgttaataagtgctataaggccccggaggattaccaacccagccatgttttgcaatatatggatgcatttgaacaaaagctggcagagcacagaaggactcttaaagagcagaaaaagaaagtgaacgagcagaaggaggatccacacaccatggaggcggaagaggatgtcgaaagcgatgagtacgatagcttaaagcgagtactggatcaacagcgacgtctggagctaggtgaattcgacatggactgtgcggagccgccatcagctgatggctgctag

SEQ ID NO: 660 - protein, 351 aa, DROSOPHILA [sequence omitted]

SEQ ID NO: 661 - DNA, 2953 bp, DROSOPHILA
taatgtaatttaatctaaaataaaagaaacctatagagagacttagacatatttgtatatattgcactataaataaacagacaaatttcttatatatatacttttatttatttatttaaatataacgtagagtataaaattttaaggtaactgaaacctagatgcattagcagctagcaccttccattttatattttttaaattaggttggagctttttaaaaagtttctaattgtgttgatgtcaactgttctatgtggcgaaagggaagaacagtatgctaggatgggattaacgtctaactggttgcaaagagcgcatataaatacatatacatatatatgggggacctgttcttgtaatggtcatttgtaaggttgatgtgatcaagcctgagactgttaataagaaatatcgttttcctgttgtgtgatgtggtgttgttgaaaggagtttgatgtggtatgttgaaggatgagcttgtatcagggagttatgttgtaatgcagttctgtttgttttgaattgacgtatatgcctatgtgccgagaagtcttttatgtataagtaataaatgaaatattgcaaaacaaaagaaacggaattccaattcaaattggtagacgaattttgagccgttttttgcgtaagatgtgtaggacagaatattatcgaataattgatatcatatgactatgttatgcccttcaatccgtcaagaaagattcctcatatcatagcaggtcttagaatccttaaataatttacgctaatttacgatgaaaaaaataataatcagcataaataatcatatattaaatagtcatttctggcaccaagaagaccactaaacttgaccagcgacacgaccattgatttctgttcaaataaaaatatccaagctgttgaaataaattagtattttaaagatgatgactgaaattcagtattatagtatatttgccccagtcttttggtatttctcgagtccgcgtactggtcacacagctttttgcaacgcgatgggaaaaagaggacgatatttgagttaaaatgtgaatacggatgccagcccaactaaataatagtgcaatcgcgagtcacccatttaatcgcctagtttgaattcttttttgcggccccaacgccggtacacagctggatttttgttggttgccagcagtccagcatcacgcacacccacacgagcaaatgtagataaaagtgagaaaacactcacgcacgcacacacacaggcacacgtttggtcgtgggcaagcatttaatttcgttagtgcccagtaaaacagagttgagcgaaaaggcgatagcaacttgcacaaattgtaagcagtgcagagagtcagtgaagaggggatcgagtgagagcggcgtttagtgccaacacccaagcgctgatctcgcagctacaaacaataaacaaacagtgaaagtaacagtaaacgcaagcgctgcaatttggcttccattgattgcatttagtactcagtctcggcggcagcacaactactcatccaacaatgggtaactgcctcaccacacagaagggcgaacccgacaagcccgcagatcgaatcaagctggacgacccgcccaccatcggagtcggagtgggcgtgccacaaatccccatgccctcacacgccggacagccaccggagcagatacgtccggttccccagatcccggagagcgaaacggcaggtgccaacgccaagatttttgtcgccctctacgactacgacgcccgcaccgacgaggatttgagcttccgcaagggagagcacttggagatactgaatgacacgcagctgatagcgagtagtcgttgtgacggctttcggaatcgcgaattaaaaatgcaccgtgctcgttctctggcagtagaagttttttctcagcctcaatgcgtttgattttgcggaagtaccagctgcaagtatagcgaaaaaacagagaaggaaattattaaaatgcatgcaagtgtaacatatgctaaaaaaaaaacatcgattttttaatcataaatccgttaactttattaaggaaaccgctctatcaaggttgcaatattcgatttcagtttctctcgccccaaaggattgactaagaggtcgcatggaaggcctacagatactatcaacaaataagttacttatactatgtgtatgattgtattactagatctcaatcaaactcttcgagcaacgagtgtaaacattttttcatcatatatttcagcattaacattgacattaacaaagaaaattaactgtatgtggtttcatggtgtgctctttaactattcttctttattttcgttgctgcggcctctggaggtggtcaattaaaagatgtgtgtgacgggtatgttacataacagtccaattcgcattttgaagttcgtgacgaacgcgagataacggatgacgattaaagcgttaccacatatgtgtaagcaacttgttgtcgggaatcatgaagtagagatatgggcatgctattatttgggttagatgttccccaaataaacagggcacaatatacgggtacatataaaagggttttgccttcatatgagtctcgataatatccatatagcagtcagccaggagaactcttttaaaatccatactagaattgaccaagtacacagcatctgaagtcgagtctttgagtctttgagccattcagattgcgcagaccgatttaaaggtattcttaacagaacttgaccgtcgcagtcaaagtccacgaatgaacgtacattttttattttatgtctaaatctcagagaggagagcttactggtgttctaatgatcgtgagcaccattttacttccaccagcattattattatcgtccgatgcagcggtcagttgcaacaaagttgtctcacaatatggcaggcgtgtttgcatacgctttgat

SEQ ID NO: 662 - DNA, 2429 bp, DROSOPHILA
tcacacagctttttgcaacgcgatgggaaaaagaggacgatatttgagttaaaatgtgaatacggatgccagcccaactaaataatagtgcaatcgcgagtcacccatttaatcgcctagtttgaattcttttttgcggccccaacgccggtacacagctggatttttgttggttgccagcagtccagcatcacgcacacccacacgagcaaatgtagataaaagtgagaaaacactcacgcacgcacacacacaggcacacgtttggtcgtgggcaagcatttaatttcgttagtgcccagtaaaacagagttgagcgaaaaggcgatagcaacttgcacaaattgtaagcagtgcagagagtcagtgaagaggggatcgagtgagagcggcgtttagtgccaacacccaagcgctgatctcgcagctacaaacaataaacaaacagtgaaagtaacagtaaacgcaagcgctgcaatttggcttccattgattgcatttagtactcagtctcggcggcagcacaactactcatccaacaatgggtaactgcctcaccacacagaagggcgaacccgacaagcccgcagatcgaatcaagctggacgacccgcccaccatcggagtcggagtgggcgtgccacaaatccccatgccctcacacgccggacagccaccggagcagatacgtccggttccccagatcccggagagcgaaacggcaggtgccaacgccaagatttttgtcgccctctacgactacgacgcccgcaccgacgaggatttgagcttccgcaagggagagcacttggagatactgaatgacacgcagggtgactggtggctggcgcggagcaagaagacacgttcggaaggctacattccatccaattatgtggccaagttgaaatcaatcgaagcagaaccgtggtacttccgcaaaatcaaacgcattgaggctgagaaaaaacttctactgccagagaacgagcacggtgcatttttaattcgcgattccgaaagccgtcacaacgactactcgctatcagtgcgcgatggcgatacggttaagcattatcgcatcagacaattggacgaaggcggcttcttcatcgccaggcgcacgacattcagaacccttcaggagctggtggaacactattcgaaggactctgatggcctatgcgtcaacctctgcaagccgtgtgtccagatcgagaagcctgtaactgaggggctttcgcaccgcactcgcgatcagtgggagatcgacagaacgtctttgaaattcgtgcgcaaactgggctccggacagtttggcgatgtctgggagggattgtggaacaacacaacacctgtggcaattaaaactctgaaatctggtacaatggaccccaaggatttcttagcggaagcccagatcatgaagaaactgcgccacaccaagcttatacagttgtacgctgtctgcactgttgaggagcctatctatattatcacagagttaatgaagcacggttcactgttggaatatctccaagccattgcaggcaagggtcgtagccttaaaatgcaaactctgattgatatggcagcgcaaatagctgctggcatggcttacttggagtcccagaattatattcatagggatttagcggcgcgcaatgtactggtaggcgatggaaacatcgtcaaaatcgccgactttggtttagctaggctcatcaaggaggacgaatacgaggcgcgggtaggcgccagatttcccataaaatggaccgctccagaggctgctaactacagcaaattctcaataaaatcggatgtttggagctttggcattcttctcacagaactggtcacctacggacgcataccatatccaggcatgaccaacgctgaggtgctaacgcaagtggagcacggctatcgaatgccgcaacctcccaactgcgagccgcgcctgtatgagattatgctggaatgttggcacaaggaccccatgcgcagacccacgtttgagacgctacaatggaaactggaagacttctatacatctgatcagagcgactacaaagaggcgcaggcctactgataaatgcttttcgaagtcacggacgtggccagcagtcgtgacgaaaattaagacagctgcaaaaaatcgccaggcatcccagaacggacaattcttactaagttacttttgttttgcatagattttctactgctgcacaacgtgtccatgggcccccgtttggtgcccgttggctgtggttgtctaggtaccgatacgattcatgttattagcatttaaggtaaatagttgctgaggtggaatgcaatttcaaatgacgttccattggaacattcgttttcttgtttattatgacaaacatattggcacttggtcggatttatacgctttgaca

SEQ ID NO: 663 - protein, 517 aa, DROSOPHILA
MGNCLTTQKGEPDKPADRIKLDDPPTIGVGVGVPQIPMPSHAGQPPEQIRPVPQIPESETAGANAKIFVALYDYDARTDEDLSFRKGEHLEILNDTQGDWWLARSKKTRSEGYIPSNYVAKLKSIEAEPWYFRKIKRIEAEKKLLLPENEHGAFLIRDSESRHNDYSLSVRDGDTVKHYRIRQLDEGGFFIARRTTFRTLQELVEHYSKDSDGLCVNLCKPCVQIEKPVTEGLSHRTRDQWEIDRTSLKFVRKLGSGQFGDVWEGLWNNTTPVAIKTLKSGTMDPKDFLAEAQIMKKLRHTKLIQLYAVCTVEEPIYIITELMKHGSLLEYLQAIAGKGRSLKMQTLIDMAAQIAAGMAYLESQNYIHRDLAARNVLVGDGNIVKIADFGLARLIKEDEYEARVGARFPIKWTAPEAANYSKFSIKSDVWSFGILLTELVTYGRIPYPGMTNAEVLTQVEHGYRMPQPPNCEPRLYEIMLECWHKDPMRRPTFETLQWKLEDFYTSDQSDYKEAQAY

SEQ ID NO: 664 - DNA, 5548 bp, DROSOPHILA
tccccagccctagaatacacacacacgcatacacttagggcataagttaatgcttatcggttggaacacgtcgaaaacacttgctgcagctgcgacacaagagcagcagggggctccttcaaagaagttaaaaaaaatagaaaaggtctctccttttcgacggattgttcttgagattgataatacacgcacacacacacacatacacgtgcgtcgggtctcccactaaagggttttcggcaattaaaatgcactttcgttattgttggaaagcctcctcagacacaacacacacgcatacgcacacattggacacacacacacatatgcagaagcgaacacgcacaccgtgaaacggcggcgccgataacgaaagatgatagaaaagcgagtacgcgaaaatttttctcacctccgactcgatacatatttgtggccattttcactacgctaccgcaccaaaactttcacatgcaaaacactcggcacacgcttagcactgtttttcaatggtcctgttccaaactagcgcacatttattagcagaaaactcgagttgttatgattgcatttttcacataagaagacgcgtttttttcgtcgccatcttagaaacaactcaactctaaaaaatacacgcacacacacacaatgccgagtaaacagctgcaccagggatgcactccacggtgcgatagtttggccatcgatagcaatcgatacatggggtgttgggtaaaaacttaatgttaaaatttagttggggcgataagaaaaacgataaggggcttttctaggaatacgatttatatttatttatattatatatacttcttgaataacaatatatatcattaagaaaattaactgaaaaaattatgggcgaaccttgttttatttatcattttcaaaacatatttattttcaccctttttttctcatattaaaacattcattcaatcgcatggggcgcatgcgatagtatcgcttgaaaactgtcttccctaacatgcaacgtttgcacttaaaattctgtaatagttcgtagtctaggtttctacgttttgtacgtttgtataaattgtttccagagtgagtgctttgatttgaagagcctcttaaagactcatctcgcgaatttgtttactttcgcgtgagtattttggccgtcgccagcacgaaaggtgtcacgactcgctgtcaatccgtgacgtggcctgaccgaccgatttttccaattggcagaggtctaacagaggtttttccgatttaagtattacatttaagtgttccggcgatgaccacctacgaggagttcatccagcagaacgaggaccgcgacggagtgcggctgacgtggaatgtgtggccctcaagtcgcatcgaagccagtcggctggtggtgcccctagcttgtctttaccagcctttgaaggagcgccccgacctaccgcctattcaatatgagccggtcttgtgcactcgcagcaactgcagggccatcctgaatccactgtgccaggtggactaccgtgctaagttgtgggtgtgcaacttctgttttcagcgcaatccggtgagctcaatggtgatctttagactctctgcggcagtttatgacagtcattattccagtttccccctcaatatgctgccatttccgagcagcaccaaccagcggagctgattccgggattcagcactattgagtatactattacacgggcccccaccatgccgcccgtcttcattttcctggttgacacctgcatggacgaggaggagctggacgccctcaaggattcgttgcaaatgtcgctaagtctgctgccaaccaacgctctcgtgggtctgataaccttcggaaaaatgatacaggtgcacgagctgggcgcggaaggctgctctaagagctatgtgtttcgtggtaccaaggacctgactgccaagcaggtgcaggatatgctcggaattgggcgtggagcggctccggggccgcagcaacagcagcacctgcccggccagccggctggagcggcggcccctgtgccgcccgcccatcgcttcttgcaaccgatcggccagtgcgacgcggcgctgggcgatctgcttagcgagttgcaacgcgatccttggccggtgccgcagggcaagcgttacctgcgctccactggtgccgccctatctattgcggtgggcctgttggagtgcacttatcccaatacgggcggtcgcattatgaccttcgtgggtggcccttgctcccagggccccggccaggtggtcgacgacgagctgaagcacccgattcgttcgcatcacgacatccacaaggacaacgtgcggtttatgaagaaggctatcaaacactatgatgctttggcattgcgggcagccaccaacgggcatagtgtcgacatatactcgtgtgccctggaccaaaccggactgctggagatgaagcagctatgcaactccactggcggccacatggtcatgggcgattcgttcaactcatcgctcttcaagcagacattccaacgcgtcttcgcacgtgatggtcgcaacgacttgaagatggccttcaatgccacgctggaggtgaagtgctcgcgcgagttgaagatctccggtggcatcggctcgtgtgtgtcgctgaatgtgaagagcccgtcggtgtcggatgtggagatcggcatgggcaacacggtgcagtggaagctgtgcacattgaatcccagctccaccgtagcctacttctttgaggtggtcaaccagcatgcagcccccattccgcagggcgggcgtggctgcatacagttcattacgcagtaccagcacccaagtggacagcggcgaatccgagttaccacactggccagaaagtatgtgttggcataaatcagcccagagtttacttacgtggttcaatctgtttgtttttcagttgggccgatgccacctcgaacgtgcaccacatcagcgctggcttcgatcaggaggccgccgcagttctgatggcccgtatggtcgtctatcgtgcggagactgacgaaggacccgacattctgcgctgggtcgatcgtcagttgattcgtctggtaagttttcaatgtgcaaaattactcgtgcccaattaattagtattgtaaatgctttccttttacagtgccaaaagttcggcgagtactcaaaggacgatcccaacagcttcaggctgtcgcaaaacttcagcctattcccgcaattcatgtaccacctgcgccgctcgcagttcctgcaggtcttcaacaactcgcccgacgagaccacattctatcgacacatgctaatgcgcgaggacctcacccaatcgctgatcatgatccagcctattctctacagctactcgttcaacggccctccagaaccggtcctcctcgatacggcttccatccaggcggatcgcatcctcctgatggacacgttctttcagattctgatttaccacggcgagaccatcgcccagtggagagccctcaaataccaggacatgccagagtacgagaacttcaagcagctgctgcaagcaccggtggacgacgcgcaagagattcttcagacgcgcttccccatgcctcgctacatcgatacggagcacggcggatcccaggcccgcttcctgctgtccaaggtcaatccctcgcagacgcacaacaacatgtacgcctacgggcaggtgagtctcgcagccagcgccatcaactggccacatttgattgatctttgcagcgctccatttggcgtcatcgaaaatttaatctcaatcgaaatctcaatctcgttttatgttggttttgtttctctcattgtataatccgtacccgtatccgtaaccgctcctttgtcaatcgcaggcgcccatcggtcaagtcacggtagtacatatttgtttaattttcaacttttaaactggtggaaaggtggatatttgaaatttaaggggcgggtaaaaaatctttggaaattggatatgtcctttgctcttgatagctataagtccaaaataagtgttttggattttgcaataaatctaagatggccaaccccacacggcttaatctaagcaaagattttgtctgttcctattttttcatattgtttttaataatttcaaacatgatttatatataagtggcttttggtgttggacccttctaggtgcttgtatccctttttcattcatcctcccctccccacttggcacgatcccacccacccatcgcatgactaattttccggacattatctcgacaggatggcggggctccagtgctcacggatgacgtttcgctgcagctgttcatggagcacctcaagaagctggctgtgtccaccaccacataaatcgactctggctctagtttcaggcgcttgcttccctggcgaagtcgaagaaggcgaacgacacctggaatcaatggtccaggcaatgaaattacgaatatacaaccacttattccaattgatcgtcttataacgcaataaactattcaaattatgttcaacaataagtgtgttaatccgcgatgcttttattcgtaagcagctgaattagaatttacgttgagcggaatgagtttgtaattataaaaacaaggcattaacaaaatgaaatgagcatctctttcattcttcataacaactattaatacaagtaaatccgacgggttcctgaaacctacaagatttgtaaaaattatttttttgtaatataagacagcaaaagatttatttatatttttatcataaatatttgatcaaatttccggacgcatttaacttttagataccaagcaattggttatatttttctgtatttctctagcacccgtgatcaaacatatgcattttttgtttaacttgaatgaaatatcttcgataagctttgggcaaattactcaggtttaaaaaactttgcgacactttcattttcattcattaaattgaaacttctaaatggttggaaaacacaactggtataataagaatagcaaccactgctttcaaatcattagagttttcagtaacccgccggaatgcctctcgactaactgcatcctaaactatttggtacacactgactaagaaggtcgctctttcctcgtgattgccgcatccagctagcctagttgagaaaccgtatggacatcttctgatccacgtcggtgcggtccagagctttgcagaagtcctcgaacgagatcttgccctggcagcacaggtccgcctccaggatcgtcctctccgcaatgctgaccaactggtcctggctaatgttcgccccgaccatcatgtgcaggatggagagcagctcgtctctgctgatcacaccatcgtcatccagatcgtacatcttgaaggcgaacttcagcttctcctcccggctgttgagcttactttgcttgttatccctcagcggccggaagtgggccaggacgttcatgaactgccggaagttcacccgatcgtcgttgctctcagcgaaaaaggaatgaactatccgctc

SEQ ID NO: 665 - DNA, 2733 bp, DROSOPHILA
ttccctaacatgcaacgtttgcacttaaaattctgtaatagttcgtagtctaggtttctacgttttgtacgtttgtataaattgtttccagagtgagtgctttgatttgaagagcctcttaaagactcatctcgcgaatttgtttactttcgcgtgagtattttggccgtcgccagcacgaaaggtgtcacgactcgctgtcaatccgtgacgtggcctgaccgaccgatttttccaattggcagaggtctaacagaggtttttccgatttaagtattacatttaagtgttccggcgatgaccacctacgaggagttcatccagcagaacgaggaccgcgacggagtgcggctgacgtggaatgtgtggccctcaagtcgcatcgaagccagtcggctggtggtgcccctagcttgtctttaccagcctttgaaggagcgccccgacctaccgcctattcaatatgagccggtcttgtgcactcgcagcaactgcagggccatcctgaatccactgtgccaggtggactaccgtgctaagttgtgggtgtgcaacttctgttttcagcgcaatccgtttccccctcaatatgctgccatttccgagcagcaccaaccagcggagctgattccgggattcagcactattgagtatactattacacgggcccccaccatgccgcccgtcttcattttcctggttgacacctgcatggacgaggaggagctggacgccctcaaggattcgttgcaaatgtcgctaagtctgctgccaaccaacgctctcgtgggtctgataaccttcggaaaaatgatacaggtgcacgagctgggcgcggaaggctgctctaagagctatgtgtttcgtggtaccaaggacctgactgccaagcagcaacagcagcacctgcccggccagccggctggagcggcggcccctgtgccgcccgcccatcgcttcttgcaaccgatcggccagtgcgacgcggcgctgggcgatctgcttagcgagttgcaacgcgatccttggccggtgccgcagggcaagcgttacctgcgctccactggtgccgccctatctattgcggtgggcctgttggagtgcacttatcccaatacgggcggtcgcattatgaccttcgtgggtggcccttgctcccagggccccggccaggtggtcgacgacgagctgaagcacccgattcgttcgcatcacgacatccacaaggacaacgtgcggtttatgaagaaggctatcaaacactatgatgctttggcattgcgggcagccaccaacgggcatagtgtcgacatatactcgtgtgccctggaccaaaccggactgctggagatgaagcagctatgcaactccactggcggccacatggtcatgggcgattcgttcaactcatcgctcttcaagcagacattccaacgcgtcttcgcacgtgatggtcgcaacgacttgaagatggccttcaatgccacgctggaggtgaagtgctcgcgcgagttgaagatctccggtggcatcggctcgtgtgtgtcgctgaatgtgaagagcccgtcggtgtcggatgtggagatcggcatgggcaacacggtgcagtggaagctgtgcacattgaatcccagctccaccgtagcctacttctttgaggtggtcaaccagcatgcagcccccattccgcagggcgggcgtggctgcatacagttcattacgcagtaccagcacccaagtggacagcggcgaatccgagttaccacactggccagaaattgggccgatgccacctcgaacgtgcaccacatcagcgctggcttcgatcaggaggccgccgcagttctgatggcccgtatggtcgtctatcgtgcggagactgacgaaggacccgacattctgcgctgggtcgatcgtcagttgattcgtctgtgccaaaagttcggcgagtactcaaaggacgatcccaacagcttcaggctgtcgcaaaacttcagcctattcccgcaattcatgtaccacctgcgccgctcgcagttcctgcaggtcttcaacaactcgcccgacgagaccacattctatcgacacatgctaatgcgcgaggacctcacccaatcgctgatcatgatccagcctattctctacagctactcgttcaacggccctccagaaccggtcctcctcgatacggcttccatccaggcggatcgcatcctcctgatggacacgttctttcagattctgatttaccacggcgagaccatcgcccagtggagagccctcaaataccaggacatgccagagtacgagaacttcaagcagctgctgcaagcaccggtggacgacgcgcaagagattcttcagacgcgcttccccatgcctcgctacatcgatacggagcacggcggatcccaggcccgcttcctgctgtccaaggtcaatccctcgcagacgcacaacaacatgtacgcctacgggcaggatggcggggctccagtgctcacggatgacgtttcgctgcagctgttcatggagcacctcaagaagctggctgtgtccaccaccacataaatcgactctggctctagtttcaggcgcttgcttccctggcgaagtcgaagaaggcgaacgacacctggaatcaatggtccaggcaatgaaattacgaatatacaaccacttattccaattgatcgtcttataacgcaataaactattcaaattatgttcaac

SEQ ID NO: 666 - protein, 757 aa, DROSOPHILA; identical to SEQ ID NO: 657

SEQ ID NO: 667 - DNA, 4082 bp, DROSOPHILA
aaacaggacaatctcgtgtagtgaaaagtgaaaaatttacattttcggaacttgtgtataaatctaatatatctaatcagcgttctgccaagcgacttggagtttcaaactaagattacaaacacattagatttatttatacaacgcctacacttcagtcttactacctagagtacttaaactgcgaacagtttgtggaacttttacggtcctaccacttttaccgccacttacgttggctaaaatgtccttaagctctctgtaaccatgacggcaactatatagtatgtgtatctatatctgtatctgttcaagggcagccgcgggccttccttattgttagatgttgctttaaagatcccaagagagaaatacttagtagcagataatccattgttgtatcttgtaagtacttggtaactgtcaaggtagtcagggtaaaagatatatactcgtactcgtatatattatattcctgtgtttcttcggttggctaattactattcacaatctggctgttgtttgatatacctagttgggtaacgaaaactaaaatggttgtgctatctcaaaattaaaactacttattaatgttctaaattcggcacagtgcgctgtatcaaatactcttaggtatgtttggtcttttctacttgctctaatctacgactactattattgtacttattgtacttggccggaggtgggcatcgagtactttgatatctgtaaaaataacaccatatcagcgtgtagcgttgggctggaatctggggaggattgcgcttcaaaagtgccgagagggctgtagcaaggcttataagaatacaaatccactacttgttaaagaataacttagccattacctgcgtacactatgtaaaacaatatacaatacaaacatgaatatgaacgtacatattatatatatatactattatatttaaaaaaaaaactgtagaaaaaccaaaagagacccacactatatgtatatcaaattgagtttcaataaacatcaaatatttatttgaagttgtctattactattgcagtttctttcaatacaattctacgttggacatgattaaatgttacgcgcagaaatagacatgaaggttatgggccgccttttatggtttaaagtaaaattgctgctgttttcaaactcataaacatggaatttcatttaatcagcaacctaaaatcaccgttcattattggtaacaaacaagcataagaattatacattaatctacattaattaatttctaaattttgcgatgttgctggaagtggagttgcctgtaggagttgctcccacaacagctcccccgttgttcagcaaggccgtaagtgtggcatgcgaggagctgagcgtagaacttgcagccagcttggtcttcaacggcgttgttgtgctacccaccacctgaccctgcaagcaaggagtgggtgatgcagccgggagctccttgagcgcagtttcatcagacggtggtgtggctacctgttgttggtgctgctgcgctgaggcgccctggagaagggcatttcttaaatgactgttgttggtattccctgactgctgctggctgggcaaaatatatgaattcgttataagtccgcggctcttgatgttcaggtccacgaagaacagccgcatcttgtgtatcatggcatcggtgacgctgaaggtgagcatcatgctaagatctatattggttttgtgcctatacaactcgtgtgtttgctgcagccggcacacttcatcgtagatgagaaacaaaaaccgtgagcttcgattctcggcaggaataatcccacgggtggccaaccactccctgtcctcgccatccggcaggtagcgtatcaattctggatgcttgctggctaatcgttccttgccgtcggtgccaaagccaaacgataggttagcctgcacatccagcacgaacttggtggtagtcgaaatctgcgcggtgttccagaatatctgccggcgcacaggagtgggcagagtgccgcccaccaatggagtaaccgtggagcgatgctgcggttgttgttggttttgcgtttgtgtttgttcctgttgctgctgctgctgaagaggttgaactggttgcaagtccggttgagaaagcaggagagccgcagggttttggttctgggttggcaattggttggccgtagttgccgtgcagggcatgggtttgtttggcataaaacccgcgttaccagcaaacactttactaattgggttgagatcctgtttagctgagcgtttgagcgccaagcgctgctgatccgtggcgttagcaaccaaacgatgctggcgcacaaagttcgtgtactgagccttggcattctccaacaatgcacacgaggacatcttctgaagtgtttcctcattaacagaatgctggcccaggttctccttgatgttgccaaaagcgggtttaaagtagttctgggtcaagttaagaaagaccaattagaattcggtcacattaccaagaagactattacctacttgcatatatttcttaatgagctcattcacctcagcatcaaaggcttgctgtacactgatcctcaaaagttctagagctctcatcgcggactccgcactaccgccactttccatattgtgagagccaccaagtcgctggcgaatgcgttgcaacatgttctcggccatgtctggtgtggttacatatttctgcgggttaaataaatattaggaacttgcttgcacagatatatcgacttcattctccacctgcgaggactctgcatcagaggatgtggattcgcccagcagggacaaggtgattgtgttggtttcgggtaccacatccttttccgtctgctttcggacaccctccaccggactggccacccgtgtgtccatcgaatgtgtggtttgattagagcagtcggagtcgtctgaggaggaattggctgcctgcagttgcatgcccggagatgaacgctgctgcacctcgttagctgatgtggtgctgctgtttatggaaccccccacgtcagtggggatcttccaacttcgctgaatgaccatgtttggttagaaattttttaacaatttcaataagttctgtttgctggtgggctggccgcaatctgggttttctgattttcctgggcgcgagctgaggctatttgtccagggccgtgttttcaaagcgtctgcgcagaaaagccacccccacaccgctgcccatttcgcctagcagccatcagctgatggcggctccgcacagtccatgtcgaattcacctagctccagacgtcgctgttgatccagtactcgctttaagctatcgtactcatcgctttcgacatcctcttccgcctccatggtgtgtggatcctccttctgctcgttcactttctttttctgctctttaagagtccttctgtgctctgccagcttttgttcaaatgcatccatatattgcaaaacatggctgggttggtaatcctccggggccttatagcacttattaacgggcaagccaaggacatcctccatcataaatggaaacagccagcatactaagggagtttcccgacacacataactagcctctttatgataaaataggaagccatctaggtctggcttgttctccgggaaaaaaggatacttatgcagagcctgttctactgcggaggggtcctcgaagtcgaagtgatccaggagcttaaatttcttttcgttgttctcgctaatcttgtcataatcgtgctcctcgaatcgggcgcgcaaccaatagaaacgaaaggacgcctcgcactcctgcacttcctgtagcccaaatgatatggcatccagcacatagaaggtgtccgcatcctcaacatacacgcagtctagtattgtttcacccttttggagctgccagtcgccgggcagcgaggatcggaaattcacgaacatccagccccctttggagtacgccttggtgatccccttgcttgccaccacgaggcaccttttgcccactggacaaggtaccagcagccactcgttgagatcgtcgggcttatggcgcagc

SEQ ID NO: 668 - DNA, 1959 bp, DROSOPHILA
atggtcattcagcgaagttggaagatccccactgacgtggggggttccataaacagcagcaccacatcagctaacgaggtgcagcagcgttcatctccgggcatgcaactgcaggcagccaattcctcctcagacgactccgactgctctaatcaaaccacacattcgatggacacacgggtggccagtccggtggagggtgtccgaaagcagacggaaaaggatgtggtacccgaaaccaacacaatcaccttgtccctgctgggcgaatccacatcctctgatgcagagtcctcgcagaaatatgtaaccacaccagacatggccgagaacatgttgcaacgcattcgccagcgacttggtggctctcacaatatggaaagtggcggtagtgcggagtccgcgatgagagctctagaacttttgaggatcagtgtacagcaagcctttgatgctgaggtgaatgagctcattaagaaatatatgcaaaactactttaaacccgcttttggcaacatcaaggagaacctgggccagcattctgttaatgaggaaacacttcagaagatgtcctcgtgtgcattgttggagaatgccaaggctcagtacacgaactttgtgcgccagcatcgtttggttgctaacgccacggatcagcagcgcttggcgctcaaacgctcagctaaacaggatctcaacccaattagtaaagtgtttgctggtaacgcgggttttatgccaaacaaacccatgccctgcacggcaactacggccaaccaattgccaacccagaaccaaaaccctgcggctctcctgctttctcaaccggacttgcaaccagttcaacctcttcagcagcagcagcaacaggaacaaacacaaacgcaaaaccaacaacaaccgcagcatcgctccacggttactccattggtgggcggcactctgcccactcctgtgcgccggcagatattctggaacaccgcgcagatttcgactaccaccaagttcgtgctggatgtgcaggctaacctatcgtttggctttggcaccgacggcaaggaacgattagccagcaagcatccagaattgatacgctacctgccggatggcgaggacagggagtggttggccacccgtgggattattcctgccgagaatcgaagctcacggtttttgtttctcatctacgatgaagtgtgccggctgcagcaaacacacgagttgtataggcacaaaaccaatatagatcttagcatgatgctcaccttcagcgtcaccgatgccatgatacacaagatgcggctgttcttcgtggacctgaacatcaagagccgcggacttataacgaattcatatattttgcccagccagcagcagtcagggaataccaacaacagtcatttaagaaatgcccttctccagggcgcctcagcgcagcagcaccaacaacaggtagccacaccaccgtctgatgaaactgcgctcaaggagctcccggctgcatcacccactccttgcttgcagggtcaggtggtgggtagcacaacaacgccgttgaagaccaagctggctgcaagttctacgctcagctcctcgcatgccacacttacggccttgctgaacaacgggggagctgttgtgggagcaactcctacaggcaactccacttccagcaacatcgcaaaatttagaaattaattaatgtagattaatgtataattcttatgcttgtttgttaccaataatgaacggtgattttaggttgctgattaaatgaaattccatgtttatgagtttgaaaacagcagcaattttactttaaaccataaaaggcggcccataaccttcatgtctatttctgcgcgtaacatttaatcatgtccaacgtagaattgtattgaaagaaactgcaatagtaatagacaacttcaaataaatatttgatgtttattgaaactc

SEQ ID NO: 669 - protein, 565 aa, DROSOPHILA
MVIQRSWKIPTDVGGSINSSTTSANEVQQRSSPGMQLQAANSSSDDSDCSNQTTHSMDTRVASPVEGVRKQTEKDVVPETNTITLSLLGESTSSDAESSQKYVTTPDMAENMLQRIRQRLGGSHNMESGGSAESAMRALELLRISVQQAFDAEVNELIKKYMQNYFKPAFGNIKENLGQHSVNEETLQKMSSCALLENAKAQYTNFVRQHRLVANATDQQRLALKRSAKQDLNPISKVFAGNAGFMPNKPMPCTATTANQLPTQNQNPAALLLSQPDLQPVQPLQQQQQQEQTQTQNQQQPQHRSTVTPLVGGTLPTPVRRQIFWNTAQISTTTKFVLDVQANLSFGFGTDGKERLASKHPELIRYLPDGEDREWLATRGIIPAENRSSRFLFLIYDEVCRLQQTHELYRHKTNIDLSMMLTFSVTDAMIHKMRLFFVDLNIKSRGLITNSYILPSQQQSGNTNNSHLRNALLQGASAQQHQQQVATPPSDETALKELPAASPTPCLQGQVVGSTTTPLKTKLAASSTLSSSHATLTALLNNGGAVVGATPTGNSTSSNIAKFRN

SEQ ID NO: 670 - DNA, 2654 bp, DROSOPHILA
ttctgttcctgcaatacggtggccaaaaagtaggccaattgtccctttccggctccgaattctatatagctcgtgtgatccatcaactggtgatcgtgttccaggatgcccagcaagctagtggtctgggtgagctggcgtagcgtttcctggccgtagtccttgcgactaagttcctcctttagggattcgtgctccagctgcagttcctgtatgctggaattgatgtgcttgtcatacagattcttaactttgtcgatcagactgtagaactcttcatccgccagttcgtgcagttttatttgattgaatttgttcaaatcttcgtctgtttccttaagattgtctccagaattcactccttttacaatgtagggcagtgaactttcctgatccctggcattgcaaatggtcaagtgtttggctagttttcttttaaacacggtatgtttgtgatcaagcgggcagggaatacgttcctggaaggaatcttctctagctttttcatcgcaagttgcagtggtggctgccgatgaggcatgggctccacaaaactcactgcccttgtttgcagtcatcttgcagcggcgctttttgcgtaacacccagtaggagcaagtggtggttaccggcttctccgccttgacagtggtcatcgtctctttcacaggttccattcgttacttttattttcaaaataaattcctcccaattcggaactcgtgccaggcagtgtgaccaaggctggcacactagataacactattaccaacttttcacaaaaatgttttaactatggtcttaaatatgtttacacttcttacattgaatattttaataagttttttaataaaaaactcaaattgagcttgatttttcaaaataatagtttatttaatttacgcgaatgccaaacgccgatagttagctttgaaattcagggctggtcgagtgcaaacgtcctcagagctggtaacactgcaaaaaaaacgaagccgcgctgaatacttttgccaacaataaacgcagaaaaccaactgagaagcgaaacaagaagactatcaacatcatttaacaagccatagttataatccgctatgtaagtatcccggggcagatgggacaaaccatcggaaatggcgtaactggcagcggcatgtgcgccggcattttgcattgttagcaccacgctcgagttgtgggtgaaatactaatgtactgtgttctctgcagggctcttgtgaaaccgaaatcggagctgaccccggaggagctggcgcggcaggaggaggaggagtttaacaccggcccgctgtccgtgctcacgcagtccgtgaagaacaacacccaggtgctcatcaactgccgcaacaacaagaagctgctgggcagggtaaaggccttcgatcggcactgcaacatggtactggaaaacgtgaaggagatgtggacggagctgccgcggaccggtaagggcaagaagaaggtgaagcccgtgaacaaggatcggttcatatcgaagatgttcctgcgaggcgattctgtcatcctggtcctaaggaatcccctggccacggcggccggcaagtagtctaccatagcgatagcgtacagcaaccaatatccatcaacttcagttaataaatccgtaaatcaaccaaataagttctgtggaccaaaatgtgccattaattaaaagtgtgagctataatttacgacggaaaatatcccatcccagtaacatatcccattataaatttgtataacgaaagtacaatccgtaatcgcaatttcttatattttgattaacatcttttaatcgatttttcctaaagtatctgtttaagattaaaacggaatcaattctccgaaagttgcttgtgcagttttggaacatagtcgtcgtactgggcttggtagaaagttccagcaatgggattgcccaactcgtgattgatggcaaacttggcggcactgaatttggggcgatccttgcgggatctcttgctcacgcgctcctcgtcgaactcaagtttgccggactgcttgtacagcaggaagacgtagcgatgcagacccgtgccctggggcgggccggagccaatgtactcggcgatgggctcaccacttgccaagtcgttgccggcgatgttggccagaatccagtgcttgaactcgcggaacttgggctccgctcggctgggggcatcgggatccgtcataatgagcgtgtagaactccccgggctgcgcgtcccactccacgactggctgatccttaacctgggtgggcgttagctccactccatccttggccaccaggttgttgctgtacgtgaccttgaataggaacgatttcacagttatttgcttgatttttacattgttgcgatctatcagctactttactttaagttagctaccttctgacctttgatcagaaagttgtgacgagatatttatctagatttctattaagctcgggtgttaaatgtttgaaatattttaacctggtctgcaagcacgtagttgagtacatactattcggatccaatttattaagacaaagatatcctctatatatttggatctttttagtgtgcttttgttagtggccccacctttaacaactggttcggcggctcgggaataacg

SEQ ID NO: 671 - DNA, 520 bp, DROSOPHILA
ctgaatacttttgccaacaataaacgcagaaaaccaactgagaagcgaaacaagaagactatcaacatcatttaacaagccatagttataatccgctatggctcttgtgaaaccgaaatcggagctgaccccggaggagctggcgcggcaggaggaggaggagtttaacaccggcccgctgtccgtgctcacgcagtccgtgaagaacaacacccaggtgctcatcaactgccgcaacaacaagaagctgctgggcagggtaaaggccttcgatcggcactgcaacatggtactggaaaacgtgaaggagatgtggacggagctgccgcggaccggtaagggcaagaagaaggtgaagcccgtgaacaaggatcggttcatatcgaagatgttcctgcgaggcgattctgtcatcctggtcctaaggaatcccctggccacggcggccggcaagtagtctaccatagcgatagcgtacagcaaccaatatccatcaacttcagttaataaatccgtaaat

SEQ ID NO: 672 - protein, 119 aa, DROSOPHILA
MALVKPKSELTPEELARQEEEEFNTGPLSVLTQSVKNNTQVLINCRNNKKLLGRVKAFDRHCNMVLENVKEMWTELPRTGKGKKKVKPVNKDRFISKMFLRGDSVILVLRNPLATAAGK

SEQ ID NO: 673 - DNA, 5128 bp, DROSOPHILA
cctttcgattcgattttcttgctcgacagttattattaagccgcttagcgattgcctcgccttccgtttccgctttgccttttacgcacactcatatccgctgggctcgagcaaaccaacagagaaaaatccactcaagactatataaacgcagctgtcgccaagtttatttgacgtttattttattttcggctggtgtacaaaaatatttgaactttcgccataatcctttttccgctctgagcgcagggacacatcaaatttgtactgcgtgctgtgcgcccaattgattgaatgattgattgcccgattgggaaggtcgatagggaagcccccttgttgaaaacccacatatcacgcatgtagcaaaacgaaggaatgctgactttcgaaaagtagctcgctatataaatttatttacgagaatattaatttgtaaagcttgttcgttgaaattcagatggcaaccagtacacatgacagcctgtgactattcaaatagacttcttaatcatatcattatgtcattatatcaaagttctcacttacctatgagcactagaatgaaaatattaaaggttacatagcagatgtacgacaaggtgtatcccacatacacactggttatcaaaatcccggcccggcccgtcatactgattagagcaaagaccttaccccttgaaaacaagcatagaaatttatattgcgatattctagggatagatgggctcttaccgaaggtgagtgggtacgagatctatgagcatggaacctgccaacctaacgctgcatatgagcggatcgattatggcgaagaaactaatcagtatcagattaggatgctccataaagttaagggccacgcatccgataattgaaatgcaaatatagcctataattacccaacgacgacttagccaagtcaagataacactggtgaccacaaagagagccaggacaacgcatccgtgaatcatcggatccgtcatttgctcataggtcaggtggcactgcaagaaacaggaagtataaagggttcggaatgcgctgcaatatccaatagaacctctgtacggccaggcgaatctgctttaattccatccaagtgagagcacatcgtatcccaatcagtgaacgtggccgtaagaacccttactctcagcatccatattggcagggcaaaacctcttaaaagggaaagtgatagatagagatagatagagataggccaaaaatcatcatcaaatttgggcttacagtcccgacaggctgaagaatatgatgaagaaaaaccacatgattttggcatggtttagcagtagcactttggtttcgtaacacgacccgtgcttctcggttctggcaacagagattaggaatgagttcggtccccaaactgaatcacaactcgatccttacggttggcgcaggcgcggctgggttagcgactccactcccagactattcagagtaaccttcttgcccttgttcattcggcagattttttccatgacttgcatggccttctcctggttgttaatcgacagatagtactttggactctcgggcaggaataccagaatgattattccgatgattccgggcacctggttgcacaacagcaggatgcgccaactactgggctccgttcgcaatggcagcagaacaccggccagacctggaggacggagaaatctgctcatgtgaagatagtagcgaatcgattcttacatggcacgtagatcatgctcacgccgagcgaaaagctcataatggtcagcaccctgggtcgcaaggagatctttgtgaattcactcaagtatgtcattaaagaaacaactgacgcagcaatactaagcgggggagaggggaaggattaagttgaatcgatgtagacttggactactcgcctgtactcacaagaagccacccactgaacgaaggaaaaggaagccccaaaactccggcacgcaagccgagagaatggacacaatgttcgcaacggttgacgtaatcataatgattttgcgccttccgtacacatccgccagctcgccccataaaaagcaggataccatctgggcggcgaaacttgcagccattaaccaggccaaccgcctgtcgtgtattcgcatttcacaacttgcacctgctattattactccaaatcccagctgctcgttggtcatccaaatttgcagattaaagcagcttaataaaatgatgaactgcatcttgccgaaacctatcagagcacaatgatcaggacacagaataatcgtacggagcgcaccacttacccagcttggtaaacacctcatctatgtcactcatctttggtaccagctattatcattatatttcttaaaacgtcctacaactggctaatttttaatgtatatacaactatttgcaacgaatgaaacataaatacagattgctagactatttcctcgcgaacggtaatttttatggtcctgagcaaaatggcactaataaaatttcgttaatgtttaaaactttattcaaaaacaatcgacattgcaacacataataatttagacgatcagacagcattatgtcactatgtccttgggttgaaagacagccaaaacgacgcaaactgcggacagtaaatgtctttagaaaacgaacattcgtcttggagcaccaaaacgatacttacttgccaggcagagattgaagatgttaaaggttacatcacacgtaacccttatgaagagcccaatcatggtgctgcccaacacgccaccaaaccgcgccaaggatcgcaccatacagagtgcctttcctcgcaaattgacgggaagacaatcgactagtaccgaggtggccagtgggatcaggacaccaggcaataccatcattagcacgaagaagattagcaccactgtcggctgcttcattatattaagcgaaattcccaggatcatagagatcaagatgtgcagggcaattacatacttccgggtcatccaatgtaccaacaccgaggccaggataaaacatccaatgtaggtaaagccgtagtagaccggatcgatcaggttggtcatctcgtcgttgcactttggtgactccgaatccgttccattggtatcatccgcttcatgatttataaatgttggattattattgacgaggtcgcataaacggttggagccagagttgtccatgttgcggataactggaaaccagatgcccaatccaatggatctgcgtagttagacaaattcgttaataactgccccttaatcgtaaaggtaagttgcagttgcacttacgtaaaaaatatcccaaaaataagaaagagacaaataaaaaacttgaagacgtgaggtttggaaaagagcagcttatactcgtaccacacagtcttccagaagccttcctgatcgtttgtgcttgatttctcttcactcaaagttatgtcgacgtcctcccacttcttcctgttcatccggcatatccatttaagggccaggagggccttgtccggccgattgacagacatgagaaaatgtggtgtctccggcaccagacaaattccgacgagggccaaccagccgggaatcatgaagaacatcattaggaatcgccacacgcgtaggttgtagctgctgctgaggtccacattgaagttgttgggcagaatagccatggccaccagtggacagtagatgagagctagaccctgagattggctacaaatggctaccgttattggtcgccacttgattgcgtggaactctccgaggaatcctacctgcaaagatgcaaccgccgagaggctgtaggagatattgggagatgcttagacactgtgccccattttgttgcccgtgccacatacaaagttccaacaataatccgaatcacagaaagcgaatagagatccggcattaaagcagaaatcaccgagaaggacagcgctcctacgagtgccaatcggataacgaacttgcgtccatacctgtccgccaggaagccaatgaacaatccggaagctaccatccctcccagcagggaattggccaatagggtcttctccttaggcgaggtatcgaactcgcaggaggtcaggaccaccagatagccagcagtcatggactcagttacggagtacatgtatatgaagaaactcaccatgaaaatgatcacctgaccaagcccataacctggtgaagaccaaatgttatccgtttggggggtcaaaagctctatatattcttttacctatggttaagagagcagtgtccacatccatcgccggcatctttaaaatttagttaactatctttgcgaaatcaacaagaacattccaaaatatgctaaaacgaacgaacgaatttccaaatcgtaaatgaattaagtgtttagctgcatgctttgttcagtgtagcatttcctttttcttaacttagtcctagtcctgcaaaaccttccattctagtctgccaaatgccagtgatgggaaactctgattagaaattgaaaagcttagaggaaaatttcatgatcatatttactaatacatatctataattaaatttgagatgtaacctttagctgcatgatgcccattctctgggcttgttattgatctcaactggtagttggccgtagcctctgagtagatagacttatattagtcgatagttttcccatcactgtcggtattaattaatacattgagttgagttgaaaagctaaagaagataacgtaggggaacgctctaacttaagatttccacatgaacaggtgccagtcgcgttggattgccgagcggaccgagtagccggaagagttccgtcttagatttgtcgcagcagcatcagcagcagttgcagcagctgcagcagttgcagttgcagcagcagcagtacctgcagcagcagctgcccatgggagtgggcaatgccgacaccagtccaccgtccgaagacgaggataagcgctacaggccgcgctggaagggatcggtcagccagttgccgccgcagagtcccaagcaggcgctatcccggctcaagcaggccgcatccgcgtcgaacgtggcccaggacacgcagcgacagggccaactgctgaccaccaacccactgc

SEQ ID NO: 674 - DNA, 2176 bp, DROSOPHILA
atgactgctggctatctggtggtcctgacctcctgcgagttcgatacctcgcctaaggagaagaccctattggccaattccctgctgggagggatggtagcttccggattgttcattggcttcctggcggacaggtatggacgcaagttcgttatccgattggcactcgtaggagcgctgtccttctcggtgatttctgctttaatgccggatctctattcgctttctgtgattcggattattgttggaactttcctctcggcggttgcatctttgcaggtaggattcctcggagagttccacgcaatcaagtggcgaccaataacggtagccatttgtagccaatctcagggtctagctctcatctactgtccactggtggccatggctattctgcccaacaacttcaatgtggacctcagcagcagctacaacctacgcgtgtggcgattcctaatgatgttcttcatgattcccggctggttggccctcgtcggaatttgtctggtgccggagacaccacattttctcatgtctgtcaatcggccggacaaggccctcctggcccttaaatggatatgccggatgaacaggaagaagtgggaggacgtcgacataactttgagtgaagagaaatcaagcacaaacgatcaggaaggcttctggaagactgtgtggtacgagtataagctgctcttttccaaacctcacgtcttcaagttttttatttgtctctttcttatttttgggatattttttacttatccgcaacatggacaactctggctccaaccgtttatgcgacctcgtcaataataatccaacatttataaatcatgaagcggatgataccaatggaacggattcggagtcaccaaagtgcaacgacgagatgaccaacctgatcgatccggtctactacggctttacctacattggatgttttatcctggcctcggtgttggtacattggatgacccggaagtatgtaattgccctgcacatcttgatctctatgatcctgggaatttcgcttaatataatgaagcagccgacagtggtgctaatcttcttcgtgctaatgatggtattgcctggtgtcctgatcccactggccacctcggtactagtcgattgtcttcccgtcaatttgcgaggaaaggcactctgtatggtgcgatccttggcgcggtttggtggcgtgttgggcagcaccatgattgggctcttcataagggttacgtgtgatgtaacctttaacatcttcaatctctgcctggcaagtttcggcaagatgcagttcatcattttattaagctgctttaatctgcaaatttggatgaccaacgagcagctgggatttggagtaataatagcaggtgcaagttgtgaaatgcgaatacacgacaggcggttggcctggttaatggctgcaagtttcgccgcccagatggtatcctgctttttatggggcgagctggcggatgtgtacggaaggcgcaaaatcattatgattacgtcaaccgttgcgaacattgtgtccattctctcggcttgcgtgccggagttttggggcttccttttccttcgttcagtgggtggcttctttattgctgcgtcagttgtttctttaatgacatacttgagtgaattcacaaagatctccttgcgacccagggtgctgaccattatgagcttttcgctcggcgtgagcatgatctacgtgccatgtctggccggtgttctgctgccattgcgaacggagcccagtagttggcgcatcctgctgttgtgcaaccaggtgcccggaatcatcggaataatcattctggtattcctgcccgagagtccaaagtactatctgtcgattaacaaccaggagaaggccatgcaagtcatggaaaaaatctgccgaatgaacaagggcaagaaggttactctgaatagtctgggagtggagtcgctaacccagccgcgcctgcgccaaccaggttttgccctgccaatatggatgctgagagtaagggttcttacggccacgttcactgattgggatacgatgtgctctcacttggatggaattaaagcagattcgcctggccgtacagaggttctattggatattgcagcgcattccgaaccctttatacttcctgtttcttgcagtgccacctga

SEQ ID NO: 675 - protein, 271 aa, DROSOPHILA
MTAGYLVVLTSCEFDTSPKEKTLLANSLLGGMVASGLFIGFLADRYGRKFVIRLALVGALSFSVISALMPDLYSLSVIRIIVGTFLSAVASLQVGFLGEFHAIKWRPITVAICSQSQGLALIYCPLVAMAILPNNFNVDLSSSYNLRVWRFLMMFFMIPGWLALVGICLVPETPHFLMSVNRPDKALLALKWICRMNRKKWEDVDITLSEEKSSTNDQEGFWKTVWYEYKLLFSKPHVFKFFICLFLIFGIFFTYPQHGQLWLQPFMRPRQ

SEQ ID NO: 676 - DNA, 2789 bp, DROSOPHILA
ggattcggcggattcgcgcggtgcccacgttaaaattggtagttgggaatggattgcatctgctaatagcgtttcgattatccaagatattttaaggatgggatcgtggatgtctggtgggtggccttgattcccacagacttcgcaaaagggcatttattttgaatgaagcagcgattttctatatattgtacaaaaataatgcattgtgtaatatatttttaacgtttatgttctaagacccataaatgccaaactcttaaatgtgtatctgataaattattatctgagtgtaaatagaatgttaggtatttagatgtagctaagtagttgtgttccttaggacactaacgcagacccaacttagcttttagtttttagaaccacagtttttgtagtgtcaaccaatttcaaaaaatattaatcttttttcaagagttttttcttatccagcacagtgtaaagttcattcaactctttaagattgcaaatccgttcgtataattataatcatatatgtatagagtatttaaagaatatcaatcagattgcacagtgaactctaaagattcgaaaatctttaaaaaaacctaatcaaaattttgcgatttgctttgtaagaaaaaaatatatgatcagtatatcttcttaaagcgatcttatacagcgttatataacaaagtaattagccacacattgcggccggcaaagccctttcggtattacgcaaacctttccccaaagatctttcactctttcggtgctgacgggtttagaatctgtggccacaagcatttgcacacccactgagcttagcgccacgaacaggaagtacaagttattgcccgacaacaatcgcagtcgagaagcatttaatatatttcgctgtcaccgcgaaaataacacgtgctgtcggcgtattgggccaaagcagagcagagctggcagcttgatttactataaaagttgtcgatcggacacagaaaagtatcattcgcagatccagttcacttctgtaaagaactaccaatcagcactcctagcaacatggccttcaaggtgagtcatctcgatggaaatccgggatcaactgtatacgaaattccggttggatatctaacgctcttgaatttagtttgtcttcgccctcgccttcgtcgccgtggccagcgccggttatgctcccatcgccgccccacaggtgtaccatgctgccccagcggtggccacctacgcccacgcccccgtggccgtcgcccaaaaggtcgtggtcaaggccgccgaggagtacgacccccacccccagtaccgcttctcctacggagtcgatgacaagctaaccggtgacaacaagggacaggtggaggagcgcgatggagatgtggtacgcggagagtactccctgatcgacgctgacggctacaagaggaccgtccagtacaccgccgatcccatcaacggattcaacgccgttgtcaaccgtgagcccctggtcaaggccgtcgccgttgcccccgttgtgaagaccgtcgccgctcccgttgcccaatacgccgcccctgctgtcgcccactacgctgctcccgctgtggtcaagaccgttgctccagttgcccactacgctgctcctgctgtggtcaagactgtggccccagtggctcactatgctgcccccgctgcatatgccacctatgctgctcccacccactacgcagctcccgcccactatgccgcccccgctgccacctacacctcgtactcggctcccgccgtcgcctaccaccactagatcctggctaaaatcgacgctgtacatatatagaattgttggctttattataactgttcatttatttattgacagcaccaataaaaaaatgcatacaaaaatgtagacatatatcacgaaagactagagtgttttgtgttgcttattcagaggtaagttcctggcaaaggactctcagaggtcgttcacattgtcctgttctggtttgcattatttatgtgcttgttttcataacgagttcttgccttcagtgtgcgaaaaagttcacagacatcgtaggagccagcctcgccgaaggattcttaggagcattagggcaatgcaattcttgtggtgcttttggtggtgcagtctggacttttgttaagctatccttcagggatgctgccaggggcaacgaacttcgttggcctgcttgatgatttcgttacgaatgcggatcttgatcctgatcccgatcccctgtctgtctgaagggcagacaaatttctgggctttgtgtcggtcatttccatttaaatggcaggactcgtccaccgcaatgcaaagagaatccctttgttgttaatttttgtaatataaaacggaaattatggggtcatgactttacttgccgggtgataaatggccgggtgataaaatgggccatcccggccagccgggctacatgggcgtacggccggaccccaactattcgggtacctatagctaccagaatgacggagcaatcatcggcagctcgatgggcgttgtgatcattcttcattatttactaaaacgtagaatgatttctactggaaggtgggatgttgtcggaatgaattagttgatttgattttggtacgcccagaaggctcattgaacattaaaaaaccaattttatttcataatagtgaatgtttaaaatattttgtaaacgaagcaaatttgatattcaaatgtcgcaagaaaaatcggatattagccacatggtaatcctgtgcatagacgccgtgggtgg

SEQ ID NO: 677 - DNA, 713 bp, DROSOPHILA
atccagttcacttctgtaaagaactaccaatcagcactcctagcaacatggccttcaagtttgtcttcgccctcgccttcgtcgccgtggccagcgccggttatgctcccatcgccgccccacaggtgtaccatgctgccccagcggtggccacctacgcccacgcccccgtggccgtcgcccaaaaggtcgtggtcaaggccgccgaggagtacgacccccacccccagtaccgcttctcctacggagtcgatgacaagctaaccggtgacaacaagggacaggtggaggagcgcgatggagatgtggtacgcggagagtactccctgatcgacgctgacggctacaagaggaccgtccagtacaccgccgatcccatcaacggattcaacgccgttgtcaaccgtgagcccctggtcaaggccgtcgccgttgcccccgttgtgaagaccgtcgccgctcccgttgcccaatacgccgcccctgctgtcgcccactacgctgctcccgctgtggtcaagaccgttgctccagttgcccactacgctgctcctgctgtggtcaagactgtggccccagtggctcactatgctgcccccgctgcatatgccacctatgctgctcccacccactacgcagctcccgcccactatgccgcccccgctgccacctacacctcgtactcggctcccgccgtcgcctaccaccactag

SEQ ID NO: 678 - protein, 221 aa, DROSOPHILA
MAFKFVFALAFVAVASAGYAPIAAPQVYHAAPAVATYAHAPVAVAQKVVVKAAEEYDPHPQYRFSYGVDDKLTGDNKGQVEERDGDVVRGEYSLIDADGYKRTVQYTADPINGFNAVVNREPLVKAVAVAPVVKTVAAPVAQYAAPAVAHYAAPAVVKTVAPVAHYAAPAVVKTVAPVAHYAAPAAYATYAAPTHYAAPAHYAAPAATYTSYSAPAVAYHH

SEQ ID NO: 679 - DNA, 3458 bp, DROSOPHILA
gtcaaaagtcaggccccaattgcacttggagagccgaaaacaaggtcaacaaactggttagcagcagcagtcaaaaaaaaaagaaaaaaaacagccatattaactcgaacagcgaatgtgccatcgcttacgctgacccaatttcgaaattagcgaaaaaggaaagggacaaacaacttgccccggtacaggaactccgcgctaattaattaatggcagaacatcaaacaagggcatctaatttagaacgccgctcgctgcaactcggaacttgccttataaggtgagacggctttcctgctcccagatcacgtgtggaaatctcttgttgctccgtcgatttgtttattaagtgagaacaccgttgttttgtgggggtggcagggtgggagcggtaggcacgacccactcgctttcagaactttttcagtctcttcctctcagcacttttttcgaacgccgaagcacacgccttgcactcgcccgcaaatagcaaatgtcgtcatgtgaagctgtattccgtcagcacttaactcgcgtcttctatctactgcctctctttcgtttaaaaagcgcgtttagcgtttgcggcagacgaaactgtttaaactttaaaactttctagcgatggcagcaagcgtcgaatcaacgagtatcgattttcgagacttatcgatataaggcgatgcatcgatgtatctgactaatagccattggcaaacactcttatgacacaatgaaatgaagaaggttcaattttagtcagaacatattgcaacatattgcagttaccacaggtatatctttactatttaattgttagtaaaacggaaaagtatggaaaggtgacgacgtcagctaggagtgtgtctcggctaactaacaatgtgaccgtatacaaacatcaatccgaactagttccggccgccaaagcgaccctgcgcagcgatggtcgaactgtcaacgcaacttccgccttctttccgtgcggttcgtaaaaatgactggtttaacgaacagggtaagtgccgaaaaaaggcaaataaagcggtgcgagccttaagcaaatgtgtgcaattctttgcgcgcaataatggccagcagtgtgagagctaaaatgagcaaccaggcgcgtgaaagtgctgttctgagtgttcgaaagggcgtcgcgccttacacgtgccgaaaaactgggcatctgtgcaagtcttaagtgagctggttgccctaaggctaagaaacagtgcaatcaattggatgctgctggaaaacaacgtgtctcgggataagaggccgccacacacatttgtttatgcgcttgcgggcaaacctaacctaacagtgctcgagttgttttcgtattaaacttgaatttccctttcaatttcagaccgttgttattgatggtcgcggccatttgctcggtcgcctggcctccgtggtggccaagtacctgttgcagggcggcaaggtggccgtggtccgctgcgaggagctgaacctctcgggacacttctacaggaacaagatcaagttcctggcctacctgcgcaagcggtgcaacgtgaacccagcccgtggtccattccacttccgtgccccctctcgcatcttctacaaggcagtccgaggtaagtaacccttcgccactcgaaggagtgcagttgagttgaggcgcagttccatgatgttttcaaactctattacctacattatttgaacgagaaaccgtgtaaacaaaacataactgagaggtgttgcctgccacagctgctgctgctctttaagacacccaatagttctcgctctaatccctcttttcttctcttttaggtaagcaattcaaactgtttgggaagctgatccacgcgacatgatgaacattacattcttacctacattatttgaactagaaacctgtaaccaactctcaactgatgcattcatctagccaaagctcgcgccacaattgtgaatccctgactcaccggctattttctccatcccattctaggcatgatcccacacaagaccaagcgtggccaggccgccctcgcccgtctacgtgtgttcgacggcatcccatcgccctacgacaagcgtcgccgcgtcgtcgtgcccatcgctatgcgtgtgctgaccctgcgctccgaccgcaagtactgccaggtgggtcgcctgtcgcacgaggtcggctggcactaccaggacgtgatcaagagcctggagcgcaagcgcaaggccaagctccgtgtcaccctcaagcacaaccgcgagctgaagaagctgacggtcaaggcgcgcgagaacatcgcgaaggccgccgagcccttcaacaaaatcatcaaatcctacggctacgaggtttaaggacaacaacaagggcagaattacatacgttcagatgcgtagaagttttttaaaagagaataaaacaacatctagtttaaaaaacaaattcgtctttgagggtctcctatttgtttgcacacagtagtgattagccatcgtggatggactttttcttattgcagttcaaatgacttcaccttgtcctattcttttatgttttgaatcttgatatgcttatcagattctagtataccctacaatttaatgttattacgtttgcaaacaggaatttgatctttattagggaaaattgtagcgataaaatacaactacatatctaaagtagctttcgtaatatcagcgagttggaacactgatacctatgttttagctgtctttccagatcattcgaaagatttagtatgtcatcatagctgggctctttcatattttcaaatgatttgaagaattccttttcggattccgctgtttccttgctaatgctgtttttagctttgctcaaaccgaccatgatttcattgtggatagcttgtattccttcgaatactttaagcattttaagcgtgtttaccatgacgacattatccttgacgatctcctcgtaggaagtcgcgtttcgaactattgcgttcgcttgcgttgggtccatttccatgtacttgcggtccgaggatgagttgcgctgcctttcaatttcctctcgaagctcgctggcgacgtgcttctccgcgttggacagaactccatgttagcgccccagagaagcgtgaagagtagcattctaaatgcctcgaagaaacccagaaattggcacaggacctccttgtccgcacccggcaagttggtgatcggcggcagcggtgtggtcgttatccaatacccactgttccagtaggtcggtggagaggtctctacggactcatcggaatcatctggctttgcctcgttcaaagtgggagcccctgaatccgctggggcgccacaggtgtagctctgaaataaaaaaaatgtttcaggatattaccaaaaaagctacagctgcaattaaaagcgaatgcatttcgctcagtggaaagtctcactgt

SEQ ID NO: 680 - DNA, 706 bp, DROSOPHILA
atgactggtttaacgaacaggaccgttgttattgatggtcgcggccatttgctcggtcgcctggcctccgtggtggccaagtacctgttgcagggcggcaaggtggccgtggtccgctgcgaggagctgaacctctcgggacacttctacaggaacaagatcaagttcctggcctacctgcgcaagcggtgcaacgtgaacccagcccgtggtccattccacttccgtgccccctctcgcatcttctacaaggcagtccgaggcatgatcccacacaagaccaagcgtggccaggccgccctcgcccgtctacgtgtgttcgacggcatcccatcgccctacgacaagcgtcgccgcgtcgtcgtgcccatcgctatgcgtgtgctgaccctgcgctccgaccgcaagtactgccaggtgggtcgcctgtcgcacgaggtcggctggcactaccaggacgtgatcaagagcctggagcgcaagcgcaaggccaagctccgtgtcaccctcaagcacaaccgcgagctgaagaagctgacggtcaaggcgcgcgagaacatcgcgaaggccgccgagcccttcaacaaaatcatcaaatcctacggctacgaggtttaaggacaacaacaagggcagaattacatacgttcagatgcgtagaagttttttaaaagagaataaaacaacatctagtttaaaaaacaaa

SEQ ID NO: 681 - protein, 205 aa, DROSOPHILA
MTGLTNRTVVIDGRGHLLGRLASVVAKYLLQGGKVAVVRCEELNLSGHFYRNKIKFLAYLRKRCNVNPARGPFHFRAPSRIFYKAVRGMIPHKTKRGQAALARLRVFDGIPSPYDKRRRVVVPIAMRVLTLRSDRKYCQVGRLSHEVGWHYQDVIKSLERKRKAKLRVTLKHNRELKKLTVKARENIAKAAEPFNKIIKSYGYEV

SEQ ID NO: 682 - DNA, 3454 bp, DROSOPHILA
tgtcaaaagtcaggccccaattgcacttggagagccgaaaacaaggtcaacaaactggttagcagcagcagtcaaaaaaaaaagaaaaaaaacagccatattaactcgaacagcgaatgtgccatcgcttacgctgacccaatttcgaaattagcgaaaaaggaaagggacaaacaacttgccccggtacaggaactccgcgctaattaattaatggcagaacatcaaacaagggcatctaatttagaacgccgctcgctgcaactcggaacttgccttataaggtgagacggctttcctgctcccagatcacgtgtggaaatctcttgttgctccgtcgatttgtttattaagtgagaacaccgttgttttgtgggggtggcagggtgggagcggtaggcacgacccactcgctttcagaactttttcagtctcttcctctcagcacttttttcgaacgccgaagcacacgccttgcactcgcccgcaaatagcaaatgtcgtcatgtgaagctgtattccgtcagcacttaactcgcgtcttctatctactgcctctctttcgtttaaaaagcgcgtttagcgtttgcggcagacgaaactgtttaaactttaaaactttctagcgatggcagcaagcgtcgaatcaacgagtatcgattttcgagacttatcgatataaggcgatgcatcgatgtatctgactaatagccattggcaaacactcttatgacacaatgaaatgaagaaggttcaattttagtcagaacatattgcaacatattgcagttaccacaggtatatctttactatttaattgttagtaaaacggaaaagtatggaaaggtgacgacgtcagctaggagtgtgtctcggctaactaacaatgtgaccgtatacaaacatcaatccgaactagttccggccgccaaagcgaccctgcgcagcgatggtcgaactgtcaacgcaacttccgccttctttccgtgcggttcgtaaaaatgactggtttaacgaacagggtaagtgccgaaaaaaggcaaataaagcggtgcgagccttaagcaaatgtgtgcaattctttgcgcgcaataatggccagcagtgtgagagctaaaatgagcaaccaggcgcgtgaaagtgctgttctgagtgttcgaaagggcgtcgcgccttacacgtgccgaaaaactgggcatctgtgcaagtcttaagtgagctggttgccctaaggctaagaaacagtgcaatcaattggatgctgctggaaaacaacgtgtctcgggataagaggccgccacacacatttgtttatgcgcttgcgggcaaacctaacctaacagtgctcgagttgttttcgtattaaacttgaatttccctttcaatttcagaccgttgttattgatggtcgcggccatttgctcggtcgcctggcctccgtggtggccaagtacctgttgcagggcggcaaggtggccgtggtccgctgcgaggagctgaacctctcgggacacttctacaggaacaagatcaagttcctggcctacctgcgcaagcggtgcaacgtgaacccagcccgtggtccattccacttccgtgccccctctcgcatcttctacaaggcagtccgaggtaagtaacccttcgccactcgaaggagtgcagttgagttgaggcgcagttccatgatgttttcaaactctattacctacattatttgaacgagaaaccgtgtaaacaaaacataactgagaggtgttgcctgccacagctgctgctgctctttaagacacccaatagttctcgctctaatccctcttttcttctcttttaggtaagcaattcaaactgtttgggaagctgatccacgcgacatgatgaacattacattcttacctacattatttgaactagaaacctgtaaccaactctcaactgatgcattcatctagccaaagctcgcgccacaattgtgaatccctgactcaccggctattttctccatcccattctaggcatgatcccacacaagaccaagcgtggccaggccgccctcgcccgtctacgtgtgttcgacggcatcccatcgccctacgacaagcgtcgccgcgtcgtcgtgcccatcgctatgcgtgtgctgaccctgcgctccgaccgcaagtactgccaggtgggtcgcctgtcgcacgaggtcggctggcactaccaggacgtgatcaagagcctggagcgcaagcgcaaggccaagctccgtgtcaccctcaagcacaaccgcgagctgaagaagctgacggtcaaggcgcgcgagaacatcgcgaaggccgccgagcccttcaacaaaatcatcaaatcctacggctacgaggtttaaggacaacaacaagggcagaattacatacgttcagatgcgtagaagttttttaaaagagaataaaacaacatctagtttaaaaaacaaattcgtctttgagggtctcctatttgtttgcacacagtagtgattagccatcgtggatggactttttcttattgcagttcaaatgacttcaccttgtcctattcttttatgttttgaatcttgatatgcttatcagattctagtataccctacaatttaatgttattacgtttgcaaacaggaatttgatctttattagggaaaattgtagcgataaaatacaactacatatctaaagtagctttcgtaatatcagcgagttggaacactgatacctatgttttagctgtctttccagatcattcgaaagatttagtatgtcatcatagctgggctctttcatattttcaaatgatttgaagaattccttttcggattccgctgtttccttgctaatgctgtttttagctttgctcaaaccgaccatgatttcattgtggatagcttgtattccttcgaatactttaagcattttaagcgtgtttaccatgacgacattatccttgacgatctcctcgtaggaagtcgcgtttcgaactattgcgttcgcttgcgttgggtccatttccatgtacttgcggtccgaggatgagttgcgctgcctttcaatttcctctcgaagctcgctggcgacgtgcttctccgcgttggacagaactccatgttagcgccccagagaagcgtgaagagtagcattctaaatgcctcgaagaaacccagaaattggcacaggacctccttgtccgcacccggcaagttggtgatcggcggcagcggtgtggtcgttatccaatacccactgttccagtaggtcggtggagaggtctctacggactcatcggaatcatctggctttgcctcgttcaaagtgggagcccctgaatccgctggggcgccacaggtgtagctctgaaataaaaaaaatgtttcaggatattaccaaaaaagctacagctgcaattaaaagcgaatgcatttcgctcagtggaaagtctc

SEQ ID NO: 683 - DNA, 1071 bp, DROSOPHILA
aatgactggtttaacgaacagggtaagtgccgaaaaaaggcaaataaagcggtgcgagccttaagcaaatgtgtgcaattctttgcgcgcaataatggccagcagtgtgagagctaaaatgagcaaccaggcgcgtgaaagtgctgttctgagtgttcgaaagggcgtcgcgccttacacgtgccgaaaaactgggcatctgtgcaagtcttaagtgagctggttgccctaaggctaagaaacagtgcaatcaattggatgctgctggaaaacaacgtgtctcgggataagaggccgccacacacatttgtttatgcgcttgcgggcaaacctaacctaacagtgctcgagttgttttcgtattaaacttgaatttccctttcaatttcagaccgttgttattgatggtcgcggccatttgctcggtcgcctggcctccgtggtggccaagtacctgttgcagggcggcaaggtggccgtggtccgctgcgaggagctgaacctctcgggacacttctacaggaacaagatcaagttcctggcctacctgcgcaagcggtgcaacgtgaacccagcccgtggtccattccacttccgtgccccctctcgcatcttctacaaggcagtccgaggcatgatcccacacaagaccaagcgtggccaggccgccctcgcccgtctacgtgtgttcgacggcatcccatcgccctacgacaagcgtcgccgcgtcgtcgtgcccatcgctatgcgtgtgctgaccctgcgctccgaccgcaagtactgccaggtgggtcgcctgtcgcacgaggtcggctggcactaccaggacgtgatcaagagcctggagcgcaagcgcaaggccaagctccgtgtcaccctcaagcacaaccgcgagctgaagaagctgacggtcaaggcgcgcgagaacatcgcgaaggccgccgagcccttcaacaaaatcatcaaatcctacggctacgaggtttaaggacaacaacaagggcagaattacatacgttcagatgcgtagaagttttttaaaagagaataaaacaacatctagtttaaaaa

SEQ ID NO: 684 - protein, 117 aa, DROSOPHILA
MIPHKTKRGQAALARLRVFDGIPSPYDKRRRVVVPIAMRVLTLRSDRKYCQVGRLSHEVGWHYQDVIKSLERKRKAKLRVTLKHNRELKKLTVKARENIAKAAEPFNKIIKSYGYEV

SEQ ID NO: 685 - DNA, 2708 bp, DROSOPHILA
acataaaccaaatgcatggccatttattagaataatatcaatataattgatgtatcaaatgttgataatctttcaatagatttacaatagtaatatatgggtatatagtatatatattagtctaatcgatattactgggccacattgacccagtttcaccttgttaagtgaaaccgaaccccttgtgaaaacccttattatgtataagtggtaactcattagcataagtaattgatacccaataaggtgtataagaaactttccaatttatttgagacaaccaattcaagtagtacatcaaaatcaggatcattacactctaaagatacttttttatcccagagatatattaatattaagtttttgagcttgaacccttgtcaactcgacgtcattatggtaacttaattataagtttcgcgcttttggtgtaaaggaaaattaaaagcactgtcattggatggaacctgcatgacaattaccgaaaactactgctccgaaatataatcaaatcgcattcactttcgatccgaacaaggcaaaaacagtggcaaataaaaatgaaaacttggtgtagccaccgcaagacgactgaaaattggagtacgtgctgcgaatttggatcaaagcccgagacgcagacgcagccaaatgctgggtaggaagaggcggccccaaaaagcggcgatggtgatgatgcggggggcaaggagctcggacaatgggctaccatacgcaattggtacgcagttccctccacggagcaccgcatgcaaatttcgcgaacgcatctgggtataaaagtcgtggtttttttgtccaaggtatgtcagttcattttcgataaccgacggtgacaatcgcactaaacccccacccaagccttacaatgaatcctctgacggtaagtgttggtgatggcttcggtgaacccgtcaggtcaggagactaaactggactccatgcattttcctcacaggttgttgcagtcctttcctcgatggccctctcggctcaggctggtctggttggcgctcctctggccgccgctcctctgggtgctcctctggcttactccgcccctctgggacctgctccatacttcgccccggctgcgtactccgcccctctgggctacgcggctcctttgggatacaacgcccctctggtggcgggacctgctcccctggtgtccaagacctacgctgccgctcctttcgccgctcccttcgctgctccagttgccccagttgctgctcgcctggctgccccagtcgccgctcctctcgctgccccagttgctccagtagccgctcccctggctgctccagttgctgctcccctggctgctccagttgctgctcccatcgccaccgagatcgtggatgcccacccacagtacaagttcgcctacgatgtccaggatacgctaaccggtgactccaagacccaggaggagactcgtgatggtgatgtcgtccgtggatcctactctctgatcgagcccgatggttcccgtcgtattgtcagctactacgccgactccatcaacggtttcaacgcagtggtgcagaaggatgtgcccgtggctgttgccccagtggctccagttttggccaagaccgtggctgctccagtggctccagttgtggctgctgcccccgctccagtcttcgccaagaccctggccgctcccatcgtcgcctaagtagaaggaggagaagtaggagtcgtaaaggaagtattgaccgcaattcgacaaaggactttcatctgtacatattcgattaatcattgtcgagctattgaataactttcatcgcaaaaacccaaaattaaagaaattctgaaaacaaaagattgtagtttattgtttaaaggcatcctggattacgagagtgatatcatatagaggcttaagaaaattatttaagtattttagctttaatatttataggtaatatttatatgtatcattctttatattttaaggattacacttaaaacttggtgttctttttagggaagtggatgaagagttctggaagctttcgcaacatgagaacgtggccaggatgcgtctgaaattggagcctcagttatatccaaataaacacgagaatgccgccaatctgcgcgacaatgcgaccagtgcctacgacaccaagtaagcccagccagtccttagtagtgtccttcataatctgattttcaatatcctttatcttagggaaatctctgaatttgactccaccatcaagaatgccgtggtgcgcgatttcctggcggatgacgaaagttcccagctggaggaggaactacgtcaactgatcgacacgcaagcgcaacaggatgtggcgctggagaagctagtcatgtcacaggactgtgagctgatcacgctgatgaccaaggtgaagggacgcattgaggttaaccagagcgtgttcacctttgtggacttgagcccgccaacagaggatggttccaaatacgatttcaggttctccaccaacaagatacgtgaggttcatctgcgaaagtacaatctgcgcaggagtgctttggaaatcttcctggtggatcagactagctacttcctcaactttacgacgaaggtgagttttttttttgtaaataaaatgtgatcattgcaaatgttcttatttctttaagactcgaaataaagttttcacaaaaatcgtggg

SEQ ID NO: 686 - DNA, 708 bp, DROSOPHILA
atggccctctcggctcaggctggtctggttggcgctcctctggccgccgctcctctgggtgctcctctggcttactccgcccctctgggacctgctccatacttcgccccggctgcgtactccgcccctctgggctacgcggctcctttgggatacaacgcccctctggtggcgggacctgctcccctggtgtccaagacctacgctgccgctcctttcgccgctcccttcgctgctccagttgccccagttgctgctcgcctggctgccccagtcgccgctcctctcgctgccccagttgctccagtagccgctcccctggctgctccagttgctgctcccctggctgctccagttgctgctcccatcgccaccgagatcgtggatgcccacccacagtacaagttcgcctacgatgtccaggatacgctaaccggtgactccaagacccaggaggagactcgtgatggtgatgtcgtccgtggatcctactctctgatcgagcccgatggttcccgtcgtattgtcagctactacgccgactccatcaacggtttcaacgcagtggtgcagaaggatgtgcccgtggctgttgccccagtggctccagttttggccaagaccgtggctgctccagtggctccagttgtggctgctgcccccgctccagtcttcgccaagaccctggccgctcccatcgtcgcctaa

SEQ ID NO: 687 - protein, 235 aa, DROSOPHILA
MALSAQAGLVGAPLAAAPLGAPLAYSAPLGPAPYFAPAAYSAPLGYAAPLGYNAPLVAGPAPLVSKTYAAAPFAAPFAAPVAPVAARLAAPVAAPLAAPVAPVAAPLAAPVAAPLAAPVAAPIATEIVDAHPQYKFAYDVQDTLTGDSKTQEETRDGDVVRGSYSLIEPDGSRRIVSYYADSINGFNAVVQKDVPVAVAPVAPVLAKTVAAPVAPVVAAAPAPVFAKTLAAPIVA

SEQ ID NO: 688 - DNA, 9154 bp, DROSOPHILA
agttttgcctttgcgatcgcaattgcgattgcattagccatattgcaattatgtcgtcatgtccgcgtcgccgccaaagttcaaagttgcagaatctttagaacataaaagtttttcgcacgttccgcacatggtggtgaagagcaaggagggccggagggaggaggcagtcactgtgcgccgagaattattcatggcgcatatttcagcggtttggcaatagccccccaccttccacaccccctcccaagaggcgaaataaataattgcaaatattattggccactcagcgcatgccaacaataagaactgcaaaaatagccagcgaaatttgcagttcgcatagtttcgcaataagtcggcggcaatgatgactcaagagtgcaaaaccaaatattatagccatataaaaaatatgtgggaaattatgcatcttggcatggcacttgggcatcccgatgcgatgaactgaaatctgacaggttgaggaggtactcctgggtctggttattctagtcatgatgggctagtcaattggcaggattcgcgtctctattcaattggccgaaccgtttcaaaactatttcaaggctttaggccaaaacgaatcaatttgaaacacaatattcgtttttgacagtgattaagcgaaaataatcgctggtgggaagtaaatcaaagtggctacacttatagtacttaatcgtttaattaggctgtaaaatgttctacaatctacaatctgctgccaaaaagcatttattttatactaggatcaacgaaaactaaatatatttccctcactgacgcgcctttgttttaagtaacataatacactatttttttttttttaagatttattgtctttccattgatatctgcaagtcacacaaatggtataatggtctgaaacaaaatcgcgtagcaaatctaatttcaatttctatactaaaatatcagacggatggaaataaatagggcgcacacatcagggtaaaatggtagacgtattccccatctacaatgacggacatgtggagcttgaagatctgtgcctgtctgggccttctattacttttcaaacccatcgactccatgggatggcaaggacctaaagttgactgtacggccaacggaactcagacggagtgtcctgtagcatgtcctgaaacctgcgagtactccggcaatggaccctgcgtcaagatgtgcggagctccttgtgtgtgtaagccgggatatgttatcaatgagaggattccggcctgtgttctgcgatccgattgcccaaaagatgttgttcgaaaggaagatatgctactgggtgtatcgaactttaagtgctttagcagaaattacaactgttcatagaaatttattaggaaggcagctaaactttaaactaaattacaataaaatgtaaataaatgtgtagtaaattacaagctataattacaagataattacaaatagtaaaagaaatccgaaatgttagttgcactaattacgtaactggaacgaagttgcatagcaaatataatttgtattgctgtactagcaacctataagaatactttcgaaatcttcattccacctgctgcccagttttccagccaagtcctgcccacttctcatttgcccgaaatgccactgcaaatgtggcggtgcaactgttaccaggcggctggttgtgtttgtgaccgccatgtgcccactggcagccacagaagcgcacgtcacccgcacatacagtcatgaccattacaatggctattaagagaaagaaaacgcatttcttggcaagcggtctcgtgtgctacgggtcatttgggcggaactatgtgactgcaattgggggacacagaaaaatggggatttcagcaccaatccatgcgaaacgcggaacacattcgatatggtaatcacatcggaaatttcactgtgaattatttagaactgtgttattcctacatgcttttcgagctgaacaataaatgcacagaatgaatactttgtatttgctggccagattaggcgcggtgatgcatggtgctgcaattgggatttaattaaaaacttagtgggccagcaaccaaacggcgcacactttgatttatgatttaagccaaatagttttaaagcgccgccgacgtggtataattctcttgtattttgcatgttaaatttcgcgtaataacgaaaatgatatatagaaataatcataattttcacacttgaaagagcgacacaagacgtccacggcgacgacgcccgttcgcatcgcggcttgtgcattatttcttaattaaatttattaattgcacacaacacgagccgacggccgtacaacggggcgtatgcgcaacgctcgcccccgccatgagatttaaatgaaaatgcgagcgagtgagagggagaaagaaaggcaaagaaaagccatttgaatgattcatttacgtgtcgaaaacttaattgtgctagcaggtaagacgcttgtcgatgacgccaaaggctaagaggacaaaaaaaaacaacattatcatcatcaccatccgaatcgcagctgaactgggcttaagaaaaatggtcaaaccaattataagacttctgtgggctatttcattttgtcattaagaaactctagtagttgaagaacatccaaatttggtcacaacaaggcaaccatatcagccattatgcttataccaattttcacttttcacttgctcttttcgcacgtcactaggggtttttcacgattttcttgaatgactgcctgcagcatccgcgcatccaaacagcagctgtcagcccagagtatatcaccgtcattgggatctgtcacaatggcgaactctggggcatttgtcacccagtcacctttgcacccgcgaattccccggcagtccgcaaaagcaattagtcgcaacagttcctaaaaatgtgtcattttcggccaaaataaatactgaattatttttgtgccacgaatatttttagctattttggtctaagcaaacaaaactcagcgggactttgtgctgagtatctcttcgaaaattaattagcagcgtaaaagcaagaaatgcaactgaaaaagaagccacagggggcaacagggggttaaagcgagcatcgtccttggccaaatactttccatgacagttgtcgagtcaatttaattagttagataccattcttgaatgcaaccatttcagagagctcaggagatttgtgtaaaataagtaaatattttgaaaaatattcttttcacttggtgcattggaaacaatactttcgactcttttaggaaaacgtctcttttttcatggcccacaaattattgctatagctcttataaatcacttcaatatacttttatatatcatgtacgccttttctttcagtgtgcaaaccaaagcaacgagtgtaattgccttcgaaatgcatgcatctaatttggccacatttaattcagctctgtaaacttttcaatttaaactttttttttttaatttttgggcaaatataccattgcataattcgtgttgtgtacacactttttccatttgcatcgtctcattttaacttttccctttgattcgccccgcctttttgccgaaatctcgcttctccccacccgcttagagcaaacatttgcataatttaagtttgatgttgaaagttacgtgtttgccagcgaaacgacaacaagctacctggctgagtgaaccgtgaactcaacggctcaatggctaaacaggtgcagcgcaggtgaatgagccacccacacacccactggcggaaaacgccacccaactgcaacattgtcgaatgaaaaattgagagcttagcgcatttgctagcaatgttgccagggaaaaccagctaaatcaggagcaaccttgtcgattcgcggctacaggtgtttgttgcttttgcacatggaaatgcatttaaatatatatatagcagagaagtgggtgcgtgggtgtttaaatcgtgtaaccccatggaaaacatttcgtatttttaacaatatatagcagactagtaactcagttttaaaatacttaagcaataagtgggaaaattagtttctaaattcgtgtccacaatcgtagatatatttggcacagcgaaagctggcgcttttggatctgcagtttgtgctgttgttcagtttttggtaatctgtctgattatttaacttgcgctaaatacaaatatttagaaaatattttgcggcaatttttatgttatttttcttggcagctcagctactcggatattttcccctttccaccgccaaaagaatgagggtcattaagatacatatacgccggacaaagtcttattgttttatactatatctatatggcgagcattattctttctaatttattccacttgggcttagaggcgcgtaaataatataaacttagtgctcactgaaaagttcgaactggtggagacaaagaagtggtcgataattggaatatttcgggaccttgaaggcgcacttttccaaataactcccaccttgcggactgcctcaattaatctgaaaatttgcaaaataaccggccggcaaagctaaaaataccaaacacacaaacaggcgaaaaacacaaaactaaacacattcgagcgcgttgagtgttgaacatttgtgcaaacagtgattaataaattttaggcatttgcatgataaaactacaaagaatgtcagaggaacagctgcttaaacttgaaaaaatgaatttgttttctcaaacgaaatagtcactgcttataggtgcgataaatctagaattttgtttaagattcgttacaatactattttccttggacttggacttttatacattttagtaatattaaatcaaattcaaatatatattcatatttcttgttctttttgcgtacttgattcgcataaaatgtagcagctccccattaaatcagctaattttccattaagcgcaaaacagcttccaatttaccagccatcaaattcataaattataaacatcgcctgcacgacgaataaatatctcaattaagaggcgggtgaatgtgaaacatgcctaaaatcgcaataaataaacaaaacagcaagaaaaaaaaaagaagaaattgtcgctaaagaaatttgcaccacaagcgaggcgaacaaagtgcagcgccatctgtgacacatgaagcaaattaagagcgccaaatgtccaaagacacaaaataaaaacccaatgcaaatgacgcccacgaaacaaactggacgaggcgacagtccgtcatttgataaattcgcatggaatgattttaattaaaaacctgtaaatctcatctcgccggcggaatgcagaataccgaaaacacaacattctgcggaccgcgtaataaagttgtcaaatattcccagacaactcgaatatgtgcataattatgatggatgtgcgtgcgacattcgccaattgatgactgctgttcgcctttgttctaaaatgctgttcattcagctccccccatttggacattaatcatttttgtttatgccaaatacaaattcaaattcaaaaagccgacaagaagggcagctcagcagaaagcaatgctgctgcctgttccattggcaatttattagcatttaatttatttattacgcctgctttcgtgcactttcactgctgtgacaaatcaattaatttgcatttctttggaatgaggtagcaaaaaaactagcaataaatcgaatttcacataatattctcgacaggcaaaatggttttataaatgctagttgatagcttttaatttgaaatcaaacagcttagtgccaggacttttcaacgaaagctaaataaatgtttcatgaattgaataacaacaaactttataataaataaaaattgtttttttctttcattcgaagtcccattcgattatttctgaagttaatcatcagattcggaatggcctcttcaacacgcccaccaaactgccagaattctctaccgatctctataaaatatatatatatctatatatatatatatctagagtatatatagtgtggcgcatacttagtgccacctttaggcagcgtcaaaggtaaaaacttggagcttctcagggaaaacgtgaaatgggaacgccacaaatctccgtccgaaaatagatgggcacaaaagaatgggacagacaggcggatggatttgagttgacttctctgccggcggcaggcgaaaagttggtaacaaaaagtagaagtaaaagtgtaaaagtttattgaggcattccgtctaagctgatttgttgtccagctgcccgggctttttcactcgtgtctatctctattcgatggaactttttcaggcattgcacaagggcaacagttgtcagctgcttcgctgctccaaatatttacatggaatgtgtgtagccggattttcccccctgggaattcatgtgtgtgtgtgcgtaaaaattttccacaccggacggcgtaaatcaaaagacggcgcagcccttcggatgtctccgctttcccgactgcatttccctttgaaggcaactgtcaaaggtattcgaccagattttcggcaagattttcaagtatgcgggagaattttgcagcgaggatcccttcttgcattccccaaaaatgagtgcaaacctatcaacttgggtctttaaagagtccatcaaatggattgagcatcaaaagcgaatatatatatttcattagttaccttcttacaaatgataacttcttgaagcggttttcacatgaaaaactcaaaaccaaaaagactatttcgttttaaatccaagctctttggccgcaaggcctcgtcgtttgttgacacttttctttatttttattttcatttcgcatttgttttgcgtttgaagttatttacatgtgtcgccgcctgacaattgacgatgctgtcccttttcgctcagttttcctctttttccctgctattatttattttttagcccccctgcgagcataaaatgccagcggttatgcgacacactcagctagtcggcagttttttgccttcgtttttatcaaatgttcaaaatttgttgtcaacatgttgcgactgattgtaaaagtcgctctcgctccctcttagctgttccgtctctttctctctgattgtactcgccgtctcgctctaactggcaagtcagtttcagctgaacaaatcgattgattgatttctcaggtgtgtttgattgcgctgacaatgacaacgataaagatcccgcgacacgaaagaatggcaattcagctcagacagagctaaagtttaggtttttacaaacaagctatcctatcctcagttgatactgatttcatatctaaatctaacaacccaataaagattatttcattactatctgttcataaataaagtacatcatatggtaactgatataactttatctctgcattgccatttaattaattatttggcttttaaacaatctgaaatcagtgtcacgttctggcactcatttgattcgcatcactaactgaaagctggattggtgggcgaaacacggtttagttttgtgtaacgccattttacttttatgagcttcgcaagcgatactccatacgaccacccccatgtatccatgtctgcgtgcatgagtatctgtgtgcgtgcgtgtatctcttagtttggcgcttggattgggattgggttggtgggtgtgtttgcatttggcggctaacagcggtttgattgaaacgctgattgttggagcgtagcaaatatttacaaatgtaaaccagggggaaaaaaaaaacaactaagccgcacaaaataaaattgaattgttgcattcataaacagcatacatttgggtttatagagttttgctgagaatctctctctgcctgcactttaggtaaatctgataatagagaaatgttttctttacttcatgcagcagagccgcaagatcgatgagcaattcgcgacctaaaacctaaatacggtgctattttcgccaatgctcatttaggtacgcagaaaatgcgcttgatctatgctgatccgatccgattcgatgccatccacatccacgtccacgtccacatccacatccccttcgattctcgatgtggtcagccgcagatgtatagaaagcaatgccaaataaagattcaactagagaaggacttttgcggctggcctgtagcctgtaaattaattacatttgggcaaggggaagccgaaaaaacaacaattttccaagcaaaaccaaactaaagccgaaaacaaaacgaaacagaagacaaaacacacacacacacacacaggggaaagggaaattcaagggagggacgtgcagaagtcacaggcaaaataataaaaacagcaaataaaactctcgtctgacgtttggtttttgcattttttatgcagacccagctagaataaagtagaaaattatccaacagacgacccgagtcctaaataaacaagaccaaaaactgcacggacatggagcccgtagtgcctctgctattttccgacataagcggacaagttaagtttcgaaattattcggccagaccagggaaaatgcattagaatctgcttttcatgcatgcagaaaaaggaaaaaaaaaaagaaatgggaaaagccatggggaaaaaataaagtcaagcagagacgacggcgtcgacaagatgcgtgccaagttatttgccttgcagccgcattatttggtcttatttggtctaaaaaacgtgcagcaggcctattgccattgctctgggctcagagagtctgacaatgcttaggatccccgattcccgatctccgatccccaatccccaatctcaaatccgactgacagttggctcgtgtcgataaaatgctgccgcggcggcttaagtgccatctattttcgtttggccgccggacgttgcaaacaacgcctctgccacattgctatgtcagttcaacgtgtgcagcataaattcaaattgaggaacgtaaaaaagtaagcaaccacaagaagcacataacttttggtagtttggcacttggagggtcaacttgcataaatgccatttaagtagcactaatctgttgcatactcaactgcaaattaatt

SEQ ID NO: 689 - DNA, 502 bp, DROSOPHILA
ggtagacgtattccccatctacaatgacggacatgtggagcttgaagatctgtgcctgtctgggccttctattacttttcaaacccatcgactccatgggatggcaaggacctaaagttgactgtacggccaacggaactcagacggagtgtcctgtagcatgtcctgaaacctgcgagtactccggcaatggaccctgcgtcaagatgtgcggagctccttgtgtgtgtaagccgggatatgttatcaatgagaggattccggcctgtgttctgcgatccgattgcccaaaagatgttgttcgaaaggaagatatgctactgggtgtatcgaactttaagtgctttagcagaaattacaactgttcatagaaatttattaggaaggcagctaaactttagtacgcagaaaatgcgcttgatctatgctgatccgatccgattcgatgccatccacatccacgtccacgtccacatccacatccccttcgattctcgatgtg

SEQ ID NO: 690 - protein, 115 aa, DROSOPHILA
MTDMWSLKICACLGLLLLFKPIDSMGWQGPKVDCTANGTQTECPVACPETCEYSGNGPCVKMCGAPCVCKPGYVINERIPACVLRSDCPKDVVRKEDMLLGVSNFKCFSRNYNCS

SEQ ID NO: 691 - DNA, 4203 bp, DROSOPHILA
tggctaattaataacatttttccacggaaaagtctccccgctcgagcagtgtgaccgtactacggcgggaggctaaatactgcacccacatcgcagcgatgggcgccttcagcagtgatttgattcagtgatttcaagtttgtaaggcggtgcaaggaattaataaaattaatttgtagtcaccattaatatattataatttaataactctcttaacctgaattgattccgatatatgtgtgtgcttatgtgaggtgtatttatttcgatagcgtgacttgaccaaatcactgttacttcagaattgcagctgaacacataaacagctgtcgcagctgagctgtgttgaaaaattcagtcgaagggagtttatttgtataaataccgaaacaatggtggatcccaaccgaaagataaaccgtctggtcgaaagggacctgaacttcctggagtcctgcgagcttgagttcgcagaccgcttcactgacgacgacccagagttcatggcgcactgcagcaagcctgtgccggagccgccaattgtggagaactggatgggaggtggcggaggaggaggcggcttccagggcggaggaggcggtggtcatccctaccacaatcgctacaacggacatcgcagaggaggcggcgacaggggctggcagcgacgaggaggagctggctaccacaacaaccaggacaggggattcaggggtaatacccgggaagaagctcagtttctatttatagcttaccaacgcatttgttcccacagacaaccggcgcaacaacagatacgatcacatcgatcgccggaatcggtacgaaggaggcggagggtccggaggatctggaggctacaagcgctcccatgatcataaccagagaaatgatactcccaataacgaaccacccatgaaggtcagacgcgactatggaaactttgtgcctgcatccaaggattagttatcgaatatatcaaataagaatactctgcattacattgaaatattcacattgacgtttatttaatggacttaagactatactaattcctgtaatcccgcttaaacggccgactcagatatatccttttgttccttgtcctcgacagccgacatgcccacgcccatggcgctaaacagattggatacaggacctgcgccgccaacctgcgattggtagctatccatcatgttgcgcagcgtgtttacgtttatattgatgggctcaaagtcctcaatgtcatcgaaatcgtcctcgtccgcctgtggagctgtcttcttcttgccgtggaaggacttgcccacgctggtctgagccaactcgcggtccatctgctccatatacgattgaatctgtcgatcgagtgggaacacactgccgcctccagaaagtgcatttagattactctccatgtcgtcctcgtccgcgtagtcgctcatctccgaggtggagtcccagttgtcctcgggtattacgaaatccaggaaattccgcacatgggtgctgtccggttcctccggctggatgacggaattgcgctggcacgccttgcgcatggagggattcttcttgacctttgctgtcagtcctgtggaaccgtttgcctgcggcggcggctcgtcatcgtctgagtccagttctggctcctcgagccctcggtgctcaatgccctcgtagttggactgccgatctaagaactccgccagctgcttggtgaactcctcggcattcatttgtccgttcggcttgtagagcttcttgggtccgtagcgatcctgcagcatggagtctagatcctcagcgctgatattcaaccactcatccgagtcgctgggctgcaggttgttctcctcatcgcgcagctcctcggaagcagcctccgctggatggagcaacaggtcgaggatctcggcacccgctctggaggctgtgcggaaacgctcctggttgccacgaaagtacaccttggccttgttcagcagctcctggtactcggcactgccctcgatgttgtcccggaagtagcccttgctcagcaagctccgcagatacgatcgccaggcaggaaggtcctccagctgttggccctcaacccgcttggcttgagtggccaggatctccagtccactggccagcttcaagcccaatagttgttccttatatcgttccggctcggatacaggatccgtgagatgccagccgagtctcttctcgggcagatactgctggtgcgacaacatggcgtacagacagcgggtgaaacgcacgttggtgcgcacgcgtgtggcctccggtgggaaatatcgcatggtgcgaagtgccttgatgtccagcgagtcccgctcgcagaaagccctaaccgccgaggagagcagccttggcttctgtttcagaagctgtgcagcgctatgcgggagctccagcacctggcgatgaatggagaagtgcggctgagcgatctggtactccttaagccgcgcgtcaatgcacgactgtatctcctgcgagcagcggtacagggtgggattcattcgtatacgttgcacagccatggccatggtcagtggcttgtcctggctgctggcggcggagttctggagaagctgcaggtgaccaccgaccagataaacgcgctgctcgcacgtttccggagacgcccagtcgggcagggcgtccgccgcctcgatgagcaggaactcgccatccgaatcgctcacccgtgcaatgcagtcgccgcgtgcacgtgtgatctccgtgagcagatagacaacgaaccactcgtcgctgatgttgtcgccatagtgggttacgccgtggaagtgcggtgggaggtcgcctgggcggggacatggaaatggatgatttcgaattgcagaaacaaagctatttatagcacattgtgcgcatacccagttccgcctcctcctccgggtttgtctcctcgttcagcaggcgctcctcggcgccgcccagcctcacctgaagctgaaactcgtccttgtgccacagatagctgcgctctaaggacttttcccttacaatggccgagatctcgttgcggatctgaagcatcagtttgcgcagcgcgccctcatcctgtacgttgtcggggatcttgggaaagatgtagtactccacgaagtcctcctcgcggacgaactccagattgctgcctggaatcttgctcatcctttgtccttttgctcctcctccttttttttatttgttagggcgttcgaggtgacactatcgacatgagtgcgtgcttccgaactgactatcgttcaaagaagttcgttcacactggtcgcgcagcagggttccgcttcagcagagcggtggaggacgtggctaagcgcttagcggtgacccaacccattcccgttatttctctcagcgattttttatgattgaagattaggtatgaaccgaagattaggcattaaattcctttactaaaagtgcatatttacaaaagctagcggtcagttttattgaaagaaatggtatttaaatatttactcgagagcactttaaagtgctctgaataagtcggccaaacaaaatcccgacttgtttacacattaaacacccactccacttgacactccagctagttggaccaatttttagtaaatgtcgttcactcacccatcattgcggcattccgatccgcgtagttgttgtaattagaaacgccgctgcgtttgccactttgcccaactcccatcgccttttcaaagttgatagatagacaaacagacacccaaaagatataaaacgctatctaaagtctgctatttcgggacttttattgctgtcaccatatgagtctgaatcagacaatcgaagattctcgtggaagttggacctaaactaaccagaaacaaagtccaaaaggggaaatacatcgtcatgttcttggaaagaatactagtgagcgtggtaggtagtttttcagaataggataaacttaagtgaatggcatttgatttttatgtccccaccgcccaacagttactgctcaacctggtggctctgcttatgggagccactgttaccacccggcgcatccagccgcgggagacaaactcctgcgagggccgtcagagtcccgggcccatctgcgagtcctgcgagctgctggccacctgcgtgcgtcactccaacggatgggtgaacattcccgtggaatcg

SEQ ID NO: 692 - DNA, 2130 bp, DROSOPHILA
gacaaaggatgagcaagattccaggcagcaatctggagttcgtccgcgaggaggacttcgtggagtactacatctttcccaagatccccgacaacgtacaggatgagggcgcgctgcgcaaactgatgcttcagatccgcaacgagatctcggccattgtaagggaaaagtccttagagcgcagctatctgtggcacaaggacgagtttcagcttcaggtgaggctgggcggcgccgaggagcgcctgctgaacgaggagacaaacccggaggaggaggcggaactgggcgacctcccaccgcacttccacggcgtaacccactatggcgacaacatcagcgacgagtggttcgttgtctatctgctcacggagatcacacgtgcacgcggcgactgcattgcacgggtgagcgattcggatggcgagttcctgctcatcgaggcggcggacgccctgcccgactgggcgtctccggaaacgtgcgagcagcgcgtttatctggtcggtggtcacctgcagcttctccagaactccgccgccagcagccaggacaagccactgaccatggccatggctgtgcaacgtatacgaatgaatcccaccctgtaccgctgctcgcaggagatacagtcgtgcattgacgcgcggcttaaggagtaccagatcgctcagccgcacttctccattcatcgccaggtgctggagctcccgcatagcgctgcacagcttctgaaacagaagccaaggctgctctcctcggcggttagggctttctgcgagcgggactcgctggacatcaaggcacttcgcaccatgcgatatttcccaccggaggccacacgcgtgcgcaccaacgtgcgtttcacccgctgtctgtacgccatgttgtcgcaccagcagtatctgcccgagaagagactcggctggcatctcacggatcctgtatccgagccggaacgatataaggaacaactattgggcttgaagctggccagtggactggagatcctggccactcaagccaagcgggttgagggccaacagctggaggaccttcctgcctggcgatcgtatctgcggagcttgctgagcaagggctacttccgggacaacatcgagggcagtgccgagtaccaggagctgctgaacaaggccaaggtgtactttcgtggcaaccaggagcgtttccgcacagcctccagagcgggtgccgagatcctcgacctgttgctccatccagcggaggctgcttccgaggagctgcgcgatgaggagaacaacctgcagcccagcgactcggatgagtggttgaatatcagcgctgaggatctagactccatgctgcaggatcgctacggacccaagaagctctacaagccgaacggacaaatgaatgccgaggagttcaccaagcagctggcggagttcttagatcggcagtccaactacgagggcattgagcaccgagggctcgaggagccagaactggactcagacgatgacgagccgccgccgcaggcaaacggttccacaggactgacagcaaaggtcaagaagaatccctccatgcgcaaggcgtgccagcgcaattccgtcatccagccggaggaaccggacagcacccatgtgcggaatttcctggatttcgtaatacccgaggacaactgggactccacctcggagatgagcgactacgcggacgaggacgacatggagagtaatctaaatgcactttctggaggcggcagtgtgttcccactcgatcgacagattcaatcgtatatggagcagatggaccgcgagttggctcagaccagcgtgggcaagtccttccacggcaagaagaagacagctccacaggcggacgaggacgatttcgatgacattgaggactttgagcccatcaatataaacgtaaacacgctgcgcaacatgatggatagctaccaatcgcaggttggcggcgcaggtcctgtatccaatctgtttagcgccatgggcgtgggcatgtcggctgtcgaggacaaggaacaaaaggatatatctgagtcggccgtttaagcgggattacaggaattagtatagtcttaagtccattaaataaacgtcaatgtgaatatttcaatgt

SEQ ID NO: 693 - protein, 684 aa, DROSOPHILA
MSKIPGSNLEFVREEDFVEYYIFPKIPDNVQDEGALRKLMLQIRNEISAIVREKSLERSYLWHKDEFQLQVRLGGAEERLLNEETNPEEEAELGDLPPHFHGVTHYGDNISDEWFVVYLLTEITRARGDCIARVSDSDGEFLLIEAADALPDWASPETCEQRVYLVGGHLQLLQNSAASSQDKPLTMAMAVQRIRMNPTLYRCSQEIQSCIDARLKEYQIAQPHFSIHRQVLELPHSAAQLLKQKPRLLSSAVRAFCERDSLDIKALRTMRYFPPEATRVRTNVRFTRCLYAMLSHQQYLPEKRLGWHLTDPVSEPERYKEQLLGLKLASGLEILATQAKRVEGQQLEDLPAWRSYLRSLLSKGYFRDNIEGSAEYQELLNKAKVYFRGNQERFRTASRAGAEILDLLLHPAEAASEELRDEENNLQPSDSDEWLNISAEDLDSMLQDRYGPKKLYKPNGQMNAEEFTKQLAEFLDRQSNYEGIEHRGLEEPELDSDDDEPPPQANGSTGLTAKVKKNPSMRKACQRNSVIQPEEPDSTHVRNFLDFVIPEDNWDSTSEMSDYADEDDMESNLNALSGGGSVFPLDRQIQSYMEQMDRELAQTSVGKSFHGKKKTAPQADEDDFDDIEDFEPININVNTLRNMMDSYQSQVGGAGPVSNLFSAMGVGMSAVEDKEQKDISESAV

SEQ ID NO: 694 - DNA, 6647 bp, DROSOPHILA
tgcttcgacgacctcctggttgactaccagaccaggtacaaaatcgaaaagatcaaggtaatgggttggacctatatggtggcctgtggcctcgaaacggaccactacacggacttctccatcgacattccggtcaagcaaccggaagctgattccgaaattagacgaggatccagcggtgactatttcccacgactagattagagtacaattgtaaaaggtacatctattcagttctgactgtccattttggaagtaccgaggacgatgagatgagcggcgataatgtcagccagccctacgcccaagtgcaagatgtcgccgtcctggtgatgaccgagtttgccctggacttacttcgcatcatgcacgacattcggtacaactacgtgttctcggagtacgatacattcttaacggggagcttgaagataggtgggctgcattaccttcaccgttatcctaatccatccaatgatatctaaggcatctcccatggatccgtgatggccggcgttgttggactctcgaaaccacactatgatatctggggtcataccgtcaatatggcctcccggatgtcctccactggattgctggacaacatccaagtaactcggcacacggcaaaggtgctgcgacaatttaacatccgctgcaactaccgagggcacacggaggtaaagggagtgggcaaggtgcccacctacctggtggtcgtagacccggatctcacattccaagatcacgaccaagtgagcatgagtatgaaggactcaaaaagctgggtcatcgacactctttcactgtcattcaccccgagcttcgtgcccccaaagtcttccacttcggatgaagaggaggctgaaggagagctcgaggaaaatgtatctgaaggcgatgaactggaggtctcgatacatgagcgccaaaagggaggcatctttctggccgggaaccttcattaatttaaatttattttaatagatatatatatatatatatatttatttaagcatatataacacacatatatagatgtattcgtacagttcaaagcaaatgtttttcttgaggttaaatacgttatgatttgagcactcgctgaaatcattgcacaactggtgaccaaagtatacgtatgttcataattcagagtcatacatagtcgttaggttatgtacatgctacagataatacactcatcttgacgaatctccatctccatcactaagaaagcaccatccgtgtgatcaggttcggtttcgtttggttttgtgcacagtttttagcttaagtaagcattgcagttgatttggggcatgggcatagcccttactcgttgacagaactggagttcagcagagccgtgtcctcgggaatgggcttccgcttgtaggagggctcagtggctaggtagacaaccagcgccccgaagaccacgtacattactccaatcacattggccaacacaccagccggtggaagagtggagtaagccggagttttgctagaaatgtcgtcatggattagtcaagtgatcgatctagaatgcatatacacctacatggcgaagatggccttctcggttatgcccatcagggcactagcaatagccagaacgaatccaaagagtccgaagtagatgtgcagcggcatcatggcgatcctgtagttctccctcaaccccggcgccaaaaaggccacaaatccggccacatactgcagcgagaagacgatcaccgcggagagccccagccaagagtgcagggagtacatgttgggaatgggcggattggccaagttgtgggaatcgaagaccgtcttcagggcaatcaccgtcagaatgaatgcacccatgtggatgccggcgtgggtaagcttcagagtcttcttgcgcgtggtgcggaaaccacgatagatcagaatggctgtgggattgaattgagttggattaccatttcgaagctagtcaatgggagtggcgtggcacctcttccgctgcatttactcacagttgccatacaggtaaatgaagccaatggtcatgaacagcggatgccagttgaactccacgccgggatttgaggtgccggccagaccgccgaagtgctggccaatccaggtggccaccaggacgatcatggtcaggccgcacagctgggtgagcacatagagcaccttaaagttgatcagcgctggatccatgttggccttgccgctgcctgaaaaatccaataaaagctggggatgagctaaaaatagaggccattttacgcacagcacgcattggcgatctaatcgcataactcattcaagggtagagatatcggggcatcgaaaggggaaggggatctcaagcactcgtttatattttccatacttttggtttatagcctctgctacgtaaacatgattcaattacatgttccacctgcccgcagattaaaataacccccaagcacttgctgataacatgcgaccagaagtttagggagccaataggcttcccaaaaacccactttaacagttgtacatctgatccgcttcgatggcagctgcactcgttgggtaaacaaacagttcctttgccgccagccatccgatactgcgataaacaagatctcatcatatcgactgggccctgagttaatgggaacggcctgttcccaggcactgggacacacccacgacccctttcgccggccactcaccaggcgtaatttggctaattcatgcgtaaacatttgcgcttgtttacccaacattaattttcaacgccagagcgttctgcccactttatctgtcgccttatcagtatgttctccagatagtccgaacatctgatattaaatcgctttaaatagcatcgtacaagttcctcgtgcttgatgttgcagcatgatacattaaataaattaaagttcgattcattttacggaacgtacgggtagtgaaagtagccgtgttcatagtttggtatagtatagattggacttgactaagatagtttaaaaggctagtaaacttgtaggtgcagatgcactcgataagggccgctatcagccgccctaattggcgtttggtatgcaaatggtgttttaatttcgactcgggcgaataataagcaaatgagccaaactgccaagtgttggcttgtaaattggctgataagtgcgccggagacacttgtagctggcaatcgcaattataaatgctggtaactggcagcagccacgcgtccccggttactcaatgggctccagttggagtgctccatttcgacgcagctctgggttccgagtgaaattaattggcacattagctgtgactatgactgttaattattagggttaagtgggcgtgccaaagacgctgaccagcaaagcgttgcagcagatcgtgcgcaaaatttgaaataaacaatccacataggcgcaccaaaagaccgaaagtaaaacccgggcagatgactttggatgaatttggaaaagcgtacaagtccgaagacagcggagcaaaataaataaagtctggaaaaccaaagtgaaattcagctggttactggttactggttactagtggctgcttgctgatcgcggatcgtgatgccgatggtgatggtgaaaaccgcggcggggaaaggggacggctgcagtctgtctttcggtgcgttttgctttaacttttactataactaaacactcggcttgttggtttattttacttggcactaatcaaacttgcagccaaaatccaatgccatgcacagtctacctgttggtggtgaagttgccgccgccgttggagtggccaactcaatgccagcgatggttgttgcaggttgcacttgttctgctgtcgcaggtgttgcagttgttgctggtgtcgctgccgctggcttttccccattagtcaccgcgatcactgtggtcgccgtggagatggtggtcggaacggcggcctgtggctgctccggaatcgctggctccacctggacaactccgctctccggcttggtcgcctgctccacgtccgcgtccttcgacatggtctgtgcactttaaatcaataattcaccaatggttcaaccacaaaaagacatgcaacgtataatggacggtgttaattgccctaagacacagcacaaaaacactggtaaatgctagtaactaactactagtaactaatccgcacgacaccccgttaatacaaccgaacacttcggcgtgcaatgcgcaactgaatttaaagttttccagccgccgcccggcgatggttaggaaaagctttttccgctcgcaaatctctcgcatgcgacatcgcacacacatattgctcatttcggtgtggataattgtttggttctcgatgcggataggattccagtggggttgggtttgcttttgactttgcctttggctttgggtgccaacgaatgctggttagtatgccggaccaggtcgatcgcttctggttgggaagggggtgcattgatgattatttgcatttcgcattcctcggatctattcaaaccattgtcactgcgcggcatttcaattgcgactttgactttgatgttctgtgcatagtaatgggatggtgcagtggaactgcttcaattggaactactttttgccagaaggagtggaatccaaaacgtaaaagggtttacaaaaagtttttgggtaaaatttgttagtaacaactatttcaatattgttcttagtttcgaaagtacatctacagtaaagtgaaacctttaaggacaacaagtagctttccctcttaaagagcttaagttcatgctgtgcaataatgactgtatgtgcacttcaactcacccagtgagaacaacatggcgtatacttgattgatgcttcactctgctcagataatgcctgtttcaataccgcctgctcttatctttagcagcaattagtgactttaaagcgatgacgatgggtttttcgcgattacttctgattttcgtggctactgccacgcactttactctacttgttgaacaaactgcttaaaatgcaggaagctgggccttccatatggaggaaaagccgtggaaattctgcacaggctgcgtgggcgtgaaagccctaaagccccgcccactctgccgcacttggccatttcatttggcatttccacgagcttttcgttggaagctcagaactgtaaacgccgaagcacacatgcaaacaaactttcgggctcacaccactgtagaaaaaccacttgttggatattatattaatggaaagccacaaccaaattataactgtttgtaaactacatttaaagacgtagttgaaatagaaacaggtaaacttacagatttgaaatgaatcagtaatccaataatgtgttttgtttggaatatttccaaaatgtcttcaacggaagaggcaagaacacaaacagaaacggcacaaacacaaagagataatttggcagcataagagagcggaatgctgtgcgaatttactacgtcagcattattattaacaagttaaacttaaagcggcacattcattgatacttaatttagtacagcaagtcaaggacacggtcaaactttcactatcaaagggttttaaactgtaactcgatctgttaaccgcttcgattttctgtttactcatttggaaaaaagcgggacaaccagggatgcgagaatcatactgtagctgcgtgtgctgaaaaaatagtgtgcatttaatatacgttcacatgatgatagaaagtactgactgtgtgagttttaattttaaaaatttacaaactttatattcatatttaactagagcttggaaaacatttacttcgagaccctggattcccttatgccgccagtgtggcccattgagcacgactgaaacacgctaacgcctttagctcggcagcactggcagctccaacaaaaagcttcaatttaaaataatatttaggtagtcccacaataaatgctaacaaaatgctctccaacctggtggtgaccaagcagaaagtggtcctcgtaataggtgagtacacactgactaccccatcgtctgccaaataatgcgaccaccaatctcccgcctcatccacagatgagctaaatcgggagcgcattgcccccaagttcatcggcagtctgctgcacgagcagggacagggggcggataccatcaaggccctgcccaccggcgtcagccttaagcacgtggccaccttcgaggcactgatcgacaagtacgccaacaacaacactgggagtactacggattccaactccactggctttaacgtcatcctgccaacattggcagacctgctgtgctaccagacgcctgctttcatatttggcttcctcaaccgcctacgccgctcggacaatgtgcgtcgggttttcctttgggcctccccgcagcacctgcaggatccgcatgccgactacatcctggctggctgcgagtacctggccgagctggtcctccgactggaatcggacaaactactctcgctgatatcacgcaagccgggcggaggggtgtccaacaggcgctactcctgcgaagtcagcaaaacccagttcaaggtgacgccgctggacggaggactgcctgcaggtgcctcccccaagcagc

SEQ ID NO: 695 - DNA, 1662 bp, DROSOPHILA
aaatcgaagcggttaacagatcgagttacagtttaaaaccctttgatagtgaaagtttgaccgtgtccttgacttgctgtactaaattaagtatcaatgaatgtgccgctttaagtttaacttgttaataataatgctgacgtagtaaattcgcacagcattccgctctcttatgctgccaaattatctctttgtgtttgtgccgtttctgtttgtgttcttgcctcttccgttgaagacattttggaaatattccaaacaaaacacattattggattactgattcatttcaaatcttgcacagaccatgtcgaaggacgcggacgtggagcaggcgaccaagccggagagcggagttgtccaggtggagccagcgattccggagcagccacaggccgccgttccgaccaccatctccacggcgaccacagtgatcgcggtgactaatggggaaaagccagcggcagcgacaccagcaacaactgcaacacctgcgacagcagaacaagtgcaacctgcaacaaccatcgctggcattgagttggccactccaacggcggcggcaacttcaccaccaagcagcggcaaggccaacatggatccagcgctgatcaactttaaggtgctctatgtgctcacccagctgtgcggcctgaccatgatcgtcctggtggccacctggattggccagcacttcggcggtctggccggcacctcaaatcccggcgtggagttcaactggcatccgctgttcatgaccattggcttcatttacctgtatggcaactccattctgatctatcgtggtttccgcaccacgcgcaagaagactctgaagcttacccacgccggcatccacatgggtgcattcattctgacggtgattgccctgaagacggtcttcgattcccacaacttggccaatccgcccattcccaacatgtactccctgcactcttggctggggctctccgcggtgatcgtcttctcgctgcagtatgtggccggatttgtggcctttttggcgccggggttgagggagaactacaggatcgccatgatgccgctgcacatctacttcggactctttggattcgttctggctattgctagtgccctgatgggcataaccgagaaggccatcttcgccatcaaaactccggcttactccactcttccaccggctggtgtgttggccaatgtgattggagtaatgtacgtggtcttcggggcgctggttgtctacctagccactgagccctcctacaagcggaagcccattcccgaggacacggctctgctgaactccagttctgtcaacgagtaagggctatgcccatgccccaaatcaactgcaatgcttacttaagctaaaaactgtgcacaaaaccaaacgaaaccgaacctgatcacacggatggtgctttcttagtgatggagatggagattcgtcaagatgagtgtattatctgtagcatgtacataacctaacgactatgtatgactctgaattatgaacatacgtatactttggtcaccagttgtgcaatgatttcagcgagtgctcaaatcataacgtatttaacctcaagaaaaacatttgctttgaactgtacgaatacatctatatatgtgtgttatatatgcttaaataaatatata

SEQ ID NO: 696 - protein, 339 aa, DROSOPHILA
MSKDADVEQATKPESGVVQVEPAIPEQPQAAVPTTISTATTVIAVTNGEKPAAATPATTATPATAEQVQPATTIAGIELATPTAAATSPPSSGKANMDPALINFKVLYVLTQLCGLTMIVLVATWIGQHFGGLAGTSNPGVEFNWHPLFMTIGFIYLYGNSILIYRGFRTTRKKTLKLTHAGIHMGAFILTVIALKTVFDSHNLANPPIPNMYSLHSWLGLSAVIVFSLQYVAGFVAFLAPGLRENYRIAMMPLHIYFGLFGFVLAIASALMGITEKAIFAIKTPAYSTLPPAGVLANVIGVMYVVFGALVVYLATEPSYKRKPIPEDTALLNSSSVNE

SEQ ID NO: 697 - DNA, 4727 bp, DROSOPHILA
gggctactgcatccgcgatgccaccggcagctgggaaacgatttcgatgctgggctgccaatcggagtacaatttctattgcagcgacgagggtaccttcggatgcaccttccagtcgcagtgccaggtgcccaagagaggtcccttcagctgtcagcaggcgggcctgttcccggatccgtacgactgtaggcggtaccacgagtgcagcgatcagagtgtggacacccctcgcatctgctccaacggagcgggctactccacactcacgggcacttgtgttctgccacgggagagtgagcagtgcatccaggagcagttcacctgcagtcggtcgggacaagtgggtggatgggcgcccgacaatcggtacttctacgtctgcgtcaatgacacggccaattcgctgtatccgctgatgatgaagtgccacgagggattcgttttcaacagctacagctgtgtgcccgacaccaggagcatgaggagcattcaggcgatggagtcccacacgtgcatgaacaacgataggtaccaatgccccttccgaacctctgagatcgagtactgcaagtgcgtcgatggagaactggaggtgatgacctgtcccgccggcttccaaattgatcctaagatcctgacctgcgtgactgataggatctatcagtgctcggactttgagatcctcagctgtcccaatgtctccaccaaggatgagtactgcatatgcatcgatcaccagctgcagatctacagctgtccaatgggacagtatttcaatgctgagactcgaaagtgccaatcagagtcagagtaatgaattgttttcatggtaccaatattgattcaagtaaatgcctatttaaaaaattgaaatcattctgaacattttaagataaactacaaataactataaatattcaccaaaattttaatgagacccagtaacgacaacaaatcagtttgaatcttaagcctaagaaagtggagggatacggactcaatcgtcacattcccgcaccacaggatgcaggacgatcgaggctccgttgcagcccgtgcgatccgagatgaaatcgtggaagttgctctccagcgcccacatgaatcgcttgtgacccgggagcacttgggtggacagccggcagtcgcctccccgctgcacctcctgcagattggcggccttgaagcaggtctccgagtcccacaggtaaatgtcgttctcgcccttgtagcggaagaagagcgaggtgccgccgtcggcgcccagcagcaccgcctgtttgccatagggcttggggcccacgtcgatgatggagcccgctccctggccaacgcgcaggtactcgcccttgatggagtacagacggggggagctcaggtagctgaagaacagggtggaggtgccgtccggcttcgaggtgagcgccacgtacagcacatcgctggtgggggcggtggccttcggcaggacgatgcggtaggacttgttgccggtgatgtcgtataccaggatactacgtgctccagcatcggccacatagctatggttgaaagtgaaggaaatataatgtggaatgagattagatatcatgtatgcaatacaaatcgattttatttggtatatgatgagccacacttctgagaactaccttgagcagataagatatgagcctcaaagtggctaatgcccttttgattggctcaatgatcgctgattgaaagcatgattgaaagtgtgtggtaaaagtactccaaactcttgattcagttcgatgatttcaacgaatattttatgactgcaatatgaatctctgaatatcattgtgctgataaataatggttagtaataatggttaataataatgtaatgtgtggtattaatttcatagttgatgtatttcaaaaagtgattaagtacaactcatttcacagatgaagttaagggtaataaaagagtataggcaatggaactcacacgaatggcttgttgtccttggagtagtcgaccacgatgaactgcagccgactctcggaggtgaccaggtcgctgaggtcgatgctcttgaccaccttgtggttggccgtgtttatggccacgatcttgggactgcatctgcggatgggctgctccagggtgttgacaatgcccacgtccaaggcccacagaagtccctgcgaacggagaaggcaattattaattgctatcaattgcagctcgtgttgattgttgttaatgttttcatttggcggctaattgaaatgttggcggcgttaaaaattccacattcgcaaatatgtggccataaaatgagtatcagcgaaaagcactgaatggaaaattgcgcaaataaataaatacagtcgcctcgtttgtttgccgtttgttattgtttcgtcgacttttgtgtaaataaaataaagaaatgatttgcataaatgcagctaaacgggaatggcatttaaatgagaacgattcgacgccaacaataattgaaggaaattattaagttgcagcttatgctcgcaatcgtaagtaggtcatgtaaatatttaatagcatcattgtaatatctgcgaatgcatctgtcatttaaaattaaagctgagaacttctgaagtgcaatcgaaatgcacaaaacacggctggatggcctgttcccagcatttccaaaattattttcgagaacttttcactgcatttgcttgtcacttttcagctgcagtccttgtcctttataatattccatttaccccacagctttttcggcgtttccgtatccgtttattctacccttaaattgctgccgccaattgacgggcatgaattttatttggagctcttcacttttgtggccccgtttatttgattaaaaaagtaatatttggtcgacagcgaggctaaccaattaaaaaagtgcgtccggcaaggggttaatgcgaaaacgataccctggagctaaactcccgattttgatcgactttgtaagggctagcaaatatttaacactgcgactgcacatcaatatcaatatcagaagataaactaaatcatttttagaaaaaaaaagtgaatagccctaagagcatttcaatgctaccctgtaatccacccacgatacaaatatgaattaaacatttggtgtgggttaaagtgctatgcctccatggtggccaacaacgagcagtccgtaattaaaggcagaactggcagtttggacgagacaacttgtctgacccccaaaaaaaaaatggtccaaacaatactggcgttaattgcactcacattctgatcgacggctatgtccacgacggactgcagcgcctggcagttgccctcctcctgaatggcccagcagggatagggtgcgatcttggtcaggcactcgcccttctttagattgaccttgccgagagtgaagggcacgccctgcttgtacctgggcagcgccacgaaggcggagtcccgctgcagttgggcccgggtcacgatcacgttacggggcacatagcggccggactggacgtagatgttcttggtggactcgcagggccagtggaggctgctgccgctgagctggaaggtcagttcgttcagcgggttcttgtcgcacttggtgccgccaatggagttggaggcgtccgtcgactcgtcggtggaggagctgtatcccgcgaggaccacggaggccgaagcgacgaggagcagcagttgcagctgcgacatttttcggcgtttctttctgcgctttccacaaacagagcttctgcactcgattcaccacgttggccagaacataaaactgtctgagcgatggtagacctgcatttatatataatacccaacgacttatgcagccagcatgtggagcgtgttgcggcaaggtcgttggttgcttgacacgggggggaacaagtgtctgtctggagtggctaccacccagccagcacgtctggcccacgccggaagtcggccagacctctaagcccgctcggtttctaagcaatgcggaaagcgatgcggaaatgaaatgcaaacttaaccccttccctctatctagattacacgattcttcctaagccatccaaatcaaatttaactcccctggtttttactttaattgtcttgataacagtttgttctattatggcaatctatgcctgtctaattaatcacttctactccttttattgctcttattttctgagtataactttgtgctattatagccatttataggcagctaattagtcactcaagtccgttcaataaaatgggttcaagttgcgaaatagcttctgtcactcatcgatcgctcttgtgcatccgacagagtagcaagtttcaccccttggcaggcaaagttcagaggtcgctgcgaaacacttgccaaagtggcccaaaagttcaatatcaatgctgacgtctgtgacctgcatatctgcgaccgagaaagtttcagtttcttggctcgagttaccagctattttcggatgacaaaaacatctgtcagtccgtccgtctgcagctagctatcagtttgcttttgggggagggggcgggcgaaaggagaaagttcggggagttggtggggcacattactcgcagataagattgcaagttgccggagattcgtcgtgtgaatcacacccacagtttcgcggaacagtcactctgttccaaattgatttcatttctattttaagataaatgcaaaggcgaaatt

SEQ ID NO: 698 - DNA, 1182 bp, DROSOPHILA
atgtcgcagctgcaactgctgctcctcgtcgcttcggcctccgtggtcctcgcgggatacagctcctccaccgacgagtcgacggacgcctccaactccattggcggcaccaagtgcgacaagaacccgctgaacgaactgaccttccagctcagcggcagcagcctccactggccctgcgagtccaccaagaacatctacgtccagtccggccgctatgtgccccgtaacgtgatcgtgacccgggcccaactgcagcgggactccgccttcgtggcgctgcccaggtacaagcagggcgtgcccttcactctcggcaaggtcaatctaaagaagggcgagtgcctgaccaagatcgcaccctatccctgctgggccattcaggaggagggcaactgccaggcgctgcagtccgtcgtggacatagccgtcgatcagaatggacttctgtgggccttggacgtgggcattgtcaacaccctggagcagcccatccgcagatgcagtcccaagatcgtggccataaacacggccaaccacaaggtggtcaagagcatcgacctcagcgacctggtcacctccgagagtcggctgcagttcatcgtggtcgactactccaaggacaacaagccattcgtctatgtggccgatgctggagcacgtagtatcctggtatacgacatcaccggcaacaagtcctaccgcatcgtcctgccgaaggccaccgcccccaccagcgatgtgctgtacgtggcgctcacctcgaagccggacggcacctccaccctgttcttcagctacctgagctccccccgtctgtactccatcaagggcgagtacctgcgcgttggccagggagcgggctccatcatcgacgtgggccccaagccctatggcaaacaggcggtgctgctgggcgccgacggcggcacctcgctcttcttccgctacaagggcgagaacgacatttacctgtgggactcggagacctgcttcaaggccgccaatctgcaggaggtgcagcggggaggcgactgccggctgtccacccaagtgctcccgggtcacaagcgattcatgtgggcgctggagagcaacttccacgatttcatctcggatcgcacgggctgcaacggagcctcgatcgtcctgcatcctgtggtgcgggaatgtgacgattga

SEQ ID NO: 699 - protein, 393 aa, DROSOPHILA
MSQLQLLLLVASASVVLAGYSSSTDESTDASNSIGGTKCDKNPLNELTFQLSGSSLHWPCESTKNIYVQSGRYVPRNVIVTRAQLQRDSAFVALPRYKQGVPFTLGKVNLKKGECLTKIAPYPCWAIQEEGNCQALQSVVDIAVDQNGLLWALDVGIVNTLEQPIRRCSPKIVAINTANHKVVKSIDLSDLVTSESRLQFIVVDYSKDNKPFVYVADAGARSILVYDITGNKSYRIVLPKATAPTSDVLYVALTSKPDGTSTLFFSYLSSPRLYSIKGEYLRVGQGAGSIIDVGPKPYGKQAVLLGADGGTSLFFRYKGENDIYLWDSETCFKAANLQEVQRGGDCRLSTQVLPGHKRFMWALESNFHDFISDRTGCNGASIVLHPVVRECDD

SEQ ID NO: 700 - DNA, 18920 bp, DROSOPHILA
attacacttgagaaaccattcagatacttttaacagagagtactttaaataatacctatataaggaattaaaaacaataataacaacaacaattttttggattagagcatagttttgaattagtttaaattagaaataaatggtctttatatttcccgacttccatatatggcgaagaagacttcgagtaaaactattatgatgataagaaatagtaagtttttctaattggcatacgggaagtgaattgtcaattggatgtttcaaaacattttaagtaagatctagaacaagtttctttaaaatgcttaatgttcttaggtggaccgacgatctatataagtgtttcccattaataaggatcattttagagatctgatcatccccagccagttccacaccagctcattgcataatttcaagttccttcatagaactcccatcttgagtagccgtcaatccgctcctgccatggcgactagcaaaaaaaaaacgagcaaacagggaacgagaaaatctaaatggaaacggcaactgccaaaaaccggtagttgaaatacgggtatttgtatatacgtatgactaacccccgaaccactgataagggcagtcatccgaagaatcccagggagcgagcgagacggcagtcgcaacacgtatgtagcacacacgagaggaagcgggaccacaggcagtctgcagaggggcgtggccaagaccagcggttgtgcggtctgaaagaaaccgggttcgggccagtaatcagtcacgacttggtaagcgcgcaggcagcacgtcgtcgtcgtcatcgccaacgggagtcgtgtttttcggttcgatacagataaaacccacgtcgatagccctcgaccgtcgcgtaatattcttagaaagcaaacagctaaagaactatttcaagaactgtgtggcaagtgaagggtagttagtgatacaccggttatatcggagtggcgagaaagtgtggttccggctggacaatatgatggacgtaagcagcatgtacggcaaccacccgcaccaccaccatccacatgccaatgcctacgacggctacagcaccaccaccgcgtcggcggccaacgccagcagctactttgctccgcagcaacaccagccccacctgcagctgcagcagcagcaacagcatcagcatttgcagcagccccagcagcacctcacctacaatggctacgagagcagctccccaggcaactactatccgcagcagcaggcgcagctgacaccaccgcccaccagcagccaccaggtggtgcagcagcaccagcaacagcagcaggcgcagcagcaacagctctatccgcattcgcatctctttagtcccagtgcggcggagtatggcatcaccacgagtacgaccacgggaaatccgggcacgccgctccatcctagtagccactctccggcggactcctactacgaaagtgactcggtgcactcgtactacgctaccgccgcagtggccacagttgctccacccagcaatagctcacctattaccgccgccaatgcaagtgccaccagcaacacacaacaacagcagcaacaggcagcaatcatcagctccgagaacgggatgatgtacaccaacctggactgcatgtatcccacggcccaggctcaggctccggttcacggatatgccggccagatcgaggagaaatacgccgccgtcctgcacgccagctatgcacccggaatggtgctggaggatcaggatccaatgatgcagcaggccacgcagtcgcagatgtggcaccaccagcaacatctggcaggcagctatgccctagatgccatggactcgctaggaatgcacgcccacatgcatcacggcctgccccacggacacctgggcaacttggccaacaatccgcatcagcaacagccacaagtccagcagcaacagcagcagccgcaccagcaaccgcaacatccgcagaaccaatccccagcggcacaccagcagcaccaccagaactccgtgtcgcccaacggtggaatgaatcgccagcagcgcgggggagtgatctccccgggtagctccacttcctcctccacctccgcctcgaatggagcacatcctgccagcacgcaatcaaagtcgccaaatcattccagcagcatccccacctacaagtggatgcaactcaagaggaatgttccaaagcctcaaggtaagttgagctagaaagtaaactcggaatagggtttcaatggttgaaacaggctcaaattactacgtcccgaatgattttattccgtttttctttccttaaataatcgaatttttattcccttctttaagtattttagaattatataataaataaggtaaatataatagaatactgacacaaaaaaatgctcctactgatatattctctaaataaatcagatgaatatatagggttcggttactttaaaaaattgaattctctttatttatttttaacactgatcaagtagtcgtttgatattaaatacctaattaaatgctaattgaaactattgcaaatttatattcgtggacatttcgaatgacgcgagttgtagaggcgtatagtgaaaaggtcttgttgcaaatttagaaccaatagattaacccaagtcgttttatcaagcgctacaattgccttctttccttgtgaatggatacaaatacatttaatttgtgcaatttttattcaagttgttcgcacattcgcaatgtctgcattctaagggcaactaaacgcgtctcattaggcaaagtctctggcaattaagaaaccgcattcttagctaattgccatattttaactcttatagttctctaaactcgtatagttcgctcaatagatcacatatagcttacggaatgtattaagttaatcggacagttattatggaaagaaatacacacacttctatacatacgtatggtgatttttttaagaaaagcataagaaagaacctcaagtaaataccaaaaagcgtaaaacgatgactttcaaaactgattgacaggccaagatacaagaatcagtcaaccagtaaaaccagaagaagatgaataaaactgtgaaagaaatgacgtcgaacgagcagattaaacaatattatgagtacatttataagttagagaacttggccatcaagaatagattgatcataagtatgaacaattagcactgcagaaatattagcaaacataaaacaagtggatgcgtcagacaaaatgtcaagaaagacgtccaaccgagggcatgtcacctaaaaatattcctgtctcttcaaatgccaaagatttcgcccacctctgccctcggctctacagcccccggctacagaatctcgattctccccgacctccacgcccctttccgcctctcataactgtcgccgttctcctggactctcctcctttggcacatttcttgcatatttcagataattttgtcaatgcctgtgcagagtcagtcaggttgttacttgtcacattggcgagtggagttttgtatctcggaattagccagctaagaaaatgtattcgctttgataaaaaagatcagaaaagtccatattgtatgcgataaataaaacgtcgtcgattatccaaaagaagcagctgccactgaaaaaacgagtatttttattgatacttcgtgaattgcataaaattcgagcgtaagcctttaattgcttttcaaagagtttgaggtcagtcgaataaataaataaatagcaactaactgaatgggggggcacaggtgtttatggctcaccctgaaatttgtaatatacgtaattgttggaaaaggttgtagaacaaagttgaggtcgagttttgaatggtttaatttcttgggttaaatatttctattaatacaaaactataccaaagaaaattatataatttaaagcatgtgaccatgctgaaaggtttttccaataaaacaaattgtatttatttgtgaagggattagctccgcatttgttacccacattgccatactccagccatccttccaaacctgttgaccgaattcatttggcctgtgggcctcttctggtaatgcacttaacctgttcatgaatcgagttgcacaactgacgctgatcgctgatatcggagcatcgagcctcggaccacttacagttcaaacgttaatcccccggctacaccaataatcatacaaatatttgcttattaatgctgaaaagtgtcatttacatgcatcgttttcaattaaacgacgccacagaggcccgagtcgaacgcaaccgatccgagatcccagattccagatcccagatcgccgatccaaaatccccacgcgccgcacccaaaaccgaaccttacagctcgaggcccaaatacgagcccaaaagcccctcagatgacgcgtgcaagtggaaccaggcgcttagatggggagcagggtggggcagagaggtgtagattgcacagaaagaaaactaattggttgaaaatatcaattgttgtttcaaaaatagggtattactcgcccacatattgattaactatcatggtagccatccttaggtttattttgtatcaacaaaaagctattttataagattattctagctgggaaattttataattttaattttaagacccaagtagaagttctttagattcgatttcgaatatggtttttctcaatgtgttctaggggcgaccgcaagtcaaacaaacaattaaagcggctgggagatgcagctcgaatccagaatgaaactggctgcatggggcgggggcacaatttggggggcaggggctgctccacggcatgccgaactggaactggaagtcaagttggctgtcagaaaaaatgattatttaaataagagtctctcgtttgagcctcactgcaaccgaactgtcactgagcaatgatctgctgcctcgtggctcccctggaatccctgggatgctgggatgctggggctgcttcttggtttctggatactggatgctgggagacgctgctcgctgtgagcacatgcttgggtccatctgtcatgtcatccattttcaggcagggaaacagcataatcagcaatcgtggttataaatggtagcgttcgacatattggcattcacgcacataccgactggatgtccgctgaccaggccacgattcaaagagttctctaatgtgttaatcagcatttttcagtaaccagaccgagatcggtcgaggttggagcaggaaggaagaaggggcttgctcccattgccatgaagattaatggacatttttacagggatttgtcactgactagaaattggtttaagatacacaaatacacacgtagaactttccactttttcagctaccaatatcaatcaatgcgcgaaatctcgaaaatacttttggcaagattatgatgacacctagataaaactaaaattagccaaagttgaaaaaataaaccgaccaaggaaacgaaaaacttatccatcattcaaacgtcagtgttaaggaatttagaagtctttcgaactaaacgtttgtcccattcaagtggtataagctgacacacagtgtgcgaatgaaaattaactcaaacataatttgtatataatttgttttaaattaagttgtaaaatatttagtatctgttttagttaatttctcaacgtgtatacactcccaccttatctgattatctgctatcttccgaatttctattccttattagcaccaaactaaagtttttacgacctggtatggtgataattttgtttgtttttattagccttttgatgggcgctatcgtaattgaaaagttcccatcgaggcgggttagccttgttgtggttgaacagtttaattaatgcatggcaactggaagttcgctgctttttctgtttctgtttctattcctgttcgtgttatattgttttttaaacgatctaccactttgttcgtgaatttcgcccactcccccgagaggcgggtgggaatttccacacgcgaagctactgcccagaaaatatgaaatatgaaaagagctgacaaaagtgaaggaaactcgaattaacataaatgttgttggaaaaaaagaaacagtcgagaacttttggccaaaaggctgcaaaggtgttagttttctgggccagcagaggttcagcggtcagcggtcaggggtcaggggagtggccaaagagggggcattcgcttggtgtattcaacatttatttgatgtgatgttttgatatttcttgacaccaacacgcgacgcggaccgaagagcgacgaatgtgccacaatgaaaacgaaatgaattaattacgtgcatttcaaaacagaaattggtaagatatataaaccagctagcggcgaccgagaaccccgaaacaaagaccccagcccaaaatgaggcagactatttaaatgaaatgatattgtggatagaaaagtgaccaccaggaatgcgagataacatcaaacgcttgcccaagccctgccgaaccgaaccgcactcaacctaacctaaccgaaccgaactgagagctcgaccgggagccccgcccgcctgtctgtcaccgacgtcgtcatcgtcagtggctggggcctttgctgtggtccgggtcaccagttggttagggatcgcagcgtgagcgaagcgagatctagaacacaacaatgatgaaaatatagaacgatatggtcgatttagtcgactatcagatacctgttacttaactacaggtagtgctaggaagtgggcgtcttctggaaccaacttcatctgcgtttgcatctcgagtttatacagacagacatacggacaaacggacatgccccgaatatatattcctaataattcttttaaatatatggaatttttccttctatccgcctaatctaattatcaaattgtcattcaaaaaattttagaaccatcaatttaacataaggaatctatccaaactgatttagctatttcgaaaatatattttttgtagtcaagccagcagttttattcaaagcaaaatttaaattgcctaaagatttaaaaaccattgtgtaaaatggttagcaacttttttgttaaagcctctcagctctccatcacgctcccatcgctatctttggttttcgttcacctcctccaacctcaaccaaaaacaaaaaactccaatccgggaccaaaaaaatgtatggcatgtgtcgtgacaaattttgttcgctggcgcgcgctgagttaacatttttgaaagcgtattattaaatttctttcccctctcaatgtttctcgttccccttacccgcacacccctcagtaagggctggggggtccaagtgcgagggaaacccccgaatcccaaggagcctagccttggccttagactcttttgaccgatcaacgaatcgatttgttaggcgataagctcgggtcagtacttacaataattaccacttaagtaggacaggaaagggtcagactcggatacaaatccctatcgccctccaaattacttttgctactaaccgaactccgtctgcactgcctccgtgacatttacacacctaaaatgtcagtttccataaggtttgactcgattccaggcgagtttctcgctacaacatgggaagcacattagtccagtccgcgtgacagccaaaggagtttggaagggaagaaactggcagagctgctcccaaaaaaaagaaagacgaaatggtaggggcggcattcgaacttaagttctaatcccgattcaacaagacgtaagcaactattgtgtgattgaactatttttcgttcaatagaaagttattacacttaaagatcaaactatgtctcgaatttgtattttgaaggccaaagagagcttaagggaagtccgttaagtccgtaaagtcttccatcaatttggccgagtttcaacataccctcagtactgtgaggccaaggaaaacgaatacgagtagaaggaaatgaaactgacgtttcgaaactgtgaggcagcccaaccaccgctgcattaaaggatatcccacaagggtgcgcttccccgatgtccttgctggcgcggtgttatgtaatattaagcacaaatatacacactgtgatgatgaggagttgtttgcccgagcggacatttggtgcaaacagtgcgccaaaagcggaggatacggatatcttatctgctgtttgcattcgcttggcgttggcccaaggttctccgttcctccatatccgtatagcatggcgccccgtattccgtttccttagtcgtcgctggccgccttaatacttttcaagtgtataatttagtaaattatataagtatcgcgttacgtgccctgacacaagcccaaacacactcagccccctccacggcgatatcgacgataaatgcggctcaatatctttgggttggccttttgttttccctccttcttctttccgcttgcaaaattgcacaatgtcatcgtagtctttcgactctccagggaactttcgttctgatagggttatcaatgtatggctaattgattgtgatttatttgtggcaagacttttggggttcagctctgtccctaccaaactaaacgctatttttaagtcgatttcctaaaaatataatttacctgaagtggcactgggggtggcagtgaagttgattatcgctggtggaagttgcgaaataagcccaaactgcaaccaaacaaataatcttgccgtgacctaattaatattaattatgctaaacatttgcagctaattatagaattatgtgaatagcaacggtttttgaaatgagacacaagttccgaacaagtctaaaaactcttttttgatagaaaacccacttcactcaaatggattttcgttgtaagcggcgtcggtatacaaaatactttgcgacctaatgaatcatttgacgagacaaacagtagtcggtcaacaatttaagctgttcccgaactgatttgcgttaaaaaaaaagtggccaaaacaatgagacaaatggttggggggcactgaaaacttttgctctgcggtgctctttgaatagttggtcaaaaagctagagcatttagcaattgatctgcgaatcaaagggaccgctctgagccgcagagctctacaattgcctcgatttcccagtgtgcgccggtgtgcgaaggtgatttcattccaataataattctctccgtaccaccgaatagtagataaaatggtaagcgaaagctgtcaatttgaagtcccattgtcgatttcgattattgttcccaattttactgctctcgcctcgaactccgttcgacgatacgagtagggaaggtgtccaccactcccaactcccgatcccaccgatctgacctaacatagcgccgataacgacaatggacggcggacgtcgggcggctttaaagtggacactctagtggccagaaaggtattagccatgcacgcctgaacttcaacttggctgcgagttgatttatttagttttcatttcggccgctgatggatgtatcctatctatctttaggcccggccactagggacagaagggtggtatcagggtattaactgtacgaccccatacgggcttagtttagattgaaaagatttgattcaatgattgagaattgatggtgagcaaaaagaattaaagcgttgtgggaattaggtactcaactattgatttacatgacatgctccataattaactcacgggtagtgcgacatatgtattaagtatgcactcataaaagtacattaaattaaaaaaaaaaaattccatcttaataacatttttaaaatagtacattttacagttaaattcattttgcactatacctttgaataaacagagtactttgaaccacatgattcatgagttcattccctagcgactcctaagcctcgcaacactcgcctatgacagttgcaatccaaggacaagcagaaaataacaccaaatattaaaatctcaactttgtaagaacagctaagcaaaaaatacacagaaaaggaaggaaaaatgatttattatagagaaattatctcatgtaaacaagtcaagtcagttggcagttcggctaatgccacttgtctctccgcaggccacaaaaccaacgcccaccccttcgcaccagtcggttaaatttgttaatttgtctaatgaaaatttatacacactaatacacttatacactttgtggggcctcggaaaatctaaagtaaacccgaggcctatgagccaagtcccagatatacgggccgaattgaaagcgacggcctgaagtctgaggctcggcgtcttgtctgcacgaatttccacggcggccacgaagattgatgatgacattagcatcattgtcgaaaatatttcgttaagccagcgaaaggaccaaaagcagcaaccttttcttgccaaccacttgagaggcaaaatgttctgaaatttgttttgttgacattttaatttgcaaatacttggtgtgtgcgaatatagacatggcagcgtgtgcgaacgaatgaagcattaattgaattaaatcatcaaaaagtggtggacggaataggggtcctgcggtgtaggttggggggggggggtgttcctggacgggaaccaggggccatgtcaagtggagccactcaaagtgttgactgtcggccacacgcacacgcagctggagtatatagaaatacatacatatgcatgaaatacatgtatatgaaatacatacatatgtatgtattcagtgccattctgggccagcccagttacaacatatatatttttttttttggcatttggcagccattttcatttcagccttttttcttcctccttttcttagaccctatcaaacacccttattttgctcatttcaacggctctatatatgtaagtgtgtacgatgtaatcgtgtacgaatacaaaaagggaaactatgaacatccacatctgcacatgtgttcgtgcattttcgtttggtgatccgtcatcttgtcagaatgtattattcgaattaagattttacttttttcgctgctgccattgaattgaattaacaacacaagaccgagagagcagctgtagctcgcacaaatgaaaacccaacccccttccattttcgcccaccccctggaatcggtaatttctctacttactcacttctatttctgttcacaccaaacactttctagtccaaacttaaaaatccccaccaacaatgttcacccaaagaaaacgcttttagtcggaaatgtggagttgtcactgctatcggctggggactaagaaagccacttcagccaattatcgccaaaaccggcatagataatctagcaaataattgtcacacaaaaaaagacttaaatcacacaggaagtactcattctacaacaggtgatacaaatatttcaaatgtatttaaccctcaaatagatgcacaaaaaaagtcatttaaaacaaaaccactttgcattttagggttagtttttgatataagtatccactatgatccacgttataaaccataaactattcccactttgcatgccatccaagtttgttcttaacatttggttataaccctctagcatataatcccaaccatataacaatcgcctcaatagaacatgcctattttaattttctccctcaaacgcactccaggtcgcctatgttgggcaatttcttatcggcaaaaaagtatttagtacaaataatgtcgataactttgattttcgggtctatcggatggctaccggaattcagcgtaatctatagaatggaaaacacaagtagaacaaacagaaaacagtagccaaaacgttgctattaagataacacaaatatgtgcattcgagtatctgtgtaaatatttaaatcgagtttagtgttgtcttgtgtgcgacgacgacataattttccaaaaggtaaacacacgattgagatgttcgataagcgagtgaaaacttcttccggggcgacacgagagacagttaacaagattaggaaaatgtgctcgggcgccagttaagacattttccaattccaattccccacggagggttaatttatctgactcagacaaggcccattgctttcgttttggctgtctttcgaataccccaaaccctttttcgaacaattttcatgtgtgttagacatcgtgactaataagccgcgggatgtctgctatgctcatacaaaactttcaattaagctggaaaactttacctcacctctgtgggctgtagcaacgtgttgtacattttttggggaacgatgatctgtagatacatttatgagaattcggtttttgtgcatttcacgattcgtgttcgaaatgtagataccacgatacgactgcatcatcgcatgacatgtggaaaaagtcacgggttgacagacggccaataaaactgacagaatgaatggacatggctcgtggattttcgtattttcgacgggattatgccagtttagtcaagtcagagtccgagggtcctaacttcggacctcggaatgccaaagagtgttgactgtgcctaattagctgggtcaaccctcccccgaaaagggttactggctgagattgccaactcaattagtgccgtctgacctccggtcagtctgaccagcgagttgaacatctgtcccgtccaataaggcctccgtttattgcaaaatattatggtctatattggctcttacgcttccttgcgatggcgaccataaattacccgcaggtgatcaatcatttcgtcaccaaagccaccgatcgtcagcgtttttggtcagcttttcgtgcacttttatggccccagattagagcagattctcaaaacttttgccacatgacgttgacgttgttgttgattttgatgttgatgttggtgttgtgtttaatcaacaattaaaacaatttacttttaattgaaatataattttctatttgcactcgagttaaatattattatcaattgagccgctgcggcggccagacgccgttccacgcactcgtccgttcgacgggctcggtcgcaggcccacttaatcgcccccaaacggaccccatgtaatgccacccggatcacagactgccagcgagtgtgtgaatgtggccgagtggggatctccgtaaagtggcagtggcgcctgcataatagaagtgataatatcattatatcatatcaaaatggccgttcaacggcggatgactcacgtcccggggaactgtactgtggcgtggaattcaaggacagagagtagactacggcgattaaaattatgtgggaaatagataaaaactagcctacgacgggcaattcaatattccagtaaaagagtacaaggtgatcttaatagaggtccaaatccgaattactttggcttttttaaggtttttgttagatttgtttcggtattttctcattcatctttttatacacatttctttcccaaaatctacattaataagtctaagatttctctgtatgtcacttttattatgaataactcgcttaacttggcgaggacaatccaggttgattgttggtctttcacggattttcctcaatcattttttcacacgagagaacattgtgatgaacaggaagaaatgcgagtgtcaacaacaatcgtttgactgcgttaagcctgcaattgtaattaccgctagttgagatgttatcaagttacagtgacttcgggtggcgccccacgctactgcagttaccctccattccccacccgactcatccgccctgcactaaattctgctgcagcgactgtggtgtttacattgattgtcaacagtgtcacctaagcgccatggtgccagcccccaacgtcccacccaccccctcaagatggccttcagcagggaggagcggggtgtatgcctcggagtttccctactttccaccgctccagccaccgcgctcctcgccgcaaccaccactcggagcaccgaagtggaagcgatccccgataatgctctctaaaactaatattacaaagtagatatgggttggcgccggacaaaagcgacagtgccgccaactggccgcgacatgtttgacaacccgagcgacaccagcatcgagcgaggcagccctgccactagcggaggccgcaccgtgccacagtgaagcaggagatgcgaaggggacaagacttggggttttacgcttaagtttaagaataaagtaaaaggtgaaatgctagcttcgataactgtaggatttctgacaaaaaaaataaataaataaaaaaataattttataaagtgtacacatataatatatattacatatatatctgcattttattacaacttgttaatcactacaataagcatctcaagcgcacatgcttctcaagaaaagctgagaaaataaccaaataatgttcgtaatttaagtggtaataaaaaagcatcaaaggtataagtttttcctcgaaggaagagaacttctgcatcactcccatttatccatcttgtcacacgcgctcgtggaagcaaggagaaggaatagatttgcatgccccaaaacttcacatccatgaataacttactaaccactcccacaccactgtgcggcgattggcggcggcatattgacagcctaaccggaatgcagtagtaactcgcaactgtcacagtctgtgctgctgttactgctaccgtgatgtgaatgcgaatgtgaatgtgaatgtggatggtgattatgattgtgactgtgactgtgtttgcttagtttgtttgcccgcgagcgggaaattcaaatgcagcccaagccactcggcacggtaatcctggggcttgttttcttagacattcctgtttgcattacgataggagatgtgtagagcccagttcgagttcgagttcgagtttccagccggaccgggctgggcacttatcgatcgatccgcaaacagctcccaaatccccgaaaggtgcgtgcgagctactgtgcggatactgcgactggatgccaatttgggtgccggtagcactcggaggagcagtcataaattcatcactcattcggccagcccagtaaaatgtatttattgcccgtggcttctggtttgatttatagcactcgcagcggccaattgactaaaaactgttaagccaactcgataactaaacgggatcgggcattccatactaatatggccaccaatcggcaccttttgacttgatcgtcgtcatcatcatcatcgtagcatgaggaaaccctcgaggttggtgggtgatggtcgcataatgaccattaattggatggtgctatagaaaagttccttaagatttatgattgtgctaaaaggttttttatgagcttccagggccaacgatttatgtaccccaccacaccacactccataaattaagccacaagcttaaacgttttatataagctagtttagttgcacgtaatctattctttaaattttccataaccttcttatatagcgcatttcgtttataaaacagaaaagatttttaagaacttgcaattatccgctttcccaacgagtcaagaccaaatttccggggtatcatagggtctcaggtccgaggcgaacctacaaatataatcattcttgacccgcctacgaatcgaagagagagctaatatcagaatcacagatccagagatacacaagcaaccgaatgcccgctgtcaggataatcccaatattttcaaacaaacctattgagcgcattaaatccttctatggaaaagcaaacggccaaaaggaattattttcatcatcgtcggcttagccacggggcgcatgtcaaattatgaataaaatgcaaaatcacgcaaacaagccaaaagtcaaacggaaaggagagagttcttggctagagggagggagagcgacttggggtagatgagctggcgaggatttgaactctcacaatgattagctgcgacagctaaggatcagcgttagggatcggcctcctaacctgaacctcactaccttggccatggaaccacaacaaagaagaggacaaaactcaatattacacggaagaaaataatatactcgtattgtgttcaggatattataaactaacagtactaaagtttgataaacgattgtaagatctagtattacatttttagatgatttacttaatagcttgatacattctgccgagttaaaaaaggaaaactattccttgattgatcttaccccttagtgcattactctcaactgaatatctatttccatttaatagctttatggtacaaattttgcacagtgtgcttgacaaccctctttcttaccttccagcaccgaaactacctgccagtggaatcgccagcatgcacgactaccagatgaatggacagctggacatgtgccgcggtggaggaggcgggggcagcggcgtcgggaacggtcccgtgggcgttgggggcaacggatcccccgggatcggaggcgtcctttccgtgcagaactccctgataatggcgaacagtgcggcggcggcgggaagtgcccatcccaacggcatgggcgtgggtctgggcagcggatccggactgagcagctgcagcctctccagcaacaccaacaactccggccggacgaacttcaccaacaagcagctgaccgagctggaaaaagagttccacttcaatcgctacttgacgcgggcgcgccgcattgaaatcgccaatacgttgcagcttaatgaaacgcaggtgagaaagaaattatttaagagtatatttgatagcgtaatttattaattacacctcaaattgtttaattgttaagcccatttagaagaatcatagattaaaccttttaatgtttaaaactgggtttagtttcagttttgttagtctatttagtctataattacgtacccatatactttaaattgtttattaataaaaatattatgctcaacttggctataacttgttttcccctttgcttgcaggtcaaaatctggttccagaaccgccgcatgaagcagaagaagcgcgtgaaggagggcctcattccggcggacatcctgacgcagcactccacgtccgtgatcagcgagaagccgccgcagcagcagcagccacagccgccggagctgcagttgaagtcgcagggcagcgatctgggcgggaatgagctggccacaggagcaccttcgacacccacgacagccatgacactgacagcacccacgagcaagcaaagttgaagggctttcttcgatgttggttgtaattgttatgctattgttgtttctgccgccaaaatattgacgcatttcgttgtgataaaatagtagaaagtgcagagaggaaataatacatacaaattatacacacacacatagcaaattgaaatccgtaatcaaacgctagcaactagtggaatctaggagtctaggtgccatattcattcacgtaggggctgtaaatacttactcttacatttcgcattgccgcagctgaagtttttggactagcttaaactgaactcagggttaaattaaaatgtaacttacttaaacgcacgcagagcaattgacaaaatactgatgcaaacagaatcaaaacagaaatcgaaaatctaaatcttaactatttaaaactttccaataactatagctagtagaacccctagttatgtatattccacccgccaccacaactcgtctgtagtattattagctaagttctagaatgcccaagttattcgttttgtgcttaaaagtaatcggtaaatcttgatgtaaatcaacgtctgtatatttaatctagtcctaattgtaatataattataactatacaccacttgtatgaataaacaataaacgaagcccgattgcaaattgttaataaacaatgtggacaagttattgcgagtgtgggcgggcattacagacatactacagtatctctgatgaattgtggacgtacaagtagtatgtatttatttttgctgatctccgagttgcaagtactcactcctccgataagaaaaataacattcgactggggatttctactggaaacggcagccccccaaacaaacccaaccaaatactgcatatgatatcttgattaattgcagagcgagacccatggtcgaaataccatatgcaaatctatcattttatggacagacatggctgggggattaggttattttttcaaatttatcacatgtttgtgaaaatgtgatttttttggggatttattgaactttttgcaacaggaaagctagctaggcaggaaattcatcaaactccttttaccaaagcggttttgcatacggttgatagatagggttttaagaccccattattatagattgtaagaaacctgaaatcgaaacgagactccattctactgttttcgttgcgtgtgattcatgattaagacagtaaatagttgcaatgttcaaaatgataacgaatactagcttatttgccttttaaactaccaaataaaatattactagggaaaggaaggaaaggtctcaacaaccaatatttcaagaaatttcacattcgaaaaaaattcacgatatgtaagttatttattcttatttaaatttattatttatttataccaaaaaaatagatttgagaacaaagcacaaagctgtggaaaaagtgaagttggcaaaagaaaaaaaaagtttatattttcctggggtgccaaagaagtcacttctgattctatttagcaattaaaaaacaatgtgtgtagatagttttttttggtgcaaaacagcctcgaaacatagacttttttccaatgactgtgttaattacagcaataaaacttactcgccgacgaagatgctttgatttttgataaacctacataac

SEQ ID NO: 701 - DNA, 2531 bp, DROSOPHILA
atgatggacgtaagcagcatgtacggcaaccacccgcaccaccaccatccacatgccaatgcctacgacggctacagcaccaccaccgcgtcggcggccaacgccagcagctactttgctccgcagcaacaccagccccacctgcagctgcagcagcagcaacagcatcagcatttgcagcagccccagcagcacctcacctacaatggctacgagagcagctccccaggcaactactatccgcagcagcaggcgcagctgacaccaccgcccaccagcagccaccaggtggtgcagcagcaccagcaacagcagcaggcgcagcagcaacagctctatccgcattcgcatctctttagtcccagtgcggcggagtatggcatcaccacgagtacgaccacgggaaatccgggcacgccgctccatcctagtagccactctccggcggactcctactacgaaagtgactcggtgcactcgtactacgctaccgccgcagtggccacagttgctccacccagcaatagctcacctattaccgccgccaatgcaagtgccaccagcaacacacaacaacagcagcaacaggcagcaatcatcagctccgagaacgggatgatgtacaccaacctggactgcatgtatcccacggcccaggctcaggctccggttcacggatatgccggccagatcgaggagaaatacgccgccgtcctgcacgccagctatgcacccggaatggtgctggaggatcaggatccaatgatgcagcaggccacgcagtcgcagatgtggcaccaccagcaacatctggcaggcagctatgccctagatgccatggactcgctaggaatgcacgcccacatgcatcacggcctgccccacggacacctgggcaacttggccaacaatccgcatcagcaacagccacaagtccagcagcaacagcagcagccgcaccagcaaccgcaacatccgcagaaccaatccccagcggcacaccagcagcaccaccagaactccgtgtcgcccaacggtggaatgaatcgccagcagcgcgggggagtgatctccccgggtagctccacttcctcctccacctccgcctcgaatggagcacatcctgccagcacgcaatcaaagtcgccaaatcattccagcagcatccccacctacaagtggatgcaactcaagaggaatgttccaaagcctcaagcaccgaaactacctgccagtggaatcgccagcatgcacgactaccagatgaatggacagctggacatgtgccgcggtggaggaggcgggggcagcggcgtcgggaacggtcccgtgggcgttgggggcaacggatcccccgggatcggaggcgtcctttccgtgcagaactccctgataatggcgaacagtgcggcggcggcgggaagtgcccatcccaacggcatgggcgtgggtctgggcagcggatccggactgagcagctgcagcctctccagcaacaccaacaactccggccggacgaacttcaccaacaagcagctgaccgagctggaaaaagagttccacttcaatcgctacttgacgcgggcgcgccgcattgaaatcgccaatacgttgcagcttaatgaaacgcaggtcaaaatctggttccagaaccgccgcatgaagcagaagaagcgcgtgaaggagggcctcattccggcggacatcctgacgcagcactccacgtccgtgatcagcgagaagccgccgcagcagcagcagccacagccgccggagctgcagttgaagtcgcagggcagcgatctgggcgggaatgagctggccacaggagcaccttcgacacccacgacagccatgacactgacagcacccacgagcaagcaaagttgaagggctttcttcgatgttggttgtaattgttatgctattgttgtttctgccgccaaaatattgacgcatttcgttgtgataaaatagtagaaagtgcagagaggaaataatacatacaaattatacacacacacatagcaaattgaaatccgtaatcaaacgctagcaactagtggaatctaggagtctaggtgccatattcattcacgtaggggctgtaaatacttactcttacatttcgcattgccgcagctgaagtttttggactagcttaaactgaactcagggttaaattaaaatgtaacttacttaaacgcacgcagagcaattgacaaaatactgatgcaaacagaatcaaaacagaaatcgaaaatctaaatcttaactatttaaaactttccaataactatagctagtagaacccctagttatgtatattccacccgccaccacaactcgtctgtagtattattagctaagttctagaatgcccaagttattcgttttgtgcttaaaagtaatcggtaaatcttgatgtaaatcaacgtctgtatatttaatctagtcctaattgtaatataattataactatacaccacttgtatgaataaacaataaacgaagcccgattgcaaattgtt

SEQ ID NO: 702 - protein, 629 aa, DROSOPHILA
MMDVSSMYGNHPHHHHPHANAYDGYSTTTASAANASSYFAPQQHQPHLQLQQQQQHQHLQQPQQHLTYNGYESSSPGNYYPQQQAQLTPPPTSSHQVVQQHQQQQQAQQQQLYPHSHLFSPSAAEYGITTSTTTGNPGTPLHPSSHSPADSYYESDSVHSYYATAAVATVAPPSNSSPITAANASATSNTQQQQQQAAIISSENGMMYTNLDCMYPTAQAQAPVHGYAGQIEEKYAAVLHASYAPGMVLEDQDPMMQQATQSQMWHHQQHLAGSYALDAMDSLGMHAHMHHGLPHGHLGNLANNPHQQQPQVQQQQQQPHQQPQHPQNQSPAAHQQHHQNSVSPNGGMNRQQRGGVISPGSSTSSSTSASNGAHPASTQSKSPNHSSSIPTYKWMQLKRNVPKPQAPKLPASGIASMHDYQMNGQLDMCRGGGGGGSGVGNGPVGVGGNGSPGIGGVLSVQNSLIMANSAAAAGSAHPNGMGVGLGSGSGLSSCSLSSNTNNSGRTNFTNKQLTELEKEFHFNRYLTRARRIEIANTLQLNETQVKIWFQNRRMKQKKRVKEGLIPADILTQHSTSVISEKPPQQQQPQPPELQLKSQGSDLGGNELATGAPSTPTTAMTLTAPTSKQS

SEQ ID NO: 703 - DNA, 3410 bp, DROSOPHILA
cactgaggcaggcaccaatacaggcttagcgtaattgtaaaaaaatgccacttccattatccatcgtttttttttatcattttcgtgagtcaatcgatggacaaagattgcggtatttctcttccggcttcaagtttaccgttagccaattgcgactctcttttctttgcacatttcactaatcagtggacatttctgatttgattggatcagaattttcattttgatttcgttttgagctggggtttccaggaaaattccttagcacttgcacacacgcacacacgctcaggttttcgaaagcctacgtttttccattttcggaaacttactgctcgccaaatgcgcttggtgggcggcgacttaattagccagccctcgtagaaagtgcgatccattattttgcagcgctcgacgcaatttacttcgatttatttcactccactccgcgcacaccaactagaggtgggcctcacgcttgcgatagatcttccgaggcaatatcgaataagtattcgataggcttaagctaagtctaagatatatcgaaataaaagatgcgaacgcttatattcggcggaaagttattattatttatatatttgtttggtgtaagccccattgcttcaaaacttgaacttagtgtaatataccgtttgcttcaaattgttttagattagtgtgaccgtagttgacattacccaacactggcactatttataattttgagttgtaaaaattaagtatttacaatcttgtaaaaaacaaaacaaaaccttttttggttgccatatgaaacgtgttcaatctagtattttaaaaataagtccacaaatagcccatataaaatatgtatacatatttcaaaaaacacaagtatttctttgtttgaaaacaagaatttgcagataacataagtatttacctaataaatcagcataataaatccaaacaaaagctaataactaaaatcttaaaaactttaaatgcaaacgaagtatagttttacaaatacgttttattctgccgtgtcaagcgtatgcctagaacatacagattatccatgtagaatagcaatttcttccacgacgccgcacagcagagcacgaccactacccagatctcaggcggaacctgcgccacgccggaatcctgctgcagccagagcttacttgtccttgctgtcgcccttgccaccacggatcctaccggtacgacgggcagcgatgagaccgaccttgcgaccggcggatgtgcctcgcttgacggtggaggccttaccaatgtgctgatggttaccaccaccgtgaggatgctccacggggttcatggccacaccacgcaccttaggccagctgttgcgcttcaccttgtacttgtggtaggcacgaccggccttcaggatgggcttgtcgatacgaccgccgccggcgacgatgccaaccatggcgcggttggccgagggcacgaccttcttggcgccggatggcagcttgacacgcgtcttcttggtgtcctggttgtgggcaatcacggtggcgtagttgccagaggtgcgggccaaacggccgcgatcaccggtcttctcctccaggttgcagatgatggtaccctcgggcatctggctgaggggcatcacgttgccgatctgaagggtggccttgcggccgcagtacacgaactggccggtgtgcatgccctcgggggcgatgaacagctccttgcggatcttgtagcggtaggggtcgcggaagtggacgacggccagaggagcgccacggccgggatcgtggatgatgtcctgaaacatggaagaagtacgattcgcttagttacacttcaaaagcagttaagccaagtgagctaagtaacttctagtaagctggcacaggtgctcaagcacgtctcttgaatgtggcatggccaaatgcaagtgatctcatccacattaaacggataggtgtagttggtgatcctaggagcacgttactcaccttgacaactccgcggatgtagccggaacgctcggcgaagtccagggaacgcagcttggcggctcccttgcgcttcttcacgtgcgccttgaacacggaaccagctcccttacgctgtgcacgaataacgcgacccattgctgcaagacaaattcacgggattagtactcgaactccatattgcaaatgcggcggtttcactaaataagatggccatcttcaatgcaacacgctacggaatttcgatcttattcgaatattttgacggaaaattgaaatattccatgttacacggttataatgttaaattgcgcactgtaaacaatttccgcaattgaaaacaccaccaaatttacaaaatttagcacgtggcttaccgtaaaattaaaattgcccaatacgaccactccggaaacggggcgaaaagaaaagaaaagaggaagacatcctagaggtgggcagggaatagtgtggctgtgtttggcgtctggcgtcgtgactaacgtgctgctggggaaagagctgtttctcactgctattttgggtattcgcgaaattgttaatttgctaataataataaataaaataataaaatttatcatattaaatcttcaaattcagttttcggaagttttactaatcagtagctcacttgcccagaaaatttggtttgatttcaatcttcgcaaggtcaatttcgctgaaatctgctttacctaatcgaaacgtttctaaactggataattttaatataagttaatcgattttatatatgtatataataattcaattagatgtatgaataattcgagttgagctggaaagttgtgtcgagcacttgccaattggatgagaagtgaaaaaggcgacccaatcagaaataaaatagagagtgaaaagaaaccagtggaaatattccgaagccgaaagatattttggactatgctatgcgttccactggcgtacatttttagacgtctttatttaacacatctaatcttcgaccatacatatcttattcttatattccaattctgattattatataactttaataggaaatgactcaacgatttgtgttaccctatgaaataaaatattaaatatgttaatattttttattttcccagcctcttttttctaattggaattagtaaatgtctataatctaatttattgattacagttgcaaatttgttaatttgctattctgaaagagaagaatatacgggcacacgaattggccttttacggctcgatatgtttgcggtatgtgcgcagaaatgagaacggtaatcgcggggtatttttcagttcgcgatggaataagctgccatcggctaattggtcacactgttggaatccgtcggggttttggcgtcgcgtaaaacggaaaaccgttctgattttcactga

SEQ ID NO: 704 - DNA, 980 bp, DROSOPHILA
gtttccggagtggtcgtattgggcaattttaattttacgcaatgggtcgcgttattcgtgcacagcgtaagggagctggttccgtgttcaaggcgcacgtgaagaagcgcaagggagccgccaagctgcgttccctggacttcgccgagcgttccggctacatccgcggagttgtcaaggacatcatccacgatcccggccgtggcgctcctctggccgtcgtccacttccgcgacccctaccgctacaagatccgcaaggagctgttcatcgcccccgagggcatgcacaccggccagttcgtgtactgcggccgcaaggccacccttcagatcggcaacgtgatgcccctcagccagatgcccgagggtaccatcatctgcaacctggaggagaagaccggtgatcgcggccgtttggcccgcacctctggcaactacgccaccgtgattgcccacaaccaggacaccaagaagacgcgtgtcaagctgccatccggcgccaagaaggtcgtgccctcggccaaccgcgccatggttggcatcgtcgccggcggcggtcgtatcgacaagcccatcctgaaggccggtcgtgcctaccacaagtacaaggtgaagcgcaacagctggcctaaggtgcgtggtgtggccatgaaccccgtggagcatcctcacggtggtggtaaccatcagcacattggtaaggcctccaccgtcaagcgaggcacatccgccggtcgcaaggtcggtctcatcgctgcccgtcgtaccggtaggatccgtggtggcaagggcgacagcaaggacaagtaagctctggctgcagcaggattccggcgtggcgcaggttccgcctgagatctgggtagtggtcgtgctctgctgtgcggcgtcgtggaagaaattgctattctacatggataatctgtatgttctaggcatacgcttgacacggcagaataaaacgtatttgtaaaacta

SEQ ID NO: 705 - protein, 256 aa, DROSOPHILA
MGRVIRAQRKGAGSVFKAHVKKRKGAAKLRSLDFAERSGYIRGVVKDIIHDPGRGAPLAVVHFRDPYRYKIRKELFIAPEGMHTGQFVYCGRKATLQIGNVMPLSQMPEGTIICNLEEKTGDRGRLARTSGNYATVIAHNQDTKKTRVKLPSGAKKVVPSANRAMVGIVAGGGRIDKPILKAGRAYHKYKVKRNSWPKVRGVAMNPVEHPHGGGNHQHIGKASTVKRGTSAGRKVGLIAARRTGRIRGGKGDSKDK

SEQ ID NO: 706 - DNA, 3134 bp, DROSOPHILA
agccccataattcgtggagcaaacaacaaaagaaaaatgtggacattgttgtacacacaggcagagtcacgcacacagacgaacccactcgctcgctcgctcgcagctaaagtttgagttcgcgtggtgccttgcacattgtttataaactttaagggcagccaacgtggagggggcactaaaaaaacacaccccactttagcgggcacaatttgttttcaggttttcaactgcacatttaacgcgtgtaaaactttttgcgtttggggcccactctcacacatacaggcgcaacacagcacacacacgttcaatcgaatttttcacatacgttttaaggacgttgctcctcggagattgcctaatttttgcgtttttcagatgactctgtacccagtctatctaaatttctggttttcagatactagaatatgcgtgcaatttgcggatttggacagattttggacccgaaaaaaaactaatgcggatccagtgtgaccaccgctcgaccgttcaaatataccatgggaattcacggcttaagttagggatgtgatggtctccgcgtgactcgagcttggttttaaaaaatgtgatactctgcaagttgtttatatgtatggatttcatgaattatttatgtgttgtaataataaacgtgtttcttacacaatttaattgctcagcaattctacttttcttttttgattgcttatattttatattatatttttgattgcttaattactaaaattattatatgtttaaaaaacttgtttctattttcatagtttttaatttttatacttatattttataacttatagaaatttcttgaaaaccctaaaaatgacatgagtttgttatttattgctatgttataaaataattagaaaccattacagcaaatatcgttaatttgtttactagtgatagagtgtggtaacactagcatttccgtccacacaatgttaaggtcacactcagaagctgcaaatttcgaatttcgacggtcgctatgagtggagctctcggagatgtggtgtccgaatacctggagcgcggcccagtgctcgtggtggcggacctccttagcctgataacggtctcgtcctgcctggtgatcaaggttccgcagataaacacgatacgggcgaacgagtcctcgaaaggtgagcaccgcccacacaacatctgcaacctatcctcccactcatatgatacggatttatgaattaggcatcagtgttttgggactgtgcctggagctgttcagttatacggtgatgttgtcgtacaactacaccagtggctacgacttcctctcgtacatggagtatcctgttttgctgctgcaggagtacgccctgatttactacgccttcaagtaccaggatctgctgggaaggaggacgcaagtggtggccatactgtatagtatagtggccactctcatatacatgaagctctttcccattatcatccttaagttcctggtggtgagtaagcctgtattgatatcacctagtgactgattagtcgggtattcttgcccagataacgacttcggcgcagttcaaacccgttccccgctctcttttccaattaactaattatgtttccgggcaaacgggtttggtttgatttgttatttgttttagtttgaaaaggcggtgctcttaactgggcagcatcttcgctcaaggtcaccgatgtttgttgtataatatttgagcggctattaatactttcagtgctcgggcaatatatataaatctcgtgaaattcatctaaatgtttgatttcccgtcagcctttctgcactcccattggagccacgagtaaggtcctccagctgctggctattctgaggaccaaggatgccagttccgtcagtagaaccacatgggcgctctccgcctttacaaacatgagtgagatcacatcttgcattccatcacttgatgtcatcaattaacacatcatatatgtatcccttacagctcgaatctacacggtgttcttccagtcccacgattggatgttgctatcaaacttcctgatttcgacgttccttagcgcctccgttttcaccgccgcttgcgtctacaagaagaaggccaaggcggagtaattggccagcctgattagaaaagctcaacatagacaaacactgcgctggctggaaatgcttatcagtcattgttttaattctatttgcttatctgtttaaattgatattacaaattcttgtttgaatcggttgttgttactcgtttaactgtccgcgtagaaagccaccacaattgcacccacaactgttagaatggatactgcatagattgctctacgttgccaatcgatcttggtcttggccggtccagaacccacagttttgcgctccttgtgcttgcgtttgccgaacttggcctcgaacttctcgagttccaggcggtttctttcttcctcgtcgcgacgcttttgttccagctgcagttgctctgccgcctggacgcgaatttgctccgccttgcagttcgagtcgcaatccaagaatgtctgaccagcacggtgtttgtcacaggcaatctcctgcttgagtcgcttgcaggcgcagaaaatgcgaaccttcttgcggcacaactcgggatttgggcacttgcctgtgtggcagatggctgtgcagcgatgtccgcaaggatactgaaaaaatatatatatcactgtaaggcttgatcgacaatggtatattacagcacttacattcttcaagcatcgattaccgcagctccgtagcttttctcttcgctcgatgatctcctggaccgatcccgtttcatcataatactcgttgcacttgtaaaccaactggttgagtccacagtgacacttggtcttaatcacaaagttgcagggcgcacagggcggtggatgacatcctttgggacaggcgtgaatacatccggttggtcggggaacggtgcaaccctcctcgcagttggcacagccagtttgcgcagacatatcctggggaagcggtacgaaatggcaaaccaatgaacacttgtgattgccgcacttaagctgacgtgcacacgatcgctgacaggaagtgggtttggagttccagcatg

SEQ ID NO: 707 - DNA, 567 bp, DROSOPHILA
cgaatttcgacggtcgctatgagtggagctctcggagatgtggtgtccgaatacctggagcgcggcccagtgctcgtggtggcggacctccttagcctgataacggtctcgtcctgcctggtgatcaaggttccgcagataaacacgatacgggcgaacgagtcctcgaaaggcatcagtgttttgggactgtgcctggagctgttcagttatacggtgatgttgtcgtacaactacaccagtggctacgacttcctctcgtacatggagtatcctgttttgctgctgcaggagtacgccctgatttactacgccttcaagtaccaggatctgctgggaaggaggacgcaagtggtggccatactgtatagtatagtggccactctcatatacatgaagctctttcccattatcatccttaagttcctggtggtgactcgaatctacacggtgttcttccagtcccacgattggatgttgctatcaaacttcctgatttcgacgttccttagcgcctccgttttcaccgccgcttgcgtctacaagaagaaggccaaggcggagtaa

SEQ ID NO: 708 - protein, 182 aa, DROSOPHILA
MSGALGDVVSEYLERGPVLVVADLLSLITVSSCLVIKVPQINTIRANESSKGISVLGLCLELFSYTVMLSYNYTSGYDFLSYMEYPVLLLQEYALIYYAFKYQDLLGRRTQVVAILYSIVATLIYMKLFPIIILKFLVVTRIYTVFFQSHDWMLLSNFLISTFLSASVFTAACVYKKKAKAE

SEQ ID NO: 709 - DNA, 2258 bp, DROSOPHILA
tcggccttgcgcttccgctcttttcgcttctccttgcggtgttccttgtagcgatcctcctcctccttggcctcccgcaggcggcgctcgagctcgtagtctttctgcttctcctccatcttcttcttgttctgctggaagcgctcctttacctggtcgacggtgctccgctccaccttcatggacatgcccagattgcgctggtgcttcttgccattgatgtggtccagaaagttgatggaatccttgaccacgcagtcgcaaacgttgcagtaatagccaccggattgcgaggtgggtgtgttcttgttgatgacaacgctcttgcccagcttgctgtccaggtccaccttatagtcgcgtcgcttgaggttctcccgctgtacgggttctggtgaaaaacaaaaagacttttattatgtgtgccttccagggaatttagacactgaccttcttccttgggtgccacctggttgagcagccgctccgccgccagcttctcgtactcgttcttgtcccatttccttcggtggtcatcaggtcgcatcgtcatggtggcgctgggatgacaattgcactaaaatctattcggtaaaagtaaggcaatgaaaatttgtaaatatttttgttagcgatgcggcggtttgcgtctgagctaagattttggacagggatgacaacttgatatttttttttaaatgttatcgatggaaccagaaggcggatgtgaaaatgtaaaagcagttgttaattttaatttaaaaaaattgtatttaaagtttaaattaaagcttatttaatagcatataagtccgaatctgtatacacaaaaaaatggacctaattttggacatcgacgataaccacaggtaggtaaaataatcgatgtgcgataaatattgatttttcgtatacagcagttaggaaaaaaacggtaggttgcaataaataccgtaaaatctgggaaattattgtattttaaagtttcatagccaaaaaaatgggtgccgctttctttcccgtgctgtttttcaccgccttgtggggcggtgtgggcatcgccatgcccataatgacccccaaaggacctcaccagaatctgatccgctgcatcctgatgctgaccgccgcctgctgctggctcttctggctatgttgctacatggcccaaatgaatcccttgatcgggcccaaactaaagcgcgatgtggtggccatgattggaaggtcctggaacaacccaattgtggctggttaggaaaatagagtgactgctaactaaattattctgcaataatcgtcacattagctgtttgttttacgttgtaaataagaagtaaaaatatcaagtgttctgttaacttcgaattgtttaaatatcagatattcaataataaattaaatatttagattgccttgtaaataaaatctataggcatcaactagtacatctgcagaatactattattgtttcaaaccaaatattctttctaccaatataaattgtataaatgaagacagtttgaataataggtctatttaattttttgaataatttaagttaaattaatattctttagttaattaatggctaccacacagttatgctgaataaattccaaaaacaagaaagtattttgacattccaaacaaaaagacaaccaacttttcctttctgtttgcacatattcatattttaattctctttataactactgcagtcagtagctggtccacaatagaaatgccttccctgtccatttgaataacagaagaataacgatacttttgctgataagcgcagagcgaagagaaagagtggagagagagaaaaagagcccatcttcttttctcttttcttcgtctgctgggggccaacaccaccgagatttgtagccaccgtcttcagttaaccttcagtcacgggcgcgatcagttggcttttccgattcgtgtggttttgcagtgcccatggaagaaaataccgtgaatttccgaatcaatagaaattagtcgcataaaaaataatccaaactgtgcagcatttgtgattgaattcaagtacaaatcgatcgcagggagtgattcttaattctcaaatggaaaccgtcttctgcaacggtggacgataattgagtgaagcaaaacctggcaggtgagctagttaggagtttacaacttaatttgcaagaaaggtgcaggagcattccggaatcttcggactctccctaagccaagtctcgcgacttgggccataa

SEQ ID NO: 710 - DNA, 258 bp, DROSOPHILA
atgggtgccgctttctttcccgtgctgtttttcaccgccttgtggggcggtgtgggcatcgccatgcccataatgacccccaaaggacctcaccagaatctgatccgctgcatcctgatgctgaccgccgcctgctgctggctcttctggctatgttgctacatggcccaaatgaatcccttgatcgggcccaaactaaagcgcgatgtggtggccatgattggaaggtcctggaacaacccaattgtggctggttag

SEQ ID NO: 711 - protein, 85 aa, DROSOPHILA
MGAAFFPVLFFTALWGGVGIAMPIMTPKGPHQNLIRCILMLTAACCWLFWLCCYMAQMNPLIGPKLKRDVVAMIGRSWNNPIVAG

SEQ ID NO: 712 - DNA, 4019 bp, DROSOPHILA
aatacagtataattcgcttagctgcatcgatagttagctgcatcggcaagatatctgcattatttttccatttttttgtgtgaatttatttttccttaaaaaaaaaaaattaagttagctgcatttttaagttacctgcatcgaggcattgtgcaaagtactcgaggcacctaagcgaattatactgtatatatgcaagtgtctatgtgtacagcaaataaagttgttaaaaaaaaaaagcgacgccaagattagatcggtgttgcgtcgcacacgtgagtaatcgttttgtgggaagcgtcgatagtgctctaattttagagggcttatcgctacctttagataagaatcataatcctgaacgaaacatggtggtagctcttatcaactgatgatgatgatttgaaattggcgccaatcagagttgtcactacgttgggcaactgtgaagggatatttatgtgttagccaacacaggatgctgcaattatatcagcaattaaactaaacccatacaacaacccttgcaagtagattgctttgtacattctagtattttattgcgtatttaatgttttgaaatgtagcctttgtttagatcttatttagattctagctactttcgagctagttgacttgcagctggcgcgagcaggtggcagccctggataaccagttgcgttatcatctggactcgaaacaaaaacaaaagtcgagcacttgataaggaaatctgaatcgcgcactatgagagctcgtcggaataacaataacaataagtatagccgcagcagtagcgaaatggataagtcgccccgccaattcagctcagcagcgtcccaaagccagtgatcgacgaagcgtgcgctgggaaacatgtcggcgccttcaaaagtagcagctaagccagcaggagcagccaaggattcccagtgtgcggaggagtcgggaccacccgactcacccgctttcatactcgccctggatgttggcaccacctgcgtgcggagcttcgttctggacgaacaatgcgaagtccggggatcggcggtggatgctgtaagtgattcgatcttcaagtgacccgcggtgcaaagttaattaagcaaaaccttgacgacctttggcgcaattaggtggagctactgaacccgcagccaggctatttcgaaatcgaacccgagagcttgtggcggaaaatcgttggcgttataacgcaggcagtaaaaagtgagtatcgcgaatctctaaaatccccaacaggtttaatacatcgttaaatatattaattaaaggcttattcctaaaataagtgaggtaaacctgaatttgggcacagatatgattacatttgagattacttattcatagttattgaattttcaagtgcagtacgattgtgatcctggataagctagaacttacttttgatgccttttgcagatgctcaactgacaccaccggacatcacctgcctgaccatctccacgcagcgctgcacgtttctcacgtgggatcatcgcagtggcgagtactaccacaatttcatcacctggaaggatttgcgcgccgacgagctggttgaccagtggaatgccagctggacgaagagctccatgaactggttctcgtatgccctgttccttctcacccgccagtcacgattcctcgccggcagcgttctccaactgatgaatggccaggtcactccaaggctactcttcgagataatgaacaacaagaagttgaagcaggctctgatgcagaagaaggcgcgcgtggagctgttggactcgtggatcctgcacaagctaagaactggcagcagtcgcgataaggatgtggagcacataaccgatgtgacctcgagtacggcgacgggtttgtacgatccgttcacgctcagctggtcgccgcttataagctggctattcggcatcaatgtgagttggctatatcctccatcaggctctatttgcattcatttgcttccattgcagtcaaaaatcttgccgcgtgtggtggacaacggctacaagggctttgggcatgtgcatcctactgccttcggtccggattgggccaacacagagatacccattgctgcctctttaagtgaccaaacagcagccatttggggctcgcagtgtttccagaagaacgacgtcaaggtcacaatgggtactggtgcgttccttaatctggtaacaggcgatcgttgccaagctgtcatctctggcatgtatccattggtggcctggcagttcaagaaaccaaccaggcagcagggagctgtctactgcattgagggagcatcccatgactttggcaccgtggtcacttgggcgcaatcgtgcgagctcttcgatagtccagcgaacacctcagatattgcacagtccgttccagatacgaacgatgtgttcttcatgccggccttcagtggcctgggggtatgttttttaaagcacttttgcaactggttcaagattacctaatccccatcttatctttgacagcccccggtgaacgattatcggtcagcaagtggctttattggcctcactccgtccaccaccaaagcccacatggtgcgggctctgctcgagagcatagtatttcgtctggtgcagctgatcgaggccgctgagaaggagacctctcagaagcttcatatgattaggtatttctgtctatccatcttaaccaattttacattgcacttattttcttctattttagggttgatggcggcgtctcccgcaatgacttcgtctgccaattccttgcggatctcagccgactgcgggtggagcgggcggacaatgcggagagcagcatcatgggagccacgttcatggcgggcatcaacctcggaatctggcgcgatgtgaacgatctcaaacgtttccggaaagtggcgcgagtctttgaaccgcgtcccaaggagtacgaaaccattgccaaccggatggacaaatggagccggacgattgcccggtttagtgactggtattaggttaaacttttattctctgtctttgttatttgttattcattagtcacttagaaggctaggtagttggtaaataaaatgctgaatttatatattacatacgtttttatgggctgtggaatatatatatattttaaatgacatatttaagtgctaatcttcgaagctgaataataaatttcaaatatattaaccaacaatcagcttgccgccgataaccgataacgaagcactgttattgtcatcgctaaccataccgggtgtggtgacactgattttggggcttagcacgctgcacgtttgtttttattttgattttgttggtgcacaaatcgcagtagaatggcaaaaacgaagaaaaatgtaagggccaaggcgaaaagcgtggtgggggcggccaagcagaaggctcaggacatgaaggccaagctgcgcgaggatcgtctgctccacaagacccttacgcccaagaagacgaccaccaagaaggagaaatccgaggcgaaacacaagaagctgctcaagagattcgccgaagcgcgtaagaaacgcaaggaggagcacaagaatcgcgagaagaccaaagttgtcggagatctaaaaccactgcgggatgccctaccctcgctgcaggacatctacaagctggtgaagaccaagcaaaaggatgtctccgagggggcagccctcacagaaccagaggtccgactgagtgccaacgagaagatccggaaaaaacgcactgaaatggtcaacaccgtcaagtccttcgaaaagctcatcaaagacaagaacttcaagaagaatccccgcgaagtcatcgccgcccatgtgcgcaacaagtaccaggcgatggaagaggacgactacgaatagaagcctcaaatcagcagattaattatttttaggtataaacataaataatacaaggattgtaaagaaatatacgatgacgcaagtatgttagtccaaaactatgaaaaacgttactaattgagcactg

SEQ ID NO: 713 - DNA, 1736 bp, DROSOPHILA
tgggaaacatgtcggcgccttcaaaagtagcagctaagccagcaggagcagccaaggattcccagtgtgcggaggagtcgggaccacccgactcacccgctttcatactcgccctggatgttggcaccacctgcgtgcggagcttcgttctggacgaacaatgcgaagtccggggatcggcggtggatgctgtggagctactgaacccgcagccaggctatttcgaaatcgaacccgagagcttgtggcggaaaatcgttggcgttataacgcaggcagtaaaaaatgctcaactgacaccaccggacatcacctgcctgaccatctccacgcagcgctgcacgtttctcacgtgggatcatcgcagtggcgagtactaccacaatttcatcacctggaaggatttgcgcgccgacgagctggttgaccagtggaatgccagctggacgaagagctccatgaactggttctcgtatgccctgttccttctcacccgccagtcacgattcctcgccggcagcgttctccaactgatgaatggccaggtcactccaaggctactcttcgagataatgaacaacaagaagttgaagcaggctctgatgcagaagaaggcgcgcgtggagctgttggactcgtggatcctgcacaagctaagaactggcagcagtcgcgataaggatgtggagcacataaccgatgtgacctcgagtacggcgacgggtttgtacgatccgttcacgctcagctggtcgccgcttataagctggctattcggcatcaatgtgagttggctatatcctccatcaggctctatttgcattcatttgcttccattgcagtcaaaaatcttgccgcgtgtggtggacaacggctacaagggctttgggcatgtgcatcctactgccttcggtccggattgggccaacacagagatacccattgctgcctctttaagtgaccaaacagcagccatttggggctcgcagtgtttccagaagaacgacgtcaaggtcacaatgggtactggtgcgttccttaatctggtaacaggcgatcgttgccaagctgtcatctctggcatgtatccattggtggcctggcagttcaagaaaccaaccaggcagcagggagctgtctactgcattgagggagcatcccatgactttggcaccgtggtcacttgggcgcaatcgtgcgagctcttcgatagtccagcgaacacctcagatattgcacagtccgttccagatacgaacgatgtgttcttcatgccggccttcagtggcctggggcccccggtgaacgattatcggtcagcaagtggctttattggcctcactccgtccaccaccaaagcccacatggtgcgggctctgctcgagagcatagtatttcgtctggtgcagctgatcgaggccgctgagaaggagacctctcagaagcttcatatgattagggttgatggcggcgtctcccgcaatgacttcgtctgccaattccttgcggatctcagccgactgcgggtggagcgggcggacaatgcggagagcagcatcatgggagccacgttcatggcgggcatcaacctcggaatctggcgcgatgtgaacgatctcaaacgtttccggaaagtggcgcgagtctttgaaccgcgtcccaaggagtacgaaaccattgccaaccggatggacaaatggagccggacgattgcccggtttagtgactggtattag

SEQ ID NO: 714 - protein, 575 aa, DROSOPHILA
MSAPSKVAAKPAGAAKDSQCAEESGPPDSPAFILALDVGTTCVRSFVLDEQCEVRGSAVDAVELLNPQPGYFEIEPESLWRKIVGVITQAVKNAQLTPPDITCLTISTQRCTFLTWDHRSGEYYHNFITWKDLRADELVDQWNASWTKSSMNWFSYALFLLTRQSRFLAGSVLQLMNGQVTPRLLFEIMNNKKLKQALMQKKARVELLDSWILHKLRTGSSRDKDVEHITDVTSSTATGLYDPFTLSWSPLISWLFGINVSWLYPPSGSICIHLLPLQSKILPRVVDNGYKGFGHVHPTAFGPDWANTEIPIAASLSDQTAAIWGSQCFQKNDVKVTMGTGAFLNLVTGDRCQAVISGMYPLVAWQFKKPTRQQGAVYCIEGASHDFGTVVTWAQSCELFDSPANTSDIAQSVPDTNDVFFMPAFSGLGPPVNDYRSASGFIGLTPSTTKAHMVRALLESIVFRLVQLIEAAEKETSQKLHMIRVDGGVSRNDFVCQFLADLSRLRVERADNAESSIMGATFMAGINLGIWRDVNDLKRFRKVARVFEPRPKEYETIANRMDKWSRTIARFSDWY

SEQ ID NO: 715 - DNA, 4703 bp, DROSOPHILA
gttgtgcgacttctggcttctaattatcgaattagtggccatcgggatcgattctggcatactttggaaacctggttaagaataactgacatcttctttcgcagagcgcggactatacataccagaacacagttggccggaggtctcagctgggggcatactaccacatgaacaaacagccctcgtacaccaatgagcacagtctgaacagtcagtatggatacaatacgtggggcatatggcgggatggcaggaacatcgccccatccaccttctcggccaagacgcacacgcagtaccccaagaatcgatcattcagcattatccttacaacggctgcatttatcgtcctgcttacggtcatctcaatcgccggattggccttttacttcagctctataaaaaccaatctggaggatcgtaagtatttggacatatatgcaaatagttggaaaatacttaatattcggtaactttaaacagctgtcatgggctttgagggttccttccgcattgccaaaggggatctcttctccactggtttgaagtacaaccacaccaccacctacaaacagaaaatcgatttctataagagattcgtggagcgttccatgatggacaatggattgcagccactgcgcaccgatgtctggggctttggtgacggtccattaataaaggtctcattccgcgtattcctcgatgtccgtaaactgccgcagtaagaaaacattatttccatattatttccaccgatttcatgttctttcatttatcagaaacatcctgagtgtcgaggagtatatcaaggagtctctgttcctggaaacttccgctgcgaaatctttatatcgttcactacgtttggacacggagtcggtggagatcaagcgcataatggatgaacaggtggtgcgatctgcagcgatattaaaagaagccgtaagtcaagagacctctcaaagttgttatcattgtaaaaccattctctatccaacagcaaacagtgcccactagtcaaacacaactggaaaagcgtctcatgaaaaagggcagcacaccggcaacacctccagttcatcctaaaccgaatccgaataccacgcccaagccgaagaatcccctgctgcgcagtcattccgccgacgaagagcccgatatcgatgtggagaatgcaccagttatacaaggatctttcgagggttccttcgagatcaccaaaacggacgcggacatagcccggaagaagactccgcccactcgcgcctaccaagccgctagtagcaccttgccacccaaggccattgcggttacgcccttttccttgagggtgaagcccaagaagccgagcatcgagaagctaacaacggtgctgccgcaacagctgcccaccggaggtcctattagctccaccagggcaaccaccaaggccactaaggcaactactaccacgacaaagagaaccacaacttccactacgaggaaaactacaacaacgactactccgaagcctacaactactactacaaccacggaggccactacaactaccactacctcgacgactacaacaacaccgccactacctccaagcaccactagagcaaccactacaagcaccaacacttttacctatccctccgtgaacacacctcctccaaatcaagggggatctctgcccaaactggatgccaatctgtttaccacgttccccattttggacactcaaccgtggagacccatgcaccgagaggttcctgagctgctacccggaccaccacccgcttttcccaccaaaactctacccggtggaactactcctacagtgaaccatataccacagaggagaatcgacgaattcgaactgcccttcattgcagacaatcctacgcctccaacagctgctgtggctccagtgactgtggatccctatagtttgggtttcctcaatccgggtttgcgagtacaagagccgaaaccaaatctcggaccacaggcacaggatcaggacatgctgttctaccataatttcggcagtccgatctttatgccgggcaccgagaatatagaacgcttgggaggagctctggtggaaccacatcctttgcctgttcctcttatagatgatgttattataccaccatttaagcccatcgatgctaccatgggaacgggcgacaagatgcccttcaatctggatgccagcaacgagagattcgagcatttaggtggaggagttattgcaaagaagccccaggagaaactggaaaagaaggagcaaccatcaaagaaagagcagttggaagcacacgtcaaggaagcgaatcagacggctccggaaaagaagaaagctcaggcgcataatgatcagaaggcagatcaaccagagataaccactaaagtggaaaggaaacaggagaaagtggaggtaaccacattagccacaaacgtaccagttaaaagctcacccaagccaacgaaatctccatctctgccctcgctgaaacctacggataactctgtgttggccgacaccattggagaattcttcatggagctgcttaatctgcccaaagaggaaaacgcgactgcgactaaaaaaccaatagaggatgctatagaatcccgcatagaacctgaggaagaggaatccttggatactctgaaggcccccagtgtaagcctttccaagccgaacttcatgaacctcaaggaaatcattctgcagaggaataccccctcatcgattctctccaacgaaactttggaggaatccacaaccacgacgatgccgaccacaacaaccagaaccacaacggaggagcccagaaccacgaaaaggaatcgcattcgaaccaccagtgaacggcccacaatgatggacgactcaaacctatttccgtctcactccaaatgggagtttgtcaatagttcatcggctcaaggatttggacacaactcgaatatgaggaaggtcttcaatcagaccttgcaggcttgggtatcggaggacattgacaagtcggaaaacttgacgttaaacgatatcaagacaaggatcaacaacgccagtaacattcaggacatctccctgatctttgatacgttggcctccaagctgggcattacacccagtgttcccaataagtttcctcccttttcacaaaacaaactaaagcacgctccgaaggaagaagtcacaaggagaccaatacccagctccaccaccacggaaataccattactgataccggaatctattctgcctgtcgaaagggagccgtttattaagccaatgtctagttttatagatgatggctcctctgaagtcctgggagcggcaattccagtgattggcgaggcggaagtggaggtggtggatccactaaactacgaggagatgctcaagatctcacagttcgctgccagcagtacggaacccagtgtccataagctggtgacgcttctcccggtgagatccaactccggaatccgaacctacagaccaccagccgcggacgaggagacgcagaggagtgccagtgctccggctcccttggctgcacctgcacctgcacctgcccctttgcctggaaagattagcatacggcgcaagagcaacctcaaccagagccggagattcggacaaccacctgcagaggcggtggtcaagggcggcatccaggtgacggttaagaagtgatcacagagccggcctcaccatgagattataggagaatcgagttctaccacagaacgcaaggatgtagcttaaaccactctatatgttagttataagtagggaatataactttagttaggtcgatcgtgcatatgacgaaatcttgttcgaaaattgtttcgcgcatgggaacaattttggaatgacacttttggttatattggcggaatctgcgactgccagtcctcagtatttaagacaaatcacacatcacattcattgaataagcatcgaatctctagtatacgacttcgaaatttaattatttttttcagttcattactattcttatgttaatgttagctacggatgtaatgtaatgactaagcccgatctttaaataaatgtgaataatttcttacaagctatggctttctttttcgatgaaaaaggtatggataaattcctgcacttcttcagctttaactatatttcaagtattttatatatttctagactattttcaaatctcgcgctcaccataaaccgctatgttggtcttttttgtaggccgcagatacctggtcttattttccgcgcaccttctggtcacacctgagcattgaggatttaggcgttgttgttgtttcgtcggttgtgaattgaatcaaaatagaacaaacaagttgctcaacatactgaaggaatagatataagtacaaagtgataagaggaagtaagcccgctaattatcgagcagcttaacaagtgcaaaatgggctgtgcggagagcaaggacggcgagggggaggcgcaaaacaataggcccaaataccggtcctgcacggacacctgctggctggccatttacattatattctggctgtttttggtaagaaattaaatagatttcgccctatttagagatatatacagccaaagtctgtatcgggaaagtgaaagctgagacattcatctgcgcagcgcgtctgtctgcttcgcagtgtgtgtgagcggtttt

SEQ ID NO: 716 - DNA, 2433 bp, DROSOPHILA
caaacagtgcccactagtcaaacacaactggaaaagcgtctcatgaaaaagggcagcacaccggcaacacctccagttcatcctaaaccgaatccgaataccacgcccaagccgaagaatcccctgctgcgcagtcattccgccgacgaagagcccgatatcgatgtggagaatgcaccagttatacaaggatctttcgagggttccttcgagatcaccaaaacggacgcggacatagcccggaagaagactccgcccactcgcgcctaccaagccgctagtagcaccttgccacccaaggccattgcggttacgcccttttccttgagggtgaagcccaagaagccgagcatcgagaagctaacaacggtgctgccgcaacagctgcccaccggagggggatctctgcccaaactggatgccaatctgtttaccacgttccccattttggacactcaaccgtggagacccatgcaccgagaggttcctgagctgctacccggaccaccacccgcttttcccaccaaaactctacccggtggaactactcctacagtgaaccatataccacagaggagaatcgacgaattcgaactgcccttcattgcagacaatcctacgcctccaacagctgctgtggctccagtgactgtggatccctatagtttgggtttcctcaatccgggtttgcgagtacaagagccgaaaccaaatctcggaccacaggcacaggatcaggacatgctgttctaccataatttcggcagtccgatctttatgccgggcaccgagaatatagaacgcttgggaggagctctggtggaaccacatcctttgcctgttcctcttatagatgatgttattataccaccatttaagcccatcgatgctaccatgggaacgggcgacaagatgcccttcaatctggatgccagcaacgagagattcgagcatttaggtggaggagttattgcaaagaagccccaggagaaactggaaaagaaggagcaaccatcaaagaaagagcagttggaagcacacgtcaaggaagcgaatcagacggctccggaaaagaagaaagctcaggcgcataatgatcagaaggcagatcaaccagagataaccactaaagtggaaaggaaacaggagaaagtggaggtaaccacattagccacaaacgtaccagttaaaagctcacccaagccaacgaaatctccatctctgccctcgctgaaacctacggataactctgtgttggccgacaccattggagaattcttcatggagctgcttaatctgcccaaagaggaaaacgcgactgcgactaaaaaaccaatagaggatgctatagaatcccgcatagaacctgaggaagaggaatccttggatactctgaaggcccccagtgtaagcctttccaagccgaacttcatgaacctcaaggaaatcattctgcagaggaataccccctcatcgattctctccaacgaaactttggaggaatccacaaccacgacgatgccgaccacaacaaccagaaccacaacggaggagcccagaaccacgaaaaggaatcgcattcgaaccaccagtgaacggcccacaatgatggacgactcaaacctatttccgtctcactccaaatgggagtttgtcaatagttcatcggctcaaggatttggacacaactcgaatatgaggaaggtcttcaatcagaccttgcaggcttgggtatcggaggacattgacaagtcggaaaacttgacgttaaacgatatcaagacaaggatcaacaacgccagtaacattcaggacatctccctgatctttgatacgttggcctccaagctgggcattacacccagtgttcccaataagtttcctcccttttcacaaaacaaactaaagcacgctccgaaggaagaagtcacaaggagaccaatacccagctccaccaccacggaaataccattactgataccggaatctattctgcctgtcgaaagggagccgtttattaagccaatgtctagttttatagatgatggctcctctgaagtcctgggagcggcaattccagtgattggcgaggcggaagtggaggtggtggatccactaaactacgaggagatgctcaagatctcacagttcgctgccagcagtacggaacccagtgtccataagctggtgacgcttctcccggtgagatccaactccggaatccgaacctacagaccaccagccgcggacgaggagacgcagaggagtgccagtgctccggctcccttggctgcacctgcacctgcacctgcccctttgcctggaaagattagcatacggcgcaagagcaacctcaaccagagccggagattcggacaaccacctgcagaggcggtggtcaagggcggcatccaggtgacggttaagaagtga

SEQ ID NO: 717 - protein, 796 aa, DROSOPHILA
MKKGSTPATPPVHPKPNPNTTPKPKNPLLRSHSADEEPDIDVENAPVIQGSFEGSFEITKTDADIARKKTPPTRAYQAASSTLPPKAIAVTPFSLRVKPKKPSIEKLTTVLPQQLPTGGGSLPKLDANLFTTFPILDTQPWRPMHREVPELLPGPPPAFPTKTLPGGTTPTVNHIPQRRIDEFELPFIADNPTPPTAAVAPVTVDPYSLGFLNPGLRVQEPKPNLGPQAQDQDMLFYHNFGSPIFMPGTENIERLGGALVEPHPLPVPLIDDVIIPPFKPIDATMGTGDKMPFNLDASNERFEHLGGGVIAKKPQEKLEKKEQPSKKEQLEAHVKEANQTAPEKKKAQAHNDQKADQPEITTKVERKQEKVEVTTLATNVPVKSSPKPTKSPSLPSLKPTDNSVLADTIGEFFMELLNLPKEENATATKKPIEDAIESRIEPEEEESLDTLKAPSVSLSKPNFMNLKEIILQRNTPSSILSNETLEESTTTTMPTTTTRTTTEEPRTTKRNRIRTTSERPTMMDDSNLFPSHSKWEFVNSSSAQGFGHNSNMRKVFNQTLQAWVSEDIDKSENLTLNDIKTRINNASNIQDISLIFDTLASKLGITPSVPNKFPPFSQNKLKHAPKEEVTRRPIPSSTTTEIPLLIPESILPVEREPFIKPMSSFIDDGSSEVLGAAIPVIGEAEVEVVDPLNYEEMLKISQFAASSTEPSVHKLVTLLPVRSNSGIRTYRPPAADEETQRSASAPAPLAAPAPAPAPLPGKISIRRKSNLNQSRRFGQPPAEAVVKGGIQVTVKK

SEQ ID NO: 718 - DNA, 3239 bp, DROSOPHILA
agtcggcagttagattatgtttttctgaataaaagacaacgatatttctgttatattcagtcttgggtgatgaatatagtcttcaagaactcttctgctcaatcattcatcacagaattaatcacgcattttaagaccacacgtgttcttacctttattgaaaagatccatgtaaaatcagcagtaggaaaagcagcatgcaaagaaagagaaaaacgatattaaatttggtattgatcaacgccacgttcgcttagtaatatagactatttgattaagtccattatgggttcgctacaaattaattcaaatttttattcactatttgcccgctgcgttgcacgtgtgggtaaaactcaatttacctccgaggtttagcgggccggcagccaaatagacggcaacacgtggtgcaggcattatacctctacacttgcggagcgcttgggacgctgagagaacgctagaacttaaccaaatcgagaacaaacgcaaaatgcccaccttttctcgttgaaatacaagaaggaaagaaatatggcagcccgacatagcgcgaagttggctgcgcttgccgaaaacactgggttgcattctgtgttgtgcgagttggcagggcaactatcgataagcatttcgtacgctaacacatagcagataatatttaaaatttgtctgatttgtattttcaaaactacataacatgaatttaatttttgcaaatttaattgcttatatagttttataatatttttgtagcatatttttagaatataagcaaaagctatggtattgattaattatttgcgaaaactccaaaaactcataaatttacgaagacccttgtgattaacaattttaaatcaagtgattataattgatgctggcgggcgttgcccatcttctgaacactcgatagtatcgattagaaatcgatttttttccagctctagtctacttgtcagacacatttccgaaaaaaaactcaatcagtaaaacgttaaattaaagtttgactatcaacaaatcatttcaaaaagtttttgttttaggctgtggtttgtttttattgtcgtatgtccatccagaatttaaacactcgtggtaagtttaggccaaacgagacacttttccccgactcctacacatgtacataaaaatggccgccctgacggtcatcatcacgaacacacacacacccatacacacgcacataagcgcattctggtacaaaagaaaaacacgctgctggggtgtgattacatgccttacaacctgcgttttacatcttgcatgccctgaatttcccgatagtcgcaataaccaagcctttttccgcctttacagacccctttgctgatgcaatcaagggcaatgatgatgatattcaagacgggctagtgcatataagaatccagcagaggaacggtcgcaagacgctaaccactgtccagggcctgtccgcggagtatgacttgaagaagatagtccgctcctgcaagaaggtgggtccacctagggtatccttgtgtggaatatccctcaactgtcgaagcaagataatatgcacgcgttttaactgctaatccagtaaaatctgaacccctaatctattgatttccatgaatggaagtttaaacatcccttactaagtggtacatacaaaaagagatgtttgaaagattattcgattataattagatttctttgctatagaaaccatttcatagctccaaagcacagatttttgaagaaactgcgaatattattgaaatctatttggtcagcagttcatttgcacatattcaagacattgtttaaaacattgattgcttcgtcggttgtggatttggttgaaaagcactaacatattaattacattcattcacaggaattcgcatgcaatggcactgtaatcgagcacccagagtatggtgaggttctgcagctccagggcgatcagcgtgagaacatctgtcaatggttgacgaaggtgggtctagctaagccggatcagctgaaggtgcacggcttctaagcggtcgaacgaacaaaccgtgtgaatcttcataccactctttcattcttaagctctgcaacaacacccaaaaacttggaaaagttctttgttccgaattattcaaactctcttgatagaacataaacatacagaagcaatagaccatttactgagaacaatgttataaataaaattaaatgttcaatttaaataaatgaatgtgtgcgggcgctgtcgtagtataatgggtcgaaaaaattataaatgcttgtatttcgaattggtttttctggcttgtaacgcagaaaacgcccattggtatttcatagctattcggataagattctgaattaaaatatagtaaaacgaaaggtgggccatttatttattgtcaacgaaaatattaaaaaaaatattcaaattcaggaacgtctgatttggttgttgtcttagcttcagcaacgtttcacacctcgaggggaataccaccttaggcgttcttgggtacatttgtcagactgttctgcagtcacactaatttaggcacaaaaaatcggagcgcgaagtttttgcgtgtgttgcattttgctggaaaaaagagttatctgagtgtcaaacgtaggcaaattcgtcccccgaaatcgacgcgttgcaactgacgaatttcccaacgataattcgccagcagaacgttcagtgaagaatacgtggacgcgcggaacgcttggtgtttcattttgttcgttcggccaaatttaacaagtggttttcgcctcagcgctgtcacagctgcacgaaatcgccgtctgcaggcggatgagcccgggatttccattcatcccagtggtaagtgaatataggcgaataatggtgcagataacatgtcggagagggggcgggtgggctggatttcgcttagcaatattatgttcttgcacgtttcagggttgtcgcttcgcaggcagttggtattttttgttcgatatttttgggtagcgtgcttgtatttgtgcggtcttccgcaggctactctctacatttacattgaaacgcaataaccatttaagcaataatcgttaacgaaaagcgtgaacgcatgccttgacttgcgtgtctcatgctacgcacttttaaaaacctgtcaggaaaaactagtgacaatcgagttactttttttttttagtatttgcaatcgcttgcaaccctgacttgcgatcta

SEQ ID NO: 719 - DNA, 610 bp, DROSOPHILA
ttaaattaaagtttgactatcaacaaatcatttcaaaaagtttttgttttaggctgtggtttgtttttattgtcgtatgtccatccagaatttaaacactcgtgacccctttgctgatgcaatcaagggcaatgatgatgatattcaagacgggctagtgcatataagaatccagcagaggaacggtcgcaagacgctaaccactgtccagggcctgtccgcggagtatgacttgaagaagatagtccgctcctgcaagaaggaattcgcatgcaatggcactgtaatcgagcacccagagtatggtgaggttctgcagctccagggcgatcagcgtgagaacatctgtcaatggttgacgaaggtgggtctagctaagccggatcagctgaaggtgcacggcttctaagcggtcgaacgaacaaaccgtgtgaatcttcataccactctttcattcttaagctctgcaacaacacccaaaaacttggaaaagttctttgttccgaattattcaaactctcttgatagaacataaacatacagaagcaatagaccatttactgagaacaatgttataaataaaattaaatgttcaatttaaataaatgaa

SEQ ID NO: 720 - protein, 110 aa, DROSOPHILA
MSIQNLNTRDPFADAIKGNDDDIQDGLVHIRIQQRNGRKTLTTVQGLSAEYDLKKIVRSCKKEFACNGTVIEHPEYGEVLQLQGDQRENICQWLTKVGLAKPDQLKVHGF

SEQ ID NO: 721 - DNA, 3315 bp, DROSOPHILA
tagcgatttaagacaatgtgcgcctgctgcacttgccctgtgcaccggttggccatcgatgtccacgatacccatgccgcccactgagcgcgaacataataagccaaaccatttttatctttctatctccacagacccactgacaaccaagaacttacagagaacgcaatgtacgaaaacgtaactaacttgagcatacagtccgataaaaacagttgaactgaccaccaaccaccaaacaacgcaacaaccaaccaataaccaaacaagaaccaccaccacaacaacactctccgtacggaatgccacatgaaccagaaccacggggactggagaacgcagactggaaacggaaactgcgaacgaagaccatacccgggtgaacaaaccaaacaggccaacgaaatcaccacacccgttgactactctctaccaattgactaactcaagtgggtctcgtacagagcactcgtagaaagacccataacccatacgacctttaaacggagccaacgaaaccgcaatgctcttgctatatacacaatatatgcatagtgtcgtatatatgtgtactcataccgcttaggggacttttgaatctacccgtgatacagaaacgaactctctgtgtaacttgaactcttacaaacttattccgacgagattcagccaagcaataaattcaaacgcaatgaatttcttaagagtatcaactctgtctcgtaaattcacgctaagccacagcgtgaaaaattattcttttcatatattagatttaaataaacgatattctactgtataaggccaacaataaatacacttaaatggaataatgttttttttttctttggaagcgaaatgggaaacaaattaattctcgctatgcagattttccatatatatataataaatttttttttaaaagcgaatggactttttgaaaggtcgttaaatgaaccagttccgaaatgtacaacttcagtgtcgcagccctggtaagttccggttccacggacagctgagcaggcattgtttagattttgtaaattgttgatttctcgcagcagaaagttttttttcgtagagctaaataataaaaaaaaacattcgaaatggatccagcactgcttcgcgaacgcgaggccttcaaaaagcgggcgatggccacgcccacgtgagtaccgcacttgtggcccctctgataaagattgcttctcgaaaattacatgctatccttttaaaatagcgtggaaaagaagtccaagcccgatagaccagctccaccgccgcctagcgatgattccaggcgcaaaatgcgcccgcccaatgctcccaggctggatgccacaacgtaagttccttgagagcctctgctactgccagaaatggttcttaaccatgtggaactcttgcattccatacttagatacaagaccatgtccggcagttcccagtaccgctttggagtgctggccaagattgtgaaattcatgcgcacacgtcaccaggacggcgacgaccatcccctgaccatcgatgagattctggacgagaccaaccagctggacattgggcaatccgttaagaatgttagctacagtgcgtgataagttgtggcaggttattaaaccattattcctctattttagtggcttgctagcgaggctctgcacaacaatcccaaggtggaagccagtccatgtggcaccaagttcagtttcaagccagtctacaagatcaaggatggcaaaacgctgatgcgtctgctcaagcaacatgatttaaagggcctgggcggcattttgctggacgatgtccaggaatctctaccacactgcgaaaaggtgctgaagaaccgatcagccgaaatactttttgttgttagacccattgacaaaaagaagattttattttacaatgacaggactgctaatttttcggtgggttataaacacactcttctaaaatcccagcctaatcaattgtaccgtctcaggtggacgacgagttccagaagctatggcgctcggctacggtcgatgcaatggacgacgccaagattgacgagtacctcgagaagcagggcattcgctccatgcaggaccatggcctcaagaaagcaattcccaagcgcaagaaggcggccaacaagaagcggcagttcaagaagcccagagacaacgaacatttggccgacgttctggaggtctacgaggataacacactaacgctgaagggtgtgaacccaacgtagaatagagacattagattatacaaataaaaaccactctcaatggaattaagtacactcgaaactggatgttataaatttgtttaaccactgccaatctaattaagaatccgctgtggccgaaatctcattcctcaagatttatagtaccagattgctgttctgcctgtggcattgaacttaaaaatatgacgaccggcacagggaaagataattaaaaagcaaaactatgtaatcttttcctgacattccccattgctttccacacctgatggctggtggtgtgcgtgtacgagggccagaatcgatgctggtgggcagttaaattggcaacagagggaagccgtagctttagtctgcactgaacagcagccaagttcagttggaatcgatttggaataacctatattttggtacggcggttgtgcgggcttatcaggaaaattatctatatattggactctacaaatctaaaaaaagattgtgttgctatttgtaatctattaagattataacaagagatccgatattcagtatagacaaaaatatagctcatacgactcgtaaatcagtcatattgcaaactatcgttcgtcctctaacttgttcaatttaaaagatagggtattcataagtggacttgcatgaaatccgattctttgtttacttggcttgactctttggcacggacaatgagctctctactcggcggcaaaaacttgttttgaaatactcaatttgtttaattatcattcccgaagcattcgccagttggttttgagagtttctgtgctgaggttgacgaaatgaagtcgacgcggactgcacttggagtggccctgctcctggccctggtgtctcaactggcggcccacagctcggagtgagtaaatcaaacctcgtatgctatatagattaggtcactgactttctctttgacttgattcccgcatccagtgacttggtttacggctacgagtgccgcagtggctactgccagaaggtagagctcagcgaggagaactacgtcaaggccatcagtctgcccgtgtgccggctcttct

SEQ ID NO: 722 - DNA, 1052 bp, DROSOPHILA
ttccggttccacggacagctgagcaggcattgtttagattttgtaaattgttgatttctcgcagcagaaagttttttttcgtagagctaaataataaaaaaaaacattcgaaatggatccagcactgcttcgcgaacgcgaggccttcaaaaagcgggcgatggccacgcccaccgtggaaaagaagtccaagcccgatagaccagctccaccgccgcctagcgatgattccaggcgcaaaatgcgcccgcccaatgctcccaggctggatgccacaacatacaagaccatgtccggcagttcccagtaccgctttggagtgctggccaagattgtgaaattcatgcgcacacgtcaccaggacggcgacgaccatcccctgaccatcgatgagattctggacgagaccaaccagctggacattgggcaatccgttaagaattggcttgctagcgaggctctgcacaacaatcccaaggtggaagccagtccatgtggcaccaagttcagtttcaagccagtctacaagatcaaggatggcaaaacgctgatgcgtctgctcaagcaacatgatttaaagggcctgggcggcattttgctggacgatgtccaggaatctctaccacactgcgaaaaggtgctgaagaaccgatcagccgaaatactttttgttgttagacccattgacaaaaagaagattttattttacaatgacaggactgctaatttttcggtggacgacgagttccagaagctatggcgctcggctacggtcgatgcaatggacgacgccaagattgacgagtacctcgagaagcagggcattcgctccatgcaggaccatggcctcaagaaagcaattcccaagcgcaagaaggcggccaacaagaagcggcagttcaagaagcccagagacaacgaacatttggccgacgttctggaggtctacgaggataacacactaacgctgaagggtgtgaacccaacgtagaatagagacattagattatacaaataaaaaccactctcaatggaattaagtacactcgaaa

SEQ ID NO: 723 - protein, 292 aa, DROSOPHILA
MDPALLREREAFKKRAMATPTVEKKSKPDRPAPPPPSDDSRRKMRPPNAPRLDATTYKTMSGSSQYRFGVLAKIVKFMRTRHQDGDDHPLTIDEILDETNQLDIGQSVKNWLASEALHNNPKVEASPCGTKFSFKPVYKIKDGKTLMRLLKQHDLKGLGGILLDDVQESLPHCEKVLKNRSAEILFVVRPIDKKKILFYNDRTANFSVDDEFQKLWRSATVDAMDDAKIDEYLEKQGIRSMQDHGLKKAIPKRKKAANKKRQFKKPRDNEHLADVLEVYEDNTLTLKGVNPT

SEQ ID NO: 724 - DNA, 2721 bp, DROSOPHILA
tcgtacaacaaattcgcgataatccactgccgcccgtcctgcaaaatcacagatccgcgaactgatacacaagcggataagagaagaggccagtaggccaaagctaaccctgccaggacaaaatcgagtcgttcgttccaccggcacacaatggagctactatagtgtgtgtgtgtgtgtgcgagagtgcgggcgcttgtgagcgtggttgtagtagtgggcgagtgcgtgtagtagtagtacgacgagtgttgtggcgacggggaaaacaaaaagaaatctagtttgtgctcaagacttcggctggaaacccggccgcgaagagtgcgtagatgtgaggtgcgatcgctgatgagccatcacctcttcccggtgctggaggcagtgcatccgaccggagaagttgagggactctaggctagcggggcagtaatacggccacatcccgtttccgattccgtaatgctgctggccgcagccggtccaccggcttacgacgccggaaaactgtccaacaatgccggatccggatccagcaacgtgggctccggcggagtgggtacgcccacggcgtcctcgtcgcgtcctagtgccgctagtgccctgatgaagaccctgtctgtgcgcctgcatcgaggcaccgagttcattaaggacaccgttcataaggccctggtcatgtccgctccaacgcctgtggccccagctacagctcctgcgcccaagatcgtggaccacagcctaaagcgaaaactaagcggcgctggcgggctgatgggctgcagcagcattggcagcatgacctcatctatcgccggcagctcgagaagtcaccactatgcactgactagccaggtggcctcgtcacaggtgattcctttgcccagtcaagtgccaacagccgcctttctgcgcacctacactgtggctcccacggcactccatcgatctgccgccgctcgcaaacggaatcccagcaccgacagcctgcttatggacctgtgcctctttaagcccattcggcccatgcccataacgccaataaaaatgtgagtactctccggtattcaaaaccgattccatttgagaaactcatactttgctttttctaacagctaagaagatttctagtagaaaacttgataacagtaatccaatttcgctacatgatatgatgtttataaaatacatgggttcttggagaactttggattgtcttagttgccatttgcatgtttatcctcttgatttatttggcttatccaactggtgtaagattccagccataaaagatggcactattaccgcgtgtgatcctaatacgttcgtatttttaaaattactttttgagatttaaacttattttgccataccgagatcgagccgaatcttataaaagagcggatcaaaaatgaccgaaaacaaagcattaatcaaaacaatttacttatatttgttctatcgttgatagccacaagttccgcggatttgaagtgaagaaaccaaaatttgtccccgctggaaatccagacagcgaagatgatgaggacaacgacgaagatgggacggtccgcaagccaaagcccaggtaagtgtccagtttaacattcaaatttatgtctaatgactgctttcttcgcttagcaacttgacattgccaacaatttcggactcggccttcgttccgatgccctatatagaaaccaccaacaccgccattaacgcaaccaccaccactaacagcgggagcagatcccgctctctcaacacacacacctcaggctctgcccaggccataaccaagccaaagcgtcgtcgtcgcgctcccatgctcacggccaaaagacgacgcaaggccctggatacggaattaacaacttcagcagatgctggaactgaagacaaagctcctgccgtgcgcaaagcgacggcagcacgcggaggatccaagcgcagtcgaggagaatcgattacggctcctacgccagcggaaccaatcaaatctccagtagcaataaaagctccgaccaagcgcaaatcaacctctagaagtgaagctgcaaaacgtagtcgtgtagcctctgtgcagaatgacactgttctcacagcgacatccaccacttcagcagattcaattagaaaagccgcaaccaagcgcattgctgctaatgaaaaagtcgccaagcgcagtcgtggttccgcagccttgtctgcgcgtccttccccgccaatgacacgtcagcgggctcgtcagcagatctccgcaagcacctaaggtctaaaaaacttcaatactcgctcattggaacgtaagcccatatggcaaaagctagaaaagctagaacaaaacaacactaggaaagagtcgcgtaagagattcgctaagttctgagtctttgggttctagttactgtttttgtgtacgtaatacatatttccgttgaagtaggtggaaatgtaagataagccagtaatcatgtaaagtacacgtagtgttcaactcgtttcgtattattcgggacataatatgactacttaagtttaaaaaagcaaccataatttttttgggtacacatattacagaattctggcttggtcttcaagactgatataacaaaaagcatccgctacgaataaaatatgatacaaaatgatatatgcaaaagaaatttaaccctcattgagcaaaaagtattaaatgtataaagaaactagttcatt

SEQ ID NO: 725 - DNA, 660 bp, DROSOPHILA
taatggcggtgttggtggtttctatatagggcatcggaacgaaggccgagtccgaaattgttggcaatgtcactgggctttggcttgcggaccgtcccatcttcgtcgttgtcctcatcatcttcgctgtctggatttccagcggggacaaattttggtttcttcacttcaaatccgcggaacttgtggctatcaacgatagaacaaatataagtaaattgttttgattaatgctttgttttcggtcatttttgatccgctcttttataagattcggctcgatctcggtatggcaaaataagtttaaatctcaaaaagtaattttaaaaatacgaacgtattaggatcacacgcggtaatagtgccatcttttatggctggaatcttacaccagttggataagccaaataaatcaagaggataaacatgcaaatggcaactaagacaatccaaagttctccaagaacccatgtattttataaacatcatatcatgtagcgaaattggattactgttatcaagttttctactagaaatcttcttagctgttagaaaaagcaaagtatgagtttctcaaatggaatcggttttgaataccggagagtactcacatttttattggcgttatgggcatgggccgaatgggcttaaagaggcaca

SEQ ID NO: 726 - protein, 48 aa, DROSOPHILA
MSLGFGLRTVPSSSLSSSSSLSGFPAGTNFGFFTSNPRNLWLSTIEQI

SEQ ID NO: 727 - DNA, 2472 bp, DROSOPHILA
tgaccgccggtgggaaatttaaagataccaaacagttcaataataccaatgccttgtataagtgaactgcatattaacacaattaataatgcctatttcaagagagcgtcaaattactaatgttccgtttaagtaattttacatgtgtttagaacatctactattactatttaccaaaatgaacaaagtatgtaaaccgaatagtgcatttttgcattaagtcagtaggtcatagtgaacaaaataaattgaaatagagataaaagaagtaagtaatttttttatgttcatatatttttaaagaatggagcaacccgtccgtaaacacaacgaactcttttgacccgcttggtatatttttaaggcagtaatttccgagagcagtacagtactgcgcagttatcgatccattttgcgcacttatcgattaattgcgcgcgaaatgagtatgctttgaaataatccacagatgtatttctttatattgggaccagtctgtgctattcgtgtcaaaaggctaacattttttggaatctgctactattttgtgtattattcatattttcatacaattgaagattttctgaagatgcgtaagtaaaaactactatttaaacccgctagttagctaaaaaaaaaggatgaataatgtgcgcaaagcattcggtattagctaggtaaatgtagtaaaatttaaaaaaatattttttagaatatcttcgctttcttcattttgagaaatacaatgtcgagaaacttttcaaatttaactgtgaactgaattgaagcaagacacaaacattgtggtgaatcgaaatacattccgacctgacaatttgaaatcattttagtttgtctattcggttgacctttgaaatattagtcagctgtgaaaacttaaaacattatttgctctgatctcacaaccagcatccgaacgtgctctaaagacattcgaaaatatgagtaccgatactttgataaaggctaaggactccagccaaatatttatggatctgaagaacctgttgttatggcgcaatagccgaaagactttgatcgtcttcacgggcatcctgctcctcctgctggatgtgatggtccactcggtgatcagtgtgataagcatggtagggatcacagttctcatagcagctattggccatcgccttttggtacagttctggagtatctggaagaaggatgagaacaaagatcagatcttacgtttctatcctcacccgaagatagaaatcccccgggaggagactctttatctggccgggaaagcagtttcccatattaatttaattttaaaccgtatgatagaattgttgctggtggaaaagtgggaggattccttgaagttcctagttttgctctgcggcatcaatttgctgggcgattgcttcaacggattgactttgcttatatttggtatgtgcatatgttgtcttactttactttatctataaagttacattaaattgaaataatttttctttataggacacttgtttatttttaccgtaccaaaactgtacgagtcgtataagccattcgttgatgtccagatccgaaagttccgtaaatgcaagatagataaatcgaacgttgaaaaaccgatttgtattcagaaagagtgtccgccggagtcagcatacgagggtcaggaatccaaagagggcaaagtactatatgagccatgcgataatgagccacttcgaaatctcctagagctccacaaaggatgtcgttgtcctgattgcgagcaccggtatttgccagttgaggctcgctaaactatattcatatgaataagaatccaccctctttgatgttattgttcaaaattaatgttgtggaaatatatattctacatattttccactcatatactttttcttttctaatcagttggccataattttaacatcattacttaacttttctgatttataaggggttttcgggaacacctttttgtttggatcgagtgtactttattatttgggtcaaaaatagtatttgactatgacatgtggaaactctgtcagccgagaagtcgaagtcggatcaaatgtttcagattcctaatcctgcgttgttgtcccggattcaagagattctcgtgccaatcagcaggtgatgcagactccaaagtcgtcaagctatcagtagggagtgtcaagggtcgtcgactgagcggtatctatggtgacgagttctacagcttcgagggaattccctttgccaagccgccgctagggaaagcccgatttgtggcctcccaattggcagacccatggaattcagagctcgatgctcggcaggagagaccgattcctctgcagatggacagaaggtcgggaaaggtcgttggcagtgaggattgcctgtacttaaacgtatacaccaagcatgtaagtatttcttcacaacccaaaaatttggctaagcatttattaacgg

SEQ ID NO: 728 - DNA, 472 bp, DROSOPHILA
ccaaatatttatggatctgaagaacctgttgttatggcgcaatagccgaaagactttgatcgtcttcacgggcatcctgctcctcctgctggatgtgatggtccactcggtgatcagtgtgataagcatggtagggatcacagttctcatagcagctattggccatcgccttttggtacagttctggagtatctggaagaaggatgagaacaaagatcagatcttacgtttctatcctcacccgaagatagaaatcccccgggaggagactctttatctggccgggaaagcagtttcccatattaatttaattttaaaccgtatgatagaattgttgctggtggaaaagtgggaggattccttgaagttcctagttttgctctgcggcatcaatttgctgggcgattgcttcaacggattgactttgcttatatttggtatgtgcatatgttgtcttactttactttatcta

SEQ ID NO: 729 - protein, 154 aa, DROSOPHILA
MDLKNLLLWRNSRKTLIVFTGILLLLLDVMVHSVISVISMVGITVLIAAIGHRLLVQFWSIWKKDENKDQILRFYPHPKIEIPREETLYLAGKAVSHINLILNRMIELLLVEKWEDSLKFLVLLCGINLLGDCFNGLTLLIFGMCICCLTLLYL

SEQ ID NO: 730 - DNA, 5686 bp, DROSOPHILA
ttcttcgtctcgaagccggtgagcagctccagtttctcgatcttctgcgacacgagcaactggtccagagcggtcaggtattccagtccctgcgggcagttgggcatgcccacgggtatcgacatccagttttctgcaatggggcgttgttccggattagctccctatgtatttatatttatctatatgcataaagtgcttttccgatatctatgcatgggtaaaggaaattagcatagctacaatggcggtcaggcgattagggccagtgatagcagttcttaacataaactaatattttaaacaatatgtatttacgtattgacttggaatcacttcactttttggtacattataaaatatcttttttacatagataactatgggtgctattgccatgcccgctgctgtactaaatgccaagaaagagacgacggcatttccgcctttcgcacacgcccactagcccacacagacgcgcgcaaccgactaggtccatccgagtgatggaattcaacagtggacaaatccatatatgtccatcgctacgcaccaggtccgttggcattgttgccaacattcgccgcctgcggctgcaggaccactgcgccattctcgtcctgcggtgcattctgcgggagcaccttgtactcgctcatctgcatcattgttattcccagcaattaaattcgtatcggattctttaacagttcacaaaacactaaatgcagggtgaccgcgttgcgaacgccgaaaaatgcaacgcaaatgcaccgtacgaaatattctgtcatatattttggtatttattcgaacacagaaaaatatcaacaaaaagctttcagcactcaatgcagtgacaagttaaatttgttatgagctgacgtttttgtggattcatttgtattattgcattgtattgcaatagtttccttaagctagcctctttaagttctaagaattttgagtttatttgtgccagttggtatattcgcgcctgccaccgacggtaacactgcggctatgattggatgataagcgatccataaaagcctggacacaaaagacctgaaacatgctgcttggcagccgaatctccagtcgaaatgagcgaatctcttgataagaccaccagcccgagctcggccagttccagggccacgcccccgggaacgcaggatgcggatgagggccacgacgtgagcgataccttctacacgagccagcgcaagaagggcagccacgtatttcgggtgcgccttgacgccacaggattcaccctgcagcgggagtcgccgggcggtagcattgttaaggagcaacatgtccgcatatcggacattgtgggtgcccgctgcatgcggcccaagaagagccggcgcctggcgatgtcgggcgcctgtgcgtgcagctccggtaatcccaattcgccagccatctcggcgtccggcgatcaccatcgccctgccaccacaccaagcaaatgcagcaccaatagtcgggataatattccttcggatggcggcgatgtcagcgcgtttctctacgtttttgcctatgttctgaagaagaggagcctgcggtcggagttgcaccgggagcgaacggtgctcactctgcgcttccggtcgttcgacaccttcgaggacaacatgagggaggcggatcgttggtacagatcccttcgctggcagttgcatcgcacgctggaggagatctttgtggcgccgacggtggatgagcgacgccgtcgagtgcttgtgctgttgaatcccaaatccggttccggtgacgctcgtgaggtcttcaacatgcacgtgacgccggtgctcaacgaggccgaggtgccctacgacctgtatgtaaccaagcattccaactttgccatcgagttcttgagcaccaggtgcctggacgcctggtgctgcgtggtggctgtcggcggagacggtctcttccacgagatagtcaatggactgctgcagcgccaggactgggcccacgtcctgcctcatctggcactgggaatcattccttgcggctccggaaatggattggcccgctccattgcccattgttacaagtatgttatctttgtttcatgtttcattaggaaaaacccccttttgacttatgtggatcttcatatttcgtgtaaaacaatccctccagcgtctagccatgcagtttatcattagattacattcataagcaaaagtagttttcttatcgtgtcaaatggttttgttgttttgcaagtggggatatccccttaaagttaaattgacgtcagactagaacaaactttccacatcgttaagtaattgccccccaatttcgttcaacatttagtggcatatcatcgaactttgaaatctttatgttctttctttatgttcatctatagctcaacttcccgataaaagagtataaaaagggtaatagaaaagaatgtttatagactttaaaaccacattcaggtgtctcatatccgatctattggtcgtaatccgattatcagtcttgtgttgaaacctattcacttgaaacctttctccccagcgaaccatacttcagcaagccagtgctaggagctgctctgaccgtaatcagtggacgcagttcacccatggacgtggtccgggtgcagctgcagagtcgctccctctactccttcctgtccatcggctggggtctgatctcggacgtggacatcgagagcgagcgcattcgcatgttgggctaccagcgcttcaccgtgtggaccctctaccgtctggtgaatctgcgcacctacaacggccgaatcagctatcttctgacggaccatgaggtgtcctcaacccatagcgctaccggttatgctgcccagcggagaatgcagagcagccgtagctgcaacacgcacatcgacatgctaaatgggccggcgcccatctatcattccagtgccgagtacctgccacaggagtttgcggacgtgatctccctggagacgtccatcaatcagtcgttccgctcgaggtgcgacagctggttgtcggggggatcgcggcgcagcttttactattccatatcggagagcatctaccacagtctggcggatgagagcgagttcgccggcctggcggccgcctcgctggaaaaccggcagcagaactacggtccggcaagcgagctgccggatctgaacgaaccgctgtccgaggatcagggttggctggtggaggagggcgagttcgtcatgatgcacgccgtttaccagacccatctgggcatcgactgtcattttgcgcccaaggcccagctgaacgacggcaccatctacctgatcctcatacgcgccggcatcagccgcccgcacctgctgagcttcctctacaacatgagctccggcactcacctgccggagtcgcacgacgaccatgtgaaggtgctgccagtgcgagcattccgcctggagccctacgacaatcacggcatcatcacggtcgacggcgagcgcgtcgagttcgggcccctccaagctgaggtcctgccgggcatagcccgcgtcatggtgcccaagtaggaggagcttactgaagaccatcaagcaatagaaatctcaattttggaatctctgcatttgtagctaatacttagggtcccaggtggccgatatgagagagttgtgcattctacatatttcgtgtttttgtggcctgcttctgccaaccaatcatgtattgttaacattttaaacacaataacagctatttccgaaatatctaacatgtttgtttataaaacgtgtgccatatgaagtgcacgtgaatttatttttatctcggctgttcaaaatagcgatgaaagtcttatttattttgttctttttttttttaaactgtgtaacgaaatgagatatatattcaaaatgtttaaagatgaatacaaataaatcttcatgaattcaaaaatcttagaaagtaacagtgtaagtaacagagctaaatcatttacaattccatattttaaagtaggaagttaagaatataacatctttgagcttgaaataaaaaataaaaatgttaactaatttcagctctgtttcaatttgttttcttctctttactatatagtttaaaatatttttcaaaatttattatcaattaaagcttttattaaaatgtaacggttccaaccaataacggtaatttttcggtatttcgtgcttgcatttagtattgttgtggaacgcaaatgacagcttttagagagtttcagccggtcacactggtcgaaaaaaaagaaaaaaacaaatccgttccgtttgtgaaaaaacatttccgagtaaaaataaacagcgctgcttgcatttcacatagtgtcagcacattccgattccagtccgcgactctccagcacggaatcccagtctgcattccggtcaggaagcgattcgtgctctacaatatgtcgtccgaggagctggcgccaattaacgagcaggacttcaaggatctcaaggagcgcatgaaattgattgtggaggcggatccaaagcagtatcacaatgacttttcgctgcgtcgctatctgcgcgccttcaagaccacagatgacgcatttcaggtgagccgttcgcaaataaggcccaataataaccattatttgaaaataggaacctcagctctgaataccctttctctaggtctcgaactaatttcccccttaattagcccctttgagctctgattaagtaataaaatgccaagttgaatgccttttatggatataaaccaatggatgcttatgatatcatcatccatatcttggaccatataaaaattatatgaaataatgaataccttaaagggatttcagatactttttagaccttatgctgaatagtagtacgaacaatgttttccctttacaggccattctaaagaccaacaagtggcgtgagacatacggcgtggacaagctgtccgagatggaccgcagccagctggacaagaaggcgcgcctgctgcgccaccgcgactgcatcggccgtccggtgatctacattccggccaaaaatcacagctcggagcgggacatcgacgagctgacgcgcttcatcgtctacaatttggaggaggcgtgcaagaagtgcttcgaggaggtcaccgaccgcctgtgcattgtcttcgatctggccgagttcagcaccagctgcatggactatcagctagtgcagaatctcatctggctgctgggcaagcactttccggagcgcctgggcgtctgtctgatcatcaactcgcccggtctgttctccaccatttggccggccatacgtgtactgttggacgacaatacggccaagaaggtgaagtttgtggcggacgaggcggagctgtgccagtacctcatccccgacatcctgccaacggacatgtaaggcttccgccacgaaatcagcatccgacgaggcttctgctaggcgtagacatatctccaaagagaaccgaaaccagtacctaagtttgcaaggaggcttctgagagcttttatccagtatagtactctatctgtaaatcgatgtgtttaacaagttgattgtaaagcgtattctattggacaccacaccctattagtacaatgctaactattttagataaaggtttatcttgtatgtgtagtatctatataccta

SEQ ID NO: 731 - DNA, 2830 bp, DROSOPHILA
ccaccgacggtaacactgcggctatgattggatgataagcgatccataaaagcctggacacaaaagacctgaaacatgctgcttggcagccgaatctccagtcgaaatgagcgaatctcttgataagaccaccagcccgagctcggccagttccagggccacgcccccgggaacgcaggatgcggatgagggccacgacgtgagcgataccttctacacgagccagcgcaagaagggcagccacgtatttcgggtgcgccttgacgccacaggattcaccctgcagcgggagtcgccgggcggtagcattgttaaggagcaacatgtccgcatatcggacattgtgggtgcccgctgcatgcggcccaagaagagccggcgcctggcgatgtcgggcgcctgtgcgtgcagctccggtaatcccaattcgccagccatctcggcgtccggcgatcaccatcgccctgccaccacaccaagcaaatgcagcaccaatagtcgggataatattccttcggatggcggcgatgtcagcgcgtttctctacgtttttgcctatgttctgaagaagaggagcctgcggtcggagttgcaccgggagcgaacggtgctcactctgcgcttccggtcgttcgacaccttcgaggacaacatgagggaggcggatcgttggtacagatcccttcgctggcagttgcatcgcacgctggaggagatctttgtggcgccgacggtggatgagcgacgccgtcgagtgcttgtgctgttgaatcccaaatccggttccggtgacgctcgtgaggtcttcaacatgcacgtgacgccggtgctcaacgaggccgaggtgccctacgacctgtatgtaaccaagcattccaactttgccatcgagttcttgagcaccaggtgcctggacgcctggtgctgcgtggtggctgtcggcggagacggtctcttccacgagatagtcaatggactgctgcagcgccaggactgggcccacgtcctgcctcatctggcactgggaatcattccttgcggctccggaaatggattggcccgctccattgcccattgttacaacaagccagtgctaggagctgctctgaccgtaatcagtggacgcagttcacccatggacgtggtccgggtgcagctgcagagtcgctccctctactccttcctgtccatcggctggggtctgatctcggacgtggacatcgagagcgagcgcattcgcatgttgggctaccagcgcttcaccgtgtggaccctctaccgtctggtgaatctgcgcacctacaacggccgaatcagctatcttctgacggaccatgaggtgtcctcaacccatagcgctaccggttatgctgcccagcggagaatgcagagcagccgtagctgcaacacgcacatcgacatgctaaatgggccggcgcccatctatcattccagtgccgagtacctgccacaggagtttgcggacgtgatctccctggagacgtccatcaatcagtcgttccgctcgaggtgcgacagctggttgtcggggggatcgcggcgcagcttttactattccatatcggagagcatctaccacagtctggcggatgagagcgagttcgccggcctggcggccgcctcgctggaaaaccggcagcagaactacggtccggcaagcgagctgccggatctgaacgaaccgctgtccgaggatcagggttggctggtggaggagggcgagttcgtcatgatgcacgccgtttaccagacccatctgggcatcgactgtcattttgcgcccaaggcccagctgaacgacggcaccatctacctgatcctcatacgcgccggcatcagccgcccgcacctgctgagcttcctctacaacatgagctccggcactcacctgccggagtcgcacgacgaccatgtgaaggtgctgccagtgcgagcattccgcctggagccctacgacaatcacggcatcatcacggtcgacggcgagcgcgtcgagttcgggcccctccaagctgaggtcctgccgggcatagcccgcgtcatggtgcccaatgtcagcacattccgattccagtccgcgactctccagcacggaatcccagtctgcattccggtcaggaagcgattcgtgctctacaatatgtcgtccgaggagctggcgccaattaacgagcaggacttcaaggatctcaaggagcgcatgaaattgattgtggaggcggatccaaagcagtatcacaatgacttttcgctgcgtcgctatctgcgcgccttcaagaccacagatgacgcatttcaggccattctaaagaccaacaagtggcgtgagacatacggcgtggacaagctgtccgagatggaccgcagccagctggacaagaaggcgcgcctgctgcgccaccgcgactgcatcggccgtccggtgatctacattccggccaaaaatcacagctcggagcgggacatcgacgagctgacgcgcttcatcgtctacaatttggaggaggcgtgcaagaagtgcttcgaggaggtcaccgaccgcctgtgcattgtcttcgatctggccgagttcagcaccagctgcatggactatcagctagtgcagaatctcatctggctgctgggcaagcactttccggagcgcctgggcgtctgtctgatcatcaactcgcccggtctgttctccaccatttggccggccatacgtgtactgttggacgacaatacggccaagaaggtgaagtttgtggcggacgaggcggagctgtgccagtacctcatccccgacatcctgccaacggacatgtaa

SEQ ID NO: 732 - protein, 907 aa, DROSOPHILA
MSESLDKTTSPSSASSRATPPGTQDADEGHDVSDTFYTSQRKKGSHVFRVRLDATGFTLQRESPGGSIVKEQHVRISDIVGARCMRPKKSRRLAMSGACACSSGNPNSPAISASGDHHRPATTPSKCSTNSRDNIPSDGGDVSAFLYVFAYVLKKRSLRSELHRERTVLTLRFRSFDTFEDNMREADRWYRSLRWQLHRTLEEIFVAPTVDERRRRVLVLLNPKSGSGDAREVFNMHVTPVLNEAEVPYDLYVTKHSNFAIEFLSTRCLDAWCCVVAVGGDGLFHEIVNGLLQRQDWAHVLPHLALGIIPCGSGNGLARSIAHCYNKPVLGAALTVISGRSSPMDVVRVQLQSRSLYSFLSIGWGLISDVDIESERIRMLGYQRFTVWTLYRLVNLRTYNGRISYLLTDHEVSSTHSATGYAAQRRMQSSRSCNTHIDMLNGPAPIYHSSAEYLPQEFADVISLETSINQSFRSRCDSWLSGGSRRSFYYSISESIYHSLADESEFAGLAAASLENRQQNYGPASELPDLNEPLSEDQGWLVEEGEFVMMHAVYQTHLGIDCHFAPKAQLNDGTIYLILIRAGISRPHLLSFLYNMSSGTHLPESHDDHVKVLPVRAFRLEPYDNHGIITVDGERVEFGPLQAEVLPGIARVMVPNVSTFRFQSATLQHGIPVCIPVRKRFVLYNMSSEELAPINEQDFKDLKERMKLIVEADPKQYHNDFSLRRYLRAFKTTDDAFQAILKTNKWRETYGVDKLSEMDRSQLDKKARLLRHRDCIGRPVIYIPAKNHSSERDIDELTRFIVYNLEEACKKCFEEVTDRLCIVFDLAEFSTSCMDYQLVQNLIWLLGKHFPERLGVCLIINSPGLFSTIWPAIRVLLDDNTAKKVKFVADEAELCQYLIPDILPTDM

SEQ ID NO: 733 - DNA, 3254 bp, DROSOPHILA
cggttgtcgtgaatgccgtagaaggaatcccaaaacttgggggcgtctgtctgaaatcgctccttctgctccgcttccatctttgaggtcgaattcttggctacagccgccttcgcggccagttcctgctcttcatcccattgcacgtggtccctgtgaatccatgtttagagggattttcatgagtactgaacggcagataagtaccaggcgttaaactcgaacacctctcgcgcgtcggtgagcacccggctgcccgctcccgacggttttttacgctggcgagtgtgttcccaacttttgctggccaatctccggaggatttgccacccatatttaccaagcattgtgcttgaagacgtcgtcagcatccgtgagcaggcgggttccgaactgcggtcgcttttcgttctccgcggcggggttgtcactcatatcggacaggaatgacggtatatatcacctgtttgtgcgatccaaattatatattttggtaaacacgccgccagtgtggccgtgcaccgatccaataaagttaaaccgttagtattttcgaagcggctctcttccgagcgggaaatcggatgtacccgttatcgcccttttttccaaaagcaattgtgaaatatgtgttctatgtgtgtttagtttgtggcgtgttgagtacgcatcgagtttttaccgaaaccccttagagaaaagggaaaaataaagttgaaaattgcgggcaaatgtaatcgtgctgccagaccatcaatagtttattttagggatgtactcgtgactgaataccttggcggatatcgtttcatggttaaaatgcatgatataaaaactggtaaattaaatatgaaacccgtaggtaagtaaaatgaatatgtattgttatgtttgcgacttatatccataattcgaatgaataataagaataagtttttggtgctcgtgccgtgcttttgcttccatcgctacgttttgacttctccactatttcccagtggcaacgccgcgtcagttggtatatcaaaaccgcaaaccaacctttttgttgtattgtgcgttgtttttttcgacggaggcgagaaatttaaacaattagcattcagagtgctaagatacaagagcttattgtgtatacgcagaaggctcgtcgaaggagcgaccaaaagaaacccatccagggtaccgagttccagggattattgtgtgcacgcagcggtctgcagaagcacccatagaaacataccctattcagcgttccatcgagcggacgaatcgcgaaaacccgttaaaatgatgaacgaggcggcacttgccaatatgataccctacgacaccatcggattgtatgaacagccaaagccgcgcttcatcttcaagatgcctcgtgtggtcccggaccagaagtccaagttcgagagcgacgaacttttccggaggctcagtcgggagagcgaggttcggtacacgggctatcgggaacgaagcatcgaggagcggcaggtgcgcttcatgaacggatgtcgcgaaggacacacggaggccagcttcgtggcatcgggcaccaatctgcagctggtgttcaacgccaaccagaacccgtacctgcacgacaaggagtgcgactttgacaaggagcacggcaaggtgcacatcaagtcctactttatcatgaacggggtttgtgtccggttccgtggatggatagacctggaacgactggacggagttggctgtctggagtatgacgagcggcgcgccatgcacgaggacgccattctgcgggatcagatcgatcgctacaaccagcgactgcgtgagttcgaggacactaagcgcgcctaccgtgacaatcgacaggacgagatggaggcagtgcgacggggcgtggcctccggaggcattggcgttggcgccagcatgtggcgtcgttagttggacctgtggacggctcctgggccgtcccatccgcagctgcctccccagcagcagcagacgcatcaccagcagttagagactcaattcgcgaatactcaatatttcatggacaactgagaatgctccgaaccccttaagagggctttcacttgagagatttcaatacgattacgttagacacgctcgaataattatgctcctagattagtgttagatgtaatgcttactttacgtatgcttttatggtattatacttacaacttagtgtgaaattagtgtcgtatctttaactaaaatacataattactaatctatatggcattgttcattttggaatttccacctttaagcagagtgactaagactcttcactgggaattgcctaccgaggctaggtatcgatcaagaaaacaagtcgtttggtttgattttatagcattataatatacagatactgaactttatacataataagcaaggatcgtgtaaaactaaactatggggtctcgctcggcgtgttggaaacatttatattaaaagcgacaagctagtccgtcctagcggaattgcaggtttgaaatgcgcaggccaatgctatccttgccgatctggctcacttcgcaaactgtgcagagattgcccttgaactgagggtcgaaagaggaggagcagaagggacaggtcacttcgggtttacccctatacagtggcttccagctgatgccgcagattgtgaacggattaaactcctcgtactgcagctgatgctcgtccacgggatttacctcgcaggcctgcaggatcttgcgcacctgctgggcaacgtccggtcgtggcgccagttccaggagacgacgggcaaatgaggcggccgtcttgtagttcttcagcttgaagaacatattgagggcggtacgcagggtgaggatttggtgcacgggctgaagcttgcagtgcgtgaagtaggcggccatctcgcacagacgcttttgctcctcaagcgtcgacttgggcatgcccttgcgcacagtctccatcttcaggccaacgatatactcagcgcagatccttaagagttgctgggcctccgccgcatctagcttcgtgtccactaccagcagtgggatgctaatcaagatggaatggaacttctctactgcctcggagaactttccagaagttgtcagttggtacccagcttgcaggcgtgccaccaaatcattcagtttaatgccaaccgcaggacgctgcagcttgatgtttgtctcggagtagttgcgaagtgggtaaccacttagggattgcagattcggatt

SEQ ID NO: 734 - DNA, 1254 bp, DROSOPHILA
gcaacgccgcgtcagttggtatatcaaaaccgcaaaccaacctttttgttgtattgtgcgttgtttttttcgacggaggcgagaaatttaaacaattagcattcagagtgctaagatacaagagcttattgtgtatacgcagaaggctcgtcgaaggagcgaccaaaagaaacccatccagggtaccgagttccagggattattgtgtgcacgcagcggtctgcagaagcacccatagaaacataccctattcagcgttccatcgagcggacgaatcgcgaaaacccgttaaaatgatgaacgaggcggcacttgccaatatgataccctacgacaccatcggattgtatgaacagccaaagccgcgcttcatcttcaagatgcctcgtgtggtcccggaccagaagtccaagttcgagagcgacgaacttttccggaggctcagtcgggagagcgaggttcggtacacgggctatcgggaacgaagcatcgaggagcggcaggtgcgcttcatgaacggatgtcgcgaaggacacacggaggccagcttcgtggcatcgggcaccaatctgcagctggtgttcaacgccaaccagaacccgtacctgcacgacaaggagtgcgactttgacaaggagcacggcaaggtgcacatcaagtcctactttatcatgaacggggtttgtgtccggttccgtggatggatagacctggaacgactggacggagttggctgtctggagtatgacgagcggcgcgccatgcacgaggacgccattctgcgggatcagatcgatcgctacaaccagcgactgcgtgagttcgaggacactaagcgcgcctaccgtgacaatcgacaggacgagatggaggcagtgcgacggggcgtggcctccggaggcattggcgttggcgccagcatgtggcgtcgttagttggacctgtggacggctcctgggccgtcccatccgcagctgcctccccagcagcagcagacgcatcaccagcagttagagactcaattcgcgaatactcaatatttcatggacaactgagaatgctccgaaccccttaagagggctttcacttgagagatttcaatacgattacgttagacacgctcgaataattatgctcctagattagtgttagatgtaatgcttactttacgtatgcttttatggtattatacttacaacttagtgtgaaattagtgtcgtatctttaactaaaatacataattactaatctata

SEQ ID NO: 735 - protein, 212 aa, DROSOPHILA
MNEAALANMIPYDTIGLYEQPKPRFIFKMPRVVPDQKSKFESDELFRRLSRESEVRYTGYRERSIEERQVRFMNGCREGHTEASFVASGTNLQLVFNANQNPYLHDKECDFDKEHGKVHIKSYFIMNGVCVRFRGWIDLERLDGVGCLEYDERRAMHEDAILRDQIDRYNQRLREFEDTKRAYRDNRQDEMEAVRRGVASGGIGVGASMWRR

SEQ ID NO: 736 - DNA, 5748 bp, DROSOPHILA
tttctgctctacatcactggtataaccagtaaccccggttggtgtccataatcttgacatggccactccttcggcggagggttttggagatggtgagcgtgggttctgctgggcaggagtagctaataccgccgcagggcgcacaattggctgtccatattccacttttacctcctttgtggttgtgctttcgtgttgcactgtttgaagacccagcggtggtggaaagacgggtacaccaccctgtggtggtggctccttgggctggacttcagaaagtatcttgattttctcagtaattagaggtatcttgggttcgcttctttcggttttcggtgagtaacagaactctggggcatcacctggtataaggttaagactcctcagctcctccgccagagattgcgcctgaggctgtcgtacgacagtgtccaggggcttaaatgttaatggattcggtcgctggatgatggtctcttcatcgatcttcttgaagtagtcgaacgatgaggacgaggttgttgacttgtgctcgctctgctcgtatctggtgctggtcagcgtctgcggtggttgctgttgctgttggccaaaggtggtggccaccactggcgtacagggtttgggtggcactggcggtgggactttggtggtgttggtggtggtggtgttggtgatggtgggttgtgtcagatctggctgatccatgctgacggtggcagtgtttgtagtgatggtgatagtatcgtttgtggttggtgtcttgggtcgcgtggtcagctcgggcagatccagatagttcgatttgtgctctagacgcatggttgcctcggtagtgcaacgatgctcagtgatcactttcgactcggacagaccgtggagatcattggcactagtcacttcggtctgactattctggtacgactgttggttttcgctattctgaatttgtttctgcacctgaatcggttggtttcaatgtgttttttgttttttttttgtttcaggatggagtgttgataacccgtggaatgagcaaagcgaaacgaaagaacgaacgacgttgacatcatgagaggagaaaattcacaaaagtttggtttattatattgatcgatagtaaagtaagtaagttaacagagtcgaaaagaaagatagaaaaatagatcggagtagattgaaagagttgtaggtgatcgtggaggataatgcatagtagtcggtggttagatattgagcacatgcacacttacttcggttttgaattcgctggccggagccacaggacccgtctcatagacaatagtcttgaccacctcctgcaagcgttccggcgaaggctcgaggatggcacagtcggcaatgctcttggcctcacctcccgcatttgtggcgcgaaccatgtactttccggagtccgtggtttgtgctaaaagcaaaaatgtattaacattaaaaggtgcattttaaaatcaaaaaatcaattaacataacgtattggcattagtaattctattgtacgaaaaacatttgccggcgcaactaaaattaaatgaaaagccaatgaaagcttatataaacatgttttgagacctaaagtctttgtatgagatgtttgcgaaaacattttagtgctgaataaaacattgcaaaaatgtgggttaagtaaacaaaaatcttgctgtgccatttggctgtcatttcctggctaatttcgaaagtgaaatttctaaacggaaaacgaatgtatacaatttataatagaatataagtacttacccttttcgatgatcagcctgtaggagttgccttgggctagcaagcgatgctcggaaattccagcatccttcagtggcttatcgtccttcagccaggtgaccgtaggttcgggcaacccggtgacctccacctccatagtcaacttctcgcccttcttgctgacctgagcctgcagacgtcggccaaaaacaggcgggaatatggtctctagatttttcggggaaaagaaaaccaaaacaatgagcattaacattaacacatatcagcagcctttgtgtgtcattgcaacagatttgtagctgaataatttactcgaacagccgtccaataatcggccataatgaataattcgttcagacagccgacaggcagtaaaaataatctcaaacacacatttcaggcagcagcgacaaatctgcaaacagcccgagtaaataaacgatctcggtcttcaacgcgatttacataataataattgcaggcattatcccacagccccaaccccaatccacaaccatattcacgtccacatcccgatgaaccaccacccccatggctgccagaaaatatttataaatttgtgtaagaaaatcttttgcattggccaagagatctcatctccccctaacccgggcacaccagccaaccccgaccgaccaacagaacagattgaaatataaacaaaaacaatatagccaaaatcatcatcctcacaaccccgtcgaccactaaaaactcatcaatattctcgtgagcagtcgagcggcgttcaaggcattgacgtttgaagatctattgacggtctaggcccctcgtccctcgacaatgacactttaatgctctccactgattgatgtggtcagaacaaacgccaacatatgatatagggcccatattccggggaacatgtgtgtatgtgttttttttttcgagttgtgcacacttttcgacagctttttagttcatttaattctaggaaattgatttcttaaaaaaatatctgagcgtgctggtaatttgatatgctaaattaggtcgcgtatcgacaaacgttgcggcgccattaaaaggagcaaatatatgctttctaggaatgtttcgctatcaattaaattataaataaatggccaaggattttatagttgtgtatagtccgaatgcattgaatcgttcactaaatatgttcccttaaagaaatcgtttcagtactcacttttaacgaccaagtccgctgtgctggtggattgacccacagtattggaggcggtcaccgcgtagcgtcccgcatcgcccacgcccacctgtttgagttcgatggtcacgcgattgcacttgttggagatcctagtgtgggcatcctcaaacagctgacctccgttcttctccaccttgatttcgggcgaaggaaagccatcgtaaatggcctccatgctgacatcggcgccctgatcaacgatttttccactcagtggagtggtgaacctgggagctatttctcttctgaggcgagttggggagtccggtattgctactgcggattgtccattggctccactggactgaataaagctaaaggacttttgctgcactgtggggctgctcatctccttactcttgtgcaactcctggtagtgatggctctccacgatctccggtcgttgttgtccaagttgtttcagagactgatcgatgtgggcggaggagtgatgaacctcagtttgaggagcatttccctcataggaattaacctgcgatgtggaagtggtggtaaaggtctgctttttgatcgtgaccctcgaggattcggtgttgtgctcctgactcacggtctgaacatcactagaggcgggcaaaccacttcctcggatattcaaaaaggccacacaggtggccttgcccgcctcattctcagccacacagctgatcttgccaacggcatcgtgggttagcttctgaatggttagcacttgacgttccccacttgttgagaccaggaaattgtgaccatggacgggttgatcgttgaagaaccagtggacctttggtgtgggcttgcccttgactatgcactcgaacttgatcacctcatcgatttcaccttgtttgtcactgaacagttctttgaattcgggacactggtgacgctcaatgatttcaaccgatgattggctacttctacggttttcgggagcattcacggacttcactatgagatgcgaaaagcatttggcatctcccgctggattggtcaccttaacagtatacactcccttgtcatcgccgctcacgttgttcaggatgagcttaaagactcccagttcggagtcggattgtgtggtaatcctttgatccagttgaagttccttattggtcaggaaccactgtgccgtcaggggttgatcaccactggcctgcacctcgagaaccacttgctcgccttcatcggccaagacatcggatagaagtctctcgaacttgggctgcgaatctttcggtagagattgcctctccgcctgcgcccgagtggcaggttccgcttgattcagaggagtaaccttgagttcacaactactcgaagcttcgccagccgaattaatggccaccactttgtagtgtcctgcgtcttcttggtacacctcttgaatgatgagggagcatctgtctccttggaacagcagttgtacatcggcagactccttgacaggtcgctcattgtgataccagatgacctcgggctcgggctgacccacaatcacgcagtccagcctcactggcttaccctcgaatatggaaacatccttgaggggcaagtgaacggcgggcttgatcggttctatatcgctggccatttcggaatcggaggtctcgttgggcagtcgaccctttactatcacgttgcaactggtataggcttcgccagccaggttcttggcgctcaggacgtaggatccggcgtcgttgggataagcctgcgggattatcagcgttacgcggccgtattcgtactgaaagtacagagagaaaagcacggaaagtcaagtcagtttgagtttcggtattcaccacaccccaaaaacaaaatttggtggattttgaatgctttcgtctcgttctctagctgtgtgctttttttttgcaattaaatttttccttcttttttacaccgattttaatcttatttacgagtgtctgtctgtgtgcacggatgaggcgcatccggcggattggaggcgcagacgcgagcaggttttgtttatttttccacaacaaatgatctttgttttgccccaaattgcaggaagcacctgagttcaggtgttcaacgcttcaatggagaacaatcgaagattcgttggcataattgaaatggtttaattcatcaaacagaatagaacagaacagtgagatcatgttttgtcaaacaagcggcgacggcggcaattaaaagtgcggccaatgaaatcattgcccaatttttaattttgcccagattttcgttttcattttgcttcttcttcgccaatatgaaaatgaaaatctgcaaatatgtgtgcgcacatttgtatacacaatgttggcgcccacaataaacaaattgcctggcctgactgtggtgaattgaattcgccatgctcacatggctcgttgcagctcggaggagctgccaaaaattgcagctattagatattattattatatggcggctatatgctttaccgacttgtgaagcgcactatctgtccgtaaagtgcgttggcgtgttttcaaaacgattgccttgaattctatttgaccaacgatcaacgatttgcggagggacagagaaaaactgcgtgactgacgtcagtcccgaacatttcttttcgaattttggagcatgcaacgcccaccgcagaaaatatatggattcggtttgctttttccagtcaaagtttcacatctgatacacacaatgcttctttctatgta

SEQ ID NO: 737 - DNA, 2392 bp, DROSOPHILA
gcttatcccaacgacgccggatcctacgtcctgagcgccaagaacctggctggcgaagcctataccagttgcaacgtgatagtaaagggtcgactgcccaacgagacctccgattccgaaatggccagcgatatagaaccgatcaagcccgccgttcacttgcccctcaaggatgtttccatattcgagggtaagccagtgaggctggactgcgtgattgtgggtcagcccgagcccgaggtcatctggtatcacaatgagcgacctgtcaaggagtctgccgatgtacaactgctgttccaaggagacagatgctccctcatcattcaagaggtgtaccaagaagacgcaggacactacaaagtggtggccattaattcggctggcgaagcttcgagtagttgtgaactcaaggttactcctctgaatcaagcggaacctgccactcgggcgcaggcggagaggcaatctctaccgaaagattcgcagcccaagttcgagagacttctatccgatgtcttggccgatgaaggcgagcaagtggttctcgaggtgcaggccagtggtgatcaacccctgacggcacagtggttcctgaccaataaggaacttcaactggatcaaaggattaccacacaatccgactccgaactgggagtctttaagctcatcctgaacaacgtgagcggcgatgacaagggagtgtatactgttaaggtgaccaatccagcgggagatgccaaatgcttttcgcatctcatagtgaagtccgtgaatgctcccgaaaaccgtagaagtagccaatcatcggttgaaatcattgagcgtcaccagtgtcccgaattcaaagaactgttcagtgacaaacaaggtgaaatcgatgaggtgatcaagttcgagtgcatagtcaagggcaagcccacaccaaaggtccactggttcttcaacgatcaacccgtccatggtcacaatttcctggtctcaacaagtggggaacgtcaagtgctaaccattcagaagctaacccacgatgccgttggcaagatcagctgtgtggctgagaatgaggcgggcaaggccacctgtgtggcctttttgaatatccgaggaagtggtttgcccgcctctagtgatgttcagaccgtgagtcaggagcacaacaccgaatcctcgagggtcacgatcaaaaagcagacctttaccaccacttccacatcgcaggttaattcctatgagggaaatgctcctcaaactgaggttcatcactcctccgcccacatcgatcagtctctgaaacaacttggacaacaacgaccggagatcgtggagagccatcactaccaggagttgcacaagagtaaggagatgagcagccccacagtgcagcaaaagtcctttagctttattcagtccagtggagccaatggacaatccgcagtagcaataccggactccccaactcgcctcagaagagaaatagctcccaggttcaccactccactgagtggaaaaatcgttgatcagggcgccgatgtcagcatggaggccatttacgatggctttccttcgcccgaaatcaaggtggagaagaacggaggtcagctgtttgaggatgcccacactaggatctccaacaagtgcaatcgcgtgaccatcgaactcaaacaggtgggcgtgggcgatgcgggacgctacgcggtgaccgcctccaatactgtgggtcaatccaccagcacagcggacttggtcgttaaaaagaccatattcccgcctgtttttggccgacgtctgcaggctcaggtcagcaagaagggcgagaagttgactatggaggtggaggtcaccgggttgcccgaacctacggtcacctggctgaaggacgataagccactgaaggatgctggaatttccgagcatcgcttgctagcccaaggcaactcctacaggctgatcatcgaaaaggcacaaaccacggactccggaaagtacatggttcgcgccacaaatgcgggaggtgaggccaagagcattgccgactgtgccatcctcgagccttcgccggaacgcttgcaggaggtggtcaagactattgtctatgagacgggtcctgtggctccggccagcgaattcaaaaccgaagtaagtgtgcatgtgctcaatatctaaccaccgactactatgcattatcctccacgatcacctacaactctttcaatctactccgatctatttttctatctttcttttcgactctgttaacttacttactttactatcgatcaatataataaaccaaacttttgtgaattttctcctctcatgatgtcaacgtcgttcgttctttcgtttcgctttgctcattccacgggttatcaacactccatcctgaaac

SEQ ID NO: 738 - protein, 681 aa, DROSOPHILA
MASDIEPIKPAVHLPLKDVSIFEGKPVRLDCVIVGQPEPEVIWYHNERPVKESADVQLLFQGDRCSLIIQEVYQEDAGHYKVVAINSAGEASSSCELKVTPLNQAEPATRAQAERQSLPKDSQPKFERLLSDVLADEGEQVVLEVQASGDQPLTAQWFLTNKELQLDQRITTQSDSELGVFKLILNNVSGDDKGVYTVKVTNPAGDAKCFSHLIVKSVNAPENRRSSQSSVEIIERHQCPEFKELFSDKQGEIDEVIKFECIVKGKPTPKVHWFFNDQPVHGHNFLVSTSGERQVLTIQKLTHDAVGKISCVAENEAGKATCVAFLNIRGSGLPASSDVQTVSQEHNTESSRVTIKKQTFTTTSTSQVNSYEGNAPQTEVHHSSAHIDQSLKQLGQQRPEIVESHHYQELHKSKEMSSPTVQQKSFSFIQSSGANGQSAVAIPDSPTRLRREIAPRFTTPLSGKIVDQGADVSMEAIYDGFPSPEIKVEKNGGQLFEDAHTRISNKCNRVTIELKQVGVGDAGRYAVTASNTVGQSTSTADLVVKKTIFPPVFGRRLQAQVSKKGEKLTMEVEVTGLPEPTVTWLKDDKPLKDAGISEHRLLAQGNSYRLIIEKAQTTDSGKYMVRATNAGGEAKSIADCAILEPSPERLQEVVKTIVYETGPVAPASEFKTEVSVHVLNI

SEQ ID NO: 739 - DNA, 5392 bp, DROSOPHILA
gctatataaagtgaaaattaatcttgaaaagagatcaaagcaaaacaaaattaatgtcaaaatcaatctggtgaattaaaagatctaagggatcgattaaaataaaaatacactatatagtgtaattaatcttatttggctttaagttttaattttcgaaatggtggctaatgtgctatattttttaaaattgtatcctacttttttaatattctaatatccacgatattggcgccatctaacgtcttaagatttcgaaagctttttcgaatatgcgtacccagctttttcgaaaattatggttcgatcccaaatgtagagagcgccaccattgagcttttcacgatcagctgagtaaggaaaagcaggaaaaatcccatgaaaaacgttccttttcgtttaaatatttgtttatttcattttcgacaaaaacacaagtaatactatattcctttgttgtatgcatgtataatgggttgttttgggcgacattttgtaagtccatcatcagcccacaagacgaataagtgacgcgggggcgcaataaatacatacacacaataaggcgaaactttggcattgaacaaatcataaagcaaataataataataataatagttgcatttaaacaagtttagtatctaaagccgcggtttgtgctcgaaacggtcaaatttccgctggtggtggccgctcccagaggattgatggcggtgcaggcgtagctgccgttgtcatctgccggattccgagccattccagaggatgccaaccattcattcaggaggaagcgaggaatagagaaggtagaacgattaatgagctggcccgatttgattgtacacagaacgaaattgtgtagaactctagcgttggggaaattgcacatgaaatgtatctcaatctatcagtatctcaaggattgcactttcagctaactttataatgatagtagcttcatataacaaaagcacagctggttcacagttagctgcaggtcttagatactccatgtaaatagtgcccacaatttggttctgtgcacctttggctgaccagcttgtccgccgtactcacccggataggcctgcggcagggttagccggcacacgccgttccggtactcgatgcagtgcctgctacccgactccaaaagaccgccgttgtgcgtccagttgacctgcggctgcggatgagcctgcacaatgcactcgaagcgcgccgtgcctccaactccgaccgcgatgtctttcagcggctgtccatttatccgcggcggagcgaagtgcgaggaattgggagagaaattgtggggtttcagtattcccggttggacacgtcgtgggtcgtggtgggttaatgactctggcttaccgttatgaataatggctgcctttgtgccagctcatcgcgactcagatgcgcattgacgggttccgtattgggcagctccggcactgaagtgtgggaaaaccattagaatctctggctcagcgttttcaaagcgcatccattagtgggattagcacgcggcaagcacgaaacacaaacactccgacgtacgattcactttaaagtttaaacacataaaacgcaaacaaacgcaaatttcatgcaaaaacaaggcggcaagctgaatttcatcgggttagcatgcttttttcgaattttggtggttagaacaacaggacctgcctatttacacaggcgatgacattttgggtgttaatcacaagggcacaaagccacaattgccttttttaaaggctcaaaagatatgaactatttttaattaattagttttgattaactagtttagttcatatctctgagccagcgacaatcgcgatcacaacataaacttgtcctagactaattgacaacatcgatagcggtaagccgttctgattgatggctttcatctgatgacagctttccgatttttgattgcttcagtacctgtgcggatcatctgatccggaggcaaccgaggtgcctgggcatgcaggcgatccagatggatgtcgaggctgtggccactgggcaggctatagcgcttgtggctgttgatagttcgtggggccattggcttggtagtcgaccagttcctggtctgacttcttcgctgcacctcgttatctgaactatatccttgagcggatctctcgtgttgaacaggaatcaccagctcatttccggggggaagtttcaatggatatggggagtgacgtccattttggattggcttggcattgctattgctgctgccactgctgttccactggctactgacaaacttgtgaccctcgccagggaaaagaatgccaaattcatagccaaaatcatacttgaagtatatcaaaccggtattgggatcgacgcatttggttcctgattacagtttacagacaaacatacacgatagagtataacttgatggttgggagttgttaggtttcgataaaaaaaaaaagggaaaatacatttcccaaagtttatgaacgcgttataatgaatgacgaataaaaggaaggattcctgggtggtgattaaattaaggacaaatttacaaataaaaaacttaaaagtaaacataaaaaagatatggtacttgtcttaaatatataaatgtaatgattttaaaaattataagtataagatttgagattagttcggattcaaaactaacaaaaaatatacaggttagtaaatgtcttcttgtatataaactgttccatgtaatactcgaaactttattaattcataacgtaaaaaattattattttatgaaatgtttgtaatttgaaccttgtaaacaataataataatgatctcaacgtgataacggattagtagtgggtccggtatgtccaacgaatgcaaatttctcaatccaatttaaccgaattctcaatattcaaatttcaaatctcaaataccaattcaaatgaggggagctgcctccaaatctctactgcggatgtggtccggagattgaagtaaagtgtggactcaccgtattgagagacgcgcgactcatcccggaaggcctgcggttgctggctgctgccctcgctgggtgcccttttgaaacccggacggatgccgttcgaagcggagctcctgatctccctgctaacatcgtcgacgaactgatgcgatttctggagaaaggtggagcccatgcgacgaccctgattctctgcctgctgttgcagggaactataaccatatcgcggcagagttccggccctatcgatctgatccatggactgctgctgctgttgctgttgctgttgcctcatggtggtgttcctgttcaaggattgagtacgattttgggtggtcactgtactgcctccgcgttgctctttccttagggtgtttatatccacgtggattttgctaggcatctcgggaccacgatcgaattccatgggggacaagaccctttcataggtgcgtggcagactgcacgatcttccagctccttgaggtggtgccactcgcctgaatcctttagtcataccatcgccgtatggagaccacaatggttggatgcgagctccatcaatctcgctctcgtaatcactctcccggaattctccgggcacaaatttagtgggcgtggctggcggtggcagatgggattgcctcgaaggcgtacgactggtggcgggactgtaggggaagggttccaggatctgctgatccctctgctcctgcggactatcgaagtgtattatcctcttggtctgttgcatattcaccacgcgctgtgaactctcagtggactcgtgcatctgcatcacattcttcgtttcggtggccaccttggccacgtgcatcggagctccagcaacagcattgtagtacatggtcggacgggatgtggcctgtggctgtttctgctgttgttgttgggttgccgctataaacttggccgccacaggttttggtttaaacacgggctggttctgctgttggttttgcataaacttggattgcttggagctagtctccgtcttgatttcatggcgtatctccttgctaatcggttcaaatttgggcctggcatagtcctgaggagtaggttcaaattccattggcgatggagttattaccactactggcgatttgtggccattggtggcgatgtttgtacgaggagtaggcgtgggtggaaagaccacgcgataccccttgatctctgcatcggattcattggcgcgggatacggaacggaatcgttcgtcaatctcactgctatagtcactgaactccgccgccggggtcttcctctgggcaggaataggactgggataggtaaccactggtggcggtgctgatgttgaagagaacttggtctcgtgatgggaggaactgctgctgctttgcatattgtgggagtagttactggtcatactcgacgaggtgtacttgtagccctaaaggaatacaaaataatgttaataaatatgataattttaaaataaatcatacataaagggttatgcaagttaacgaacggatatcaggcagatgctgaactcgattaatttgatcagtttagagtggggtaaatgaagcatcaatcaaatgaacgaacaggaactgagtttgaaccttaattttaatgtaacatgtgcatgattattaaggagcatagtgattaatcgaagtcttttgtggagcttaggtgttagctagttagctgatgggaacaacaacgatacagaggctgtttgctggtgtaaatgggagcaatcttttgacctcccagtgctagcaacaacgacaatgaacgacaatagtaacgacacacagatagacacagagaagatctaatccgaaccttcgcctcctgactgctaacattcgattgagatggtggcacctgaggtggcacctgcggttgtggcttcgccgtgaagtaaatcggtgccggtggctcaggctgcaatttcgggaattgcgtttgcaattgaggtgcgcctcccatagtggacgatgacttggtttcgtaaaaacttgactccgatttgcggtagctagaatgctcctctgtatcagctgtatagccactggacttaaaggaagtctccatggtggtcagttgtggctgcttgcgaataccgggctcaacatccgattcactgccactatacttgtaccgatcactttcatagtcgctttcgtagactcccaatcgggtgggtagaacaggaggtggtggtctgtaagtggtgttacccaaaggcttaggctgaacaggtgctgcagtgtttggtgtaagtgtgggcaccgagtgcggcaaaaccttgctgggtccttggatcaaattctgttccagcttctgctccatagtttcgaccaaagagcgacgacgtgt

SEQ ID NO: 740 - DNA, 1717 bp, DROSOPHILA
cagcagcagttcctcccatcacgagaccaagttctcttcaacatcagcaccgccaccagtggttacctatcccagtcctattcctgcccagaggaagaccccggcggcggagttcagtgactatagcagtgagattgacgaacgattccgttccgtatcccgcgccaatgaatccgatgcagagatcaaggggtatcgcgtggtctttccacccacgcctactcctcgtacaaacatcgccaccaatggccacaaatcgccagtagtggtaataactccatcgccaatggaatttgaacctactcctcaggactatgccaggcccaaatttgaaccgattagcaaggagatacgccatgaaatcaagacggagactagctccaagcaatccaagtttatgcaaaaccaacagcagaaccagcccgtgtttaaaccaaaacctgtggcggccaagtttatagcggcaacccaacaacaacagcagaaacagccacaggccacatcccgtccgaccatgtactacaatgctgttgctggagctccgatgcacgtggccaaggtggccaccgaaacgaagaatgtgatgcagatgcacgagtccactgagagttcacagcgcgtggtgaatatgcaacagaccaagaggataatacacttcgatagtccgcaggagcagagggatcagcagatcctggaacccttcccctacagtcccgccaccagtcgtacgccttcgaggcaatcccatctgccaccgccagccacgcccactaaatttgtgcccggagaattccgggagagtgattacgagagcgagattgatggagctcgcatccaaccattgtggtctccatacggcgatggtatgactaaaggattcaggcgagtggcaccacctcaaggagctggaagatcgtgcagtctgccacgcacctatgaaagggtcttgtcccccatggaattcgatcgtggtcccgagatgcctagcaaaatccacgtggatataaacaccctaaggaaagagcaacgcggaggcagtacagtgaccacccaaaatcgtactcaatccttgaacaggaacaccaccatgaggcaacagcaacagcaacagcagcagcagtccatggatcagatcgatagggccggaactctgccgcgatatggttatagttccctgcaacagcaggcagagaatcagggtcgtcgcatgggctccacctttctccagaaatcgcatcagttcgtcgacgatgttagcagggagatcaggagctccgcttcgaacggcatccgtccgggtttcaaaagggcacccagcgagggcagcagccagcaaccgcaggccttccgggatgagtcgcgcgtctctcaatacgtgccggagctgcccaatacggaacccgtcaatgcgcatctgagtcgcgatgagctggcacaaaggcagccattattcataacgccgctgaaagacatcgcggtcggagttggaggcacggcgcgcttcgagtgcattgtgcaggctcatccgcagccgcaggtcaactggacgcacaacggcggtcttttggagtcgggtagcaggcactgcatcgagtaccggaacggcgtgtgccggctaaccctgccgcaggcctatccgggtgagtacggcggacaagctggtcagccaaaggtgcacagaaccaaattgtgggcactatttacatggagtatctaa

SEQ ID NO: 741 - protein, 476 aa, DROSOPHILA
MEFEPTPQDYARPKFEPISKEIRHEIKTETSSKQSKFMQNQQQNQPVFKPKPVAAKFIAATQQQQQKQPQATSRPTMYYNAVAGAPMHVAKVATETKNVMQMHESTESSQRVVNMQQTKRIIHFDSPQEQRDQQILEPFPYSPATSRTPSRQSHLPPPATPTKFVPGEFRESDYESEIDGARIQPLWSPYGDGMTKGFRRVAPPQGAGRSCSLPRTYERVLSPMEFDRGPEMPSKIHVDINTLRKEQRGGSTVTTQNRTQSLNRNTTMRQQQQQQQQQSMDQIDRAGTLPRYGYSSLQQQAENQGRRMGSTFLQKSHQFVDDVSREIRSSASNGIRPGFKRAPSEGSSQQPQAFRDESRVSQYVPELPNTEPVNAHLSRDELAQRQPLFITPLKDIAVGVGGTARFECIVQAHPQPQVNWTHNGGLLESGSRHCIEYRNGVCRLTLPQAYPGEYGGQAGQPKVHRTKLWALFTWSI

SEQ ID NO: 742 - DNA, 7982 bp, DROSOPHILA
aagcggtgcacgggaaaccagatagagaaactgaacttccatttgatttgccgcttttccagccaaaaccatttctcttgtttatgccccgtgggtcgcttttgataagcttatttattttcacaggtggcccactaatttcttcctaccattcctcaatgtaggtctctttcggttgtagattgtgattaagctctataagtatttaattattaccagtcagtcatttatatgctcggcttttatgcttttaatttttcaatgagaggatgcctgtgattgtcgcccacttcgtcgttcgtttatttttgaaaacattataaacaatcagatctatcgcctacgattttcttatgttgcaatgtgcattagacgattaccaagatggccaatagcattcatgatatcagcaaaattggttttcaaatttgtttgcttgtaaataaaaccaaccctttgctcttaatgctcttgcaatcacttaagataatgtctaactcgatgttcttcttccaaactttgtaggaacccgatgccaagtcccgaggaaatccagtgccacacatgcgtgttgtaaattttaatgcgcccagaaaacttgagaagaacgacccagttctgcttaccatagatagaatatgccagaagcgtttttcatcagacccaggaactcaagagaaactatttgacccgagaaattgaggcaaatgtgaaacatatgtgcgagctggagtgttggcgttacatttttggttattgttctcttttgaccacgaactgaaattgaattaaccactcgcggagacaatacgaggaacaatccaaaccagctgagcaatacaattaagaagacaaacgaaacataacgaacccagtaccattccaagttaaagcatttagccccagcctccacagagacaaaggagcaactaatcctgctcgttctatgccacatcctcagcaggtcccacgccagcggtaagcaagattctcgtctacaaaatgtccctggccgacatgggcacagcctctcgatccgccggcggagaaggtggtagacactatgatctagccacgggcggagctggaagtgggggtcatccagtgggcggcggtctgcccggaggccgcatgacgcactccctcagcactccttccggggtggatggcacgccctccacaccccgacatcgcggcggcaaaaagctgactgttcgcatccagatgctggacgactcgatcaccatgttccaagtacaggtaagtctgtcttcacttagtgactaaataactcgaaattaaccaacaacaactattctattaaaaacgagcaaagggtgtaagtccttgcttcactttataaaaaatccctcaggatgcacctgtcggaacggaagtaatccgttaaattaaaatgcatctccattcgtgcacaacttttcctgaatgtggagcactgcctcgaaacaaacgggtagacgtggaaatggctgaaatatatgagaagctactttaattaaatgtgaactcgaaaacgtaagaggaaaggacaggctagtatttttgcgacaaaggcccttaggatttggtgggcgtggcacccagttcattcgtttggcacaaggccagaaaatgggcatttcttttcgctgttttccagtggcaaacaagctgaaatcaacaggaaaattgggtggggctgctgcagatgcagaacatccattcttcggctcctttgccttatggggccatttcaatagttcaatgttcgatagattgttttgcaaattgttgttctacaaattctgaatctgtaacgatcgaaaatgatagtttatgtattaatacagtgtagtaaatatagtaaatctatatgccatttccctaccacaaacagagaatgaacattttcaaagacgtaaggttgtcaatgtaagcaatgccttatggaattgcataccgggtaccttaaagtcgaggctttcgaattgaatttagatttttagggcaatgattcattcggggtctgggaactgttggcagctggtgctgcacttgtctgagtgccgacaacaaatcgcatttatgcaactgaatctgcccagaaatacactaggtgtgcctatttttgcccatctccttggccaggctcttactcgcattcgtctttgacctgtaagtcaggcactttaggctggttaatggattctgccatagttgacgctgtttgctcattctgccggtgtttcttgcgccacttcctggctccattagcccggcctagtgaaaggcttagaactttttgtttcgcagtttaagtggccacgcccaaatgtgtacacttgaaaaatgacgaaataaaaacgtattttagtttttgtgaagattttgcaaatggctaagctcaactaattgttgacgttggagttatttgatgtgaaaattacaaaaaaggacgaatttattgagttcttagagttcagtgtaccccgaagttttccctgaaactgtagacacattccaaatttcgaagggcttcaacaggcgaaacggacggagagcctgcgagaagtggatatgtttcagggcaacatccaattggttgccattgcttgggtggctgtggttttggactgggtgttagccacctcgtcgtcctcgttgggcttctggcctaatcttttctcgaaacagtggcacttgaggcgatgccgcagctccgtaaacgttgtaaagggccccggacaaaaatatttctactcgagtttcatgcatccgctatctgcattcttctgctgacatttttatatttgcctgtggtaaactgaacattttatacgaaagagggaatcgcagacagtcgacagctgttctcgccgtttaaggtcaaggattaaagatctatcgttatactatttatgttatttaacttacaaacttaaaagcacaacaagaggggtcgctacagacccgagttctaactaaaatactaccaaatttcagttcacaaattcttgtgacttttttccgtggtaaatcaaatgtccacatcagctaaaattatttttctcgccgcattgaaaattcaatcatgttgcaatttatgcagtgctcacaagtccttgtaaagcacctagtacacgaaacgttctatatgttttgacatggttgcactttttgtgaaacccaaccctctagatctgttttactgcaggactgctatttgccagtttttgcttgtgtgtgtcgtcccttaactagaaatgcatattgttgcattattgatgaaggcttctaatggattttgtgtcttgtaaatggtagtatggttttgaataggaatgaggtaggaaaatatcccaaaggcgatgaggatgtggtcaaacttgaggctagctcttgaactaccaaatgcattttcaagtcaaagtgtcacaattacctccaaaggaacgagatctccgtaaaagtgcgataaattttgtgaaggtgatagcagcttatgatctgtttattttacttatagttttacttttccgaatttctcttattttcctaccgaaagcgttttctgctgcaaaatttttctgcccacgcacaattttaaaaagcttatctcaataatgagatattgcagaataatgtaagcccatttgaaaattaataaagctatgacgcaaactattgcttccaaaggttgagcaaaattaagcaacttttctggaagaaacttgtcattagctagttgacaagcccagctcaatggggttagcggaggacattcgataggcaagaacaatacaagtggaacgagatgagaggtcacgccctttcacgcctctcttcttcgattgccagagtatagactcacatgcactaataaaatatatatgtatgattggtaattaaacacaaacatacagtagtataaattattatcttaacaaaaacaaaaacgaggtgctcgactccccgaatctggtcacagaacaaaattggaagcaatgtgcggttttcttcagtgtatatgcggcacctgactgcagtgactgatgctccttgtcccgcttctgtctttcaatggctacaaattgaacaatcgagaatatagggccaacttatcgcatctgcatgggtgcaagtcggtggaaaggttggttgcattgaaaagcttcctgtcgttttgccatttccgttcgcagtgcctgcagaagtcgcgaaagttaattggcttgttgcgtagttgtagaagattctgaaatcggcctaaaaagataaatggctctggggcaccaagccgctcccaatgaatggccagcagatatatgcatttcagcccgtatgcctaggacaggaaaatgtcatagcttgggcgtggctctagccccattgtgacttctggctggaaaccagaaaaccatgagtgcggaggtgaaggagccgaagtgtggggcgacttttagaggaactttggcacacattcaccccactcttgtgtgccaaattaattaaaacatccacgaacggggatgggagtggtttttaaattgtgccaataaaatttcagttttcagacgagtttctgaaaaccacttaaagacatctctaatttcaccacagaggcaagcacttttaatcatatgtgaatgataataatcccgataataataaaatactttaatgcaaatgatagcttcgactttaaaatcgataattagtaatctgaccatcaacaacttcttttgacctttgcgctaaaaagccgcaaaaccaatttggatatcagccaacgaattgtatgcgccctataccaggaggacttacatacgtacattttggagcatcaaatatttaaataacacacaaaatgggcaaaggcaggcttaataccacattggcacgcctttctaaacatttcacactctgatagattgttgcccgattttatggggctggcaacaaaatcgaatggacacagcactctgcttgattgggttcttaggggctaggcgaatcccctactttgccgcatgccgtaacatctgcgaaggattggttcttgatcccgaattaatgtatgtcgcagctgcaaatttaaatggggttcctgttaggtgttatgccgagaatattggtgtttcgaatgtggtcctttaatatttgtgaacctaatttattaattgttgaagtcaattaggtgaatgattctatggcattaaaacatttatgtccgaattgggaatgcctctgagtgctaataatttcattagagaggtggatttcccatccatatattaaattgattgctccttgattgccaaataagattttagttggaagcactcgtatactcgtatgcgtataatgtgctaggcctattttcgctctaagtaaccacaacgatatctgctcacatcgcccgtcgtcactgatgctttattcaacttaattgctgccgtcgacccaattgaaatttattcaaatgcaatcaggcgcaacgcccacaaagtatttggattgtggcctcatctccgatgagccgcaaactgcatgataaattagatattcacgagctcaacgaattcggacatcttgtccacgcccgaagccttctcatagaaccaacaagctcagttatcaacccgtcggtgtctggggttttttggcaaaatcttagtttgatttaacgcagtgtcatttctctacctttatttttataggctaaagcactgggccgcgtgctgtttgaacaggtatgccgtcagctgaatttactggaggccgactacttcggcttggagtaccaggaagtctccacacataccaaatactggctggatctggagaagccaatgaaccgccaggtgggcctctctcttatcgatccagtgctgcgcttctgcatcaagttctatacacccgatccagcgcaattggaagaggagtacaccaggtgagttaggaagtaaaggatcgagaaccaacccaaaatggtggtggtctcaaggcaaaacatatgcagagactatttcattttcaaaagtgaatatataaaggtgtttttgaattctttaggtatttgttctgcttgcaaatcaaacgagacctggccacaggcagtctgcagtgcaacgataacacggcggccttaatggcaagctacattgtacaggcgtcatgcggcgacttcgttccggaggattatcccgaccatacttatctgtcctcgtatcgctttgtgcccaaccaggacgccaccatgcagcgaaagattatggagaaccacaaaaagcatgtgtatgttaattattatgtcaaatagtttaaagttctctaaagtttttttttttttccctaaccagtggtcaatccccggcggaggcggaccttaacctcttggagacggctcggaggtgtgagctgtatggcatgaaaatgcatccggcgaaggatgtggaaggggtgccgcttaatctggctgtggcccacatgggcatcacagtcttccagaacatcacgcggatcaacaccttctcgtgggctaagatacgcaagatttctttcaagcgcaagcgattcctggtcaaactgcatccggagggatatgtaagcagttactttactgcgtttcccgtaataataattgttatactgctttagggatattacaaggataccgtggagttcttcttcgagggtcgcaacgagtgcaaaaacttctggaaaaaatgcgtcgaaaatcacggattcttccgatgcactgccgtacaaaatacgcccaggcgcaaaactcgcgttctctcgcggggtagttcattccggtatggctttcttatcattgaaataaggatattaaatgtaattattttattcgcattgcagctatagcggaaaaacccagaagcagattatcgagttcgttcgcgaaaattatgtgaagcgccaaaacttccaaaggtataaaacgaattcaagctgagcattactttttaatcccagatttgaacatcataatttctgtttgtggtgtaaccaacttaaaataatgctgacaaattgcttgagttcctgaagatatatattttcctaacatttattgttgacaaataaatacatatattaagcttttgctaggcagcttatattttccaaagcaaaaccaaaaaccaatttcgcctcaaaattctaatccagtcttgtacgagcattgaatatatgtaatatatttattcatatacaattatacttttaagcaaatacaaataatatattcatcagcctacatagcctaatcatcttgacttcgttctcatttaactcgactcgtttgttcgttatttcttacacattttattacactcgctacatgtggtttttgtttattattttcaataaaatttcttccttcccatccaacttatacgaaaattccaaagaacacaacatgaaaaaaataactaacaagatcacaattgcgccttagaaaagagaagaggatttaaaaaccaattggtacaaaaacagtaactgcaaaaaataaaaatagcacctaagcttaaaatagttcaattaaaaattaaagaaaccccaaaacaaaaccccaagtctagtcaaatgtacaacaaagaatgacaagcatttcaattactatcgctattgatttgacatttattttccgtataaacatttaaatgttctttcttgatttacttcactttccaatgtgggggtgcttaaccatatgtcagtgtgtgtgttgaccgtaattcagtttagttttaaaacaaatgtagatgtagatacagtttgatttagtgaaccaaccttgcaaccgaattggcaactccaagcattctgatttcttttccatccatccaatacagctacctccccgttctaagcctcattattaaaaaatccaccgattgtggtaaaaactcataaccagtatggctttcaactaaaaattatcattttaagta

SEQ ID NO: 743 - DNA, 1220 bp, DROSOPHILA
aaatgtccctggccgacatgggcacagcctctcgatccgccggcggagaaggtggtagacactatgatctagccacgggcggagctggaagtgggggtcatccagtgggcggcggtctgcccggaggccgcatgacgcactccctcagcactccttccggggtggatggcacgccctccacaccccgacatcgcggcggcaaaaagctgactgttcgcatccagatgctggacgactcgatcaccatgttccaagtacaggctaaagcactgggccgcgtgctgtttgaacaggtatgccgtcagctgaatttactggaggccgactacttcggcttggagtaccaggaagtctccacacataccaaatactggctggatctggagaagccaatgaaccgccaggtgggcctctctcttatcgatccagtgctgcgcttctgcatcaagttctatacacccgatccagcgcaattggaagaggagtacaccaggtatttgttctgcttgcaaatcaaacgagacctggccacaggcagtctgcagtgcaacgataacacggcggccttaatggcaagctacattgtacaggcgtcatgcggcgacttcgttccggaggattatcccgaccatacttatctgtcctcgtatcgctttgtgcccaaccaggacgccaccatgcagcgaaagattatggagaaccacaaaaagcatgttggtcaatccccggcggaggcggaccttaacctcttggagacggctcggaggtgtgagctgtatggcatgaaaatgcatccggcgaaggatgtggaaggggtgccgcttaatctggctgtggcccacatgggcatcacagtcttccagaacatcacgcggatcaacaccttctcgtgggctaagatacgcaagatttctttcaagcgcaagcgattcctggtcaaactgcatccggagggatatggatattacaaggataccgtggagttcttcttcgagggtcgcaacgagtgcaaaaacttctggaaaaaatgcgtcgaaaatcacggattcttccgatgcactgccgtacaaaatacgcccaggcgcaaaactcgcgttctctcgcggggtagttcattccgctatagcggaaaaacccagaagcagattatcgagttcgttcgcgaaaattatgtgaagcgccaaaacttccaaaggtataaaacgaattcaagctgagca

SEQ ID NO: 744 - protein, 330 aa, DROSOPHILA
MLDDSITMFQVQAKALGRVLFEQVCRQLNLLEADYFGLEYQEVSTHTKYWLDLEKPMNRQVGLSLIDPVLRFCIKFYTPDPAQLEEEYTRYLFCLQIKRDLATGSLQCNDNTAALMASYIVQASCGDFVPEDYPDHTYLSSYRFVPNQDATMQRKIMENHKKHVGQSPAEADLNLLETARRCELYGMKMHPAKDVEGVPLNLAVAHMGITVFQNITRINTFSWAKIRKISFKRKRFLVKLHPEGYGYYKDTVEFFFEGRNECKNFWKKCVENHGFFRCTAVQNTPRRKTRVLSRGSSFRYSGKTQKQIIEFVRENYVKRQNFQRYKTNSS

SEQ ID NO: 745 - DNA, 3359 bp, DROSOPHILA
gattttcaaagaatggaaatggtgttgaatgagatcagctcgatttggtggccaactggtttcatttcggccccttcacacgatgatttcattgaatttcaagcggcaaaaagatggattgtagcaaataagatgtcgggcctgaaatggttttcaattcagatgctctcagatgctgctaccccatgcatattattcaaaagctggcactttttatgctggaaaaactattcgcatcatcatccaaatgaaaaatagcacacttttgattgtacatgttaagcaactgatattgatatgccttgtatatttttgcagtataatgacgtcatataacaatcaagtcattttattatttcaattttgcattcatttgcatttttaaattgtgacttttttccatttctgccagtcgaaataaattcacacagcccacattcaatcagttcgacacacacctacgaattgtcaatacgcatacaatgtattttcaacattttattaataaatggcttgcctttaagtatcccaaaattaaaatttagccaattccaaactgttatttattggctgaaatcaatttaagtcattggtttgatcaattgacacagcaaactcatcgcttggcagccaattaaccttcaatttcagacaatcttggctgagaattctctgtttttctgggcacgtgcaaagatttctatagtaggtataaaaatatcttttggaaattcttcgtgttcacatctagctgtcgtgaggttaaactggttcaaagcggtaaagagctatcagtttcttcagtagcatcgcctattttctcattataataaaaataatatgccaacaacaaatcaacaactgataaacttatgatgatgataaaataataattgcagaaagcaataaatgaacacattcattttagatgtaaccaagctgccctttcaaaatcaatctgctatgtagcattgattagtcttgtctcaaaatttgtttagctaaattgttcattaaaactgccaaaactcataacccccttcttattattacctttctgacgttgtacaagatactcaatacagtacaccacatataatttcgaaatgcttttggcccgtttaaaccatgtgctgtcaggacgaccgatgcgccttttgggccagtctggatgtcctcgcctgtggagctcagcccatgcgcagatgaacagtaattccttaagaacaccttccttggctcaaggaaagtcagtgattcctaaaaggaatatgcaagaacttgggatgagaaagtattccagggagtcgagagatcgcgatcgttcccaactggagagtcgaaccagaggtccttccctcaaggagcgcatgatgggaccccccagtgaaaatgcttactccatgggcaagggagcggcggctggagcggctctgatgggtctcgtgggtctgtgctactatggtctgggccttgccaatcaaccgagtatctacgaccactcgatggtgtggccccagtacgtgagggatcgtattcatgccacctatgcctatttcggagcatcctgtggtgtaacagctgcttcagccgttgcctttttccaatcggatgccatgatggctctgatgacgcgttctggatgggttgcctcattggttaccctgggactggtaatgctcagtggatccattgcacaaggcctagaatatcagccgggattcggagccaagcagctggcctggctcgtccactgtgccgttctgggagctgtcctggcacccatgtgcctcctgggtggacccattttgaccaaggcccttttgtacaccagcggaatcgtgggtgccctgtccaccgtggccgcttgtgccccgagcgaaaagttcctgcatatgggcggaccgctggccattggattgggcgtggtcttcgcctcctcgctagcctccatgtggttgccgcccactactgcagtgggggcgggactggccagcatgtcgttgtacggcggactgattctgttcagcggatttcttctgtacgatacccaaaggatcgttaagtcggcggagttgtatccccagtacagtaaattcccttacgatccaattaatcatgccctggccatttacatggatgcgctcaacatctttatccgcatcgcaattatattggctggagaccaaaagaggaagaactgagttggtttaaggtgtaggaaaacctaaatttattcagatacacaaaataaaccgcctggggttttaccacaaattgtataatttagttagaattacccattttcatattttgaaatgtatcttttcgaaattgttcgaagctaaagcacaaatctaaaaaataacattaaatttgaaatggtttttcaaatttctaaaaacaagagagtacgaaacaaatataaatttatgaacaggcaacaaaattgtgtatttagccgactctacttaagattccgatccgaaacatttccatctccctgaaatatatttgtcaacgaatatagtataccctttttcgggtcatttaagaatcttattattaagaaatctatttaaattgcttttgaatttgttcttttccctgctaaagcactgtactgcttcaagattttggcgatttttagcattattttgttctgtatgctttgtttctgacattgcgcatacgccgtgtataaccgcggcataaaaattcgtttgtgttctatgtgaaattccgtcgctggccgttcgtgctcgccttctatctgccgcccacacagaccaacacgcttgtctacttgtcaatttcatttaattttgccgcattttccttttctctattttttttttactgcaagcttttgtatggcgaaaacaatttttttaaatgaataaagaatgaaagaattgccgcgacaagagcaagcagacttttaaaattatatgtgtgcatattatgtattataaggattttttaatgaatgagttcaagttttagcgcatttttcattaaattaagactctcaaatcggtttgcattgttcattaaatatatttactttattgaggttaataaagtcaacttggggctattaaattagattaaaatcgtattaactttgtgctgattgcttttgagcttaactcttaacgcgcattgttcatataggcttttaaagtaatttgttaaggaaaaatttaattataaatttgcttaggcccaattgccaacccacacatcctttaatgactccttgacctgtcggatgacaatcgctttcgcttgaaaagctcttcccttttggccttctaccatcctgttcattcataacggccaagctttcattctgc

SEQ ID NO: 746 - DNA, 1359 bp, DROSOPHILA
gctaaattgttcattaaaactgccaaaactcataacccccttcttattattacctttctgacgttgtacaagatactcaatacagtacaccacatataatttcgaaatgcttttggcccgtttaaaccatgtgctgtcaggacgaccgatgcgccttttgggccagtctggatgtcctcgcctgtggagctcagcccatgcgcagatgaacagtaattccttaagaacaccttccttggctcaaggaaagtcagtgattcctaaaaggaatatgcaagaacttgggatgagaaagtattccagggagtcgagagatcgcgatcgttcccaactggagagtcgaaccagaggtccttccctcaaggagcgcatgatgggaccccccagtgaaaatgcttactccatgggcaagggagcggcggctggagcggctctgatgggtctcgtgggtctgtgctactatggtctgggccttgccaatcaaccgagtatctacgaccactcgatggtgtggccccagtacgtgagggatcgtattcatgccacctatgcctatttcggagcatcctgtggtgtaacagctgcttcagccgttgcctttttccaatcggatgccatgatggctctgatgacgcgttctggatgggttgcctcattggttaccctgggactggtaatgctcagtggatccattgcacaaggcctagaatatcagccgggattcggagccaagcagctggcctggctcgtccactgtgccgttctgggagctgtcctggcacccatgtgcctcctgggtggacccattttgaccaaggcccttttgtacaccagcggaatcgtgggtgccctgtccaccgtggccgcttgtgccccgagcgaaaagttcctgcatatgggcggaccgctggccattggattgggcgtggtcttcgcctcctcgctagcctccatgtggttgccgcccactactgcagtgggggcgggactggccagcatgtcgttgtacggcggactgattctgttcagcggatttcttctgtacgatacccaaaggatcgttaagtcggcggagttgtatccccagtacagtaaattcccttacgatccaattaatcatgccctggccatttacatggatgcgctcaacatctttatccgcatcgcaattatattggctggagaccaaaagaggaagaactgagttggtttaaggtgtaggaaaacctaaatttattcagatacacaaaataaaccgcctggggttttaccacaaattgtataatttagttagaattacccattttcatattttgaaatgtatcttttcgaaattgttcgaagctaaagcacaaatct

SEQ ID NO: 747 - protein, 305 aa, DROSOPHILA
MRKYSRESRDRDRSQLESRTRGPSLKERMMGPPSENAYSMGKGAAAGAALMGLVGLCYYGLGLANQPSIYDHSMVWPQYVRDRIHATYAYFGASCGVTAASAVAFFQSDAMMALMTRSGWVASLVTLGLVMLSGSIAQGLEYQPGFGAKQLAWLVHCAVLGAVLAPMCLLGGPILTKALLYTSGIVGALSTVAACAPSEKFLHMGGPLAIGLGVVFASSLASMWLPPTTAVGAGLASMSLYGGLILFSGFLLYDTQRIVKSAELYPQYSKFPYDPINHALAIYMDALNIFIRIAIILAGDQKRKN

SEQ ID NO: 748 - DNA, 3231 bp, DROSOPHILA
tcggtcgctccgttcgattaccataccaacgaccggagatgtgaccccaaggtgccggtattctaacctccttgaactacaaaatagcaatactggttactatgttcattaaaatcagtatgaattaaagtttttttttttactatacactttcagtttctgcactgtaaacaaaatttgccggtacacggattaaggttgcttatcttcgtatttcgtctataatattatttctggcatactcacatcgcttagagacatagttcccatatcgattagtggtttgctgacctttgcacgtctgtaaattggtccgaaatccagaaatgaaggcaccgcgttatcttaagtatctaaacacctgcaaataactcggcgattcggcgattcgcacctctttcggctacaacagctgatcaacgactaatttctaaaattgttgtttcacttttgaaagcgaacgaaagagaaaaaacgccgatagaaagagtagctgtttttggcgcggaaacaaatcaccaactataagagagcgaagaatttgtttttcaaatagctgattaaaagtattaccaatttttagcattgtttacattcgcgtttgtctatttaaatgttgatatattttttgtgtattaatacgagctcgttgaatacctattctttcgaaattcgtaaaaatattttaaaattgtagctggcactatgataatagccaaagttcactgaaaaagcatagcgagggtggtatggtcccattgttcttatctcctattgttatgattttatttatttgcttactcattcgcctaatgacacagatctcaaaagacgatagccctttgcactttgattcttagactgggtccagtccacttccaaaattatcttaagtatcaaaaacatattgtttaatatgatagtttaaatttaatacttgtcgtgtgttcacgttctcaaactttaaaacctttacaactaaagttacagtgtattattatcacaacttgctgcgctttttgttggtccatgtgaaaaatcgctttggttttctcgatctatcttcctttccggccacagtccaggaggtcatagcaggaggtctgtgatgttggatgaagggcacaatgtaaccggcgcattcctcggcggcatggagatgcagatgatgggtgccgttttccacctcgtagaactcaaagtgcggattatccttggccaaaatcgatatagcctcgttgttgcggacggagagatatggtgacaaggagcccttgatgattagatatggctttttaatgatccgcctcgccatttctgcccccagactatcgtcgatatctatgtagtggtagtactttactcgaatatccctagtgaaatagaaccgttcgggatacagtttcgacttggccaactggcggtggaggaggtgcttagccagttcgggggatacggaattaaagcttcccgcagccagcacctttcccaattggttgtgcgtgtaggagggcggctcaatgtaatttcccagcttctgtcgctcaacattcactagttgtttctctatactaaggtccatgtagtctatgtcgtttctcaaggggagcagtatgtccagggagacgatcatatcgacggtgtgaggagcaagagaggcataaatgaagctcaggactccgcccagtgagtgtccaatgagagagacctttgaccatccgtactccttcatgaccagtggaatagtgaacacgtactcgtacacactgtagtacattcccggtggcaaatgcgaggatcttccatgtcctggcagatcgatgcagagtactcctagatagtcaggaagcaggggaatgagccgatcgaaggttcccaggttgtccagccatccgtgaatcgccaagatgggtcgctcgttccgatttccgtaccaacgtccagaaatgtgaccccagggtacgggaatcttcacagcttcgaactgaaagatgcataaactgtattagtcacttttagcagatggtcacacaacagatggttgacttacacttaagattacaaattaataattggtgggtaaaggttgtctattaatctattaatgtacttacatcgctcagtgacaaagttcccattgctcttaattctcgatttaagtagtactggtttttgcttatcttaatttgctctaaatcatttgtattccgtttgattgtctactcgtctttctgctttaacatgttggcgcaaactaacatattgtattaagttgggtttggtattactcaaactgcaaacaaaaagagatcttgctattctcttaattaactcttaattaataattaagagagcgagataagattgggttctaagttgtattctctcacgagctcttattacaacttccaattacagtgtataaaatgcatagaatgatcttcgtgttcttaatcacatcaagttgttgttaactattgtttatgtacattagtttatatttcatttattaaaatacaaatatctagaaattcgcgagcgcttaagttgacataacaaaaacatgaataagcaagctttcgatgagagaaaaagctttcgagtgtttcggggcgaatgtcaatgtgagatctgttaaatttaaatattactttgtatcctaaaagaagatccaaatatttggatttagtttataatccgaatttcaagtagcaaatgaaattgatacactggtctgtatcaaatttaagtcaaaagcatgtaatcaaagtcatctgctgaaattatgaacaccaccgcataaaccaaaaagcctacaaaagcacgttaagtgcttgtagattgctaacttaaaaataccgtctatttataaacaaagtagctccgcctttattaccttttgaaatgaaaaacgcgtaacaacaacaaaatcattcataaatactgccaagtactaatgactctaattttaacactgattattgcacattcttagattaaactcgcgatcgcaagatcggaatttatgctcttgctattaaaactaaattaattgcgattggatttgactataactttccttggaacagagttgctcccatcggtggtcgatggtactgaataaagggacacatgtacttcgcacactcctcggggaattccaggtgaacgtgatgggtaccgttttccacttcgtagaactcaaagtgtggattatcctgggccaaaatg

SEQ ID NO: 749 - DNA, 1101 bp, DROSOPHILA
aaagacgagtagacaatcaaacggaatacaaatgatttagagcaaattaagataagcaaaaaccagtactacttaaatcgagaattaagagcaatgggaactttgtcactgagcgatttcgaagctgtgaagattcccgtaccctggggtcacatttctggacgttggtacggaaatcggaacgagcgacccatcttggcgattcacggatggctggacaacctgggaaccttcgatcggctcattcccctgcttcctgactatctaggagtactctgcatcgatctgccaggacatggaagatcctcgcatttgccaccgggaatgtactacagtgtgtacgagtacgtgttcactattccactggtcatgaaggagtacggatggtcaaaggtctctctcattggacactcactgggcggagtcctgagcttcatttatgcctctcttgctcctcacaccgtcgatatgatcgtctccctggacatactgctccccttgagaaacgacatagactacatggaccttagtatagagaaacaactagtgaatgttgagcgacagaagctgggaaattacattgagccgccctcctacacgcacaaccaattgggaaaggtgctggctgcgggaagctttaattccgtatcccccgaactggctaagcacctcctccaccgccagttggccaagtcgaaactgtatcccgaacggttctatttcactagggatattcgagtaaagtactaccactacatagatatcgacgatagtctgggggcagaaatggcgaggcggatcattaaaaagccatatctaatcatcaagggctccttgtcaccatatctctccgtccgcaacaacgaggctatatcgattttggccaaggataatccgcactttgagttctacgaggtggaaaacggcacccatcatctgcatctccatgccgccgaggaatgcgccggttacattgtgcccttcatccaacatcacagacctcctgctatgacctcctggactgtggccggaaaggaagatagatcgagaaaaccaaagcgatttttcacatggaccaacaaaaagcgcagcaagttgtga

SEQ ID NO: 750 - protein, 335 aa, DROSOPHILA
MGTLSLSDFEAVKIPVPWGHISGRWYGNRNERPILAIHGWLDNLGTFDRLIPLLPDYLGVLCIDLPGHGRSSHLPPGMYYSVYEYVFTIPLVMKEYGWSKVSLIGHSLGGVLSFIYASLAPHTVDMIVSLDILLPLRNDIDYMDLSIEKQLVNVERQKLGNYIEPPSYTHNQLGKVLAAGSFNSVSPELAKHLLHRQLAKSKLYPERFYFTRDIRVKYYHYIDIDDSLGAEMARRIIKKPYLIIKGSLSPYLSVRNNEAISILAKDNPHFEFYEVENGTHHLHLHAAEECAGYIVPFIQHHRPPAMTSWTVAGKEDRSRKPKRFFTWTNKKRSKL

SEQ ID NO: 751 - DNA, 4775 bp, DROSOPHILA
aatttgtttatttttcccagcctcgcaagtccgccgggtattctgcctccccgcaggcttcaccgcctacccacccagctatccagctatccagccagtgggttttcgattcgatttccctgtttttccatccatccgctccaatgtttagagtgcggcataccttccggacccgctggaaatccgcccacacgaaggatgtccatacccatatatacgtatgtacaccatataacctccgctccgggcggcgctccacgttcctttgtttttgctttagcattgtttttaagtggatgccggcacctcctttgttcctggtgcattggttcggggaaaagtgggagccaccggcagttccgatgcccttatcactaatgaagtggccaatgaactgtagccccaaagattaaagcgaaattaaatggccagccgaaaattgattgatcgaaaaaggtgcgcaacccaaacaagaacacagaacaccaccggtgaggaaaataaatgagagaaattatttaaaccgatttaggttgcggtttgccgtattccaatatgttgtgcggtcaggggttaagagcgataaaaagtgtgtgtatctcaccacacactccaaaagaattacgttttaaattggcttaaattcacggcagatgccacaaactttttcagtcaagtagtatttccaaatagggaggaggatgcttccattttatcatatttgtgattatgtggtggcccaaagaatcagttactagctagctcgacagatggttttaattaaatcaaacattatttattgttagaatacttagtacaagcaaagtatctatccaacttgttaggatcttgaacatcgtataaaattgtctatattattactctaaagcgttaaggcttgaagaaagcatcacgtcggcataatgaaatcaatatcttgtttcgcatcggaaattttcgcatcgcgctgctgactgaatctcagagatgctggcagcagctataggttgctttttctcttcctccgcttgacattctctgaatcctccacggccaacttgaattccttgacgacctcgggcagcgtctcatccgtcccgtccaccgtccagttctccagatgcggtgggcggtggtgcagaatgaagggattaatgacggccgccacaccctgcgcattgttgaggtgaacgtggtgggtgccctgcacttcgtggagctcgaagtgcgggttgttctccctgaggatgccaatcacctcgtcgctctgctcgtctatgtagttcgactcggagcccttgatcacgcagtagggcacattcttgatggtcctggccagttcagcggcgaagggaggactcgtatggaactccgtgtagtacttgcagcgaccgtcgcgcgagaagaagaacttggccgggaacttggtggaacggctgatgttgcgctccaggatgtggcggcagttctccagctccaccgagtagtcggtgcctttgtacaggacctgctccatctctgtgtaggtataggccggcggctcctggcgcttggaattcgcaaatcgctcgtcctccacaatgtagccctcgatgttcttgcgcagatagtcgatctgcgaggggggcttcctatagcgggtcttcactatatctatgctgaccaacatgtcggtgcgatgtgggtacagcgaagcgaatacgaagcacagcatggcgctcattgagtgggccatcagggacaccttctgccagcggtactcctccattacgcgcaggatcacgcacaggtagtccacgaagtggtaggcaatcccctcgggcagcttcgaggagtatccgtggccgggcaggtcgatgcacagcactcccaggtgcttcggtagcaggggcagcaatttgtcccacgtgcccaggttgtccagccagccatgcagcgccaggatgggtcgtacctgccgattgccgtaccacttgcccaccacataaccccacggcatgtcgatgcgcacgtccatgggctcctgaaatgcacagagagaaattgcttagaataatgttcacctaatatcacaattacaatgcacaactaaggtgtctcaccattaacgcaacctaacgttaaggcaacaaatcactacaatataccttatttatatattatttttcctggtgtaggaaagtaccgaaaaagagttgcatgagggaaaaagttggttgcaaagaggtggttttggaaaagggaaggggatttgtccagcttgttagctgttaattgccagtgggcaacttggtagctgctttcggcccgctgtcaaccagttggcttagatgggttttcagtttagcagaggatgccgaacagactggcctggcaggcaagaaatgcgccaatggcgtttaccaaacttcattttgggaatgcttatttgcaatttcctatgcaccgaacactttcgcatttacagagactcgttcaataaaaagtattataaaattaaatcggctggcagaatactttcattcaggcccttttgatgacccaagtcatatggccatatcatttatctccgcccgtgcgaactggtgcgtatttcaccatccccagcgatttgatcaattggtttgctggaaaaagttgaagtgcctgacaactgagcgagtttttcggacggggaccaggtgtcaactgatggacaggaggccccgcagtgccactagctgcctgggccacaatttatcatctagttcttactttgttttgggctccaatcgataagcgattgtgtatccactgcaattgactgatgctgcacatgcaaaccccgcaaagttcgaacaaatggattttcgtagtttgccaccacagagaaactttttccgagctcggtttagcacggtcgctcaacttgaaaattagcgccgagcactttcaactgtaacgacattttccgaggggtaaatacatatatatatatataacagagggtgaggaagatggaacggagaacttttagagcatccgcccgactgtttgatgaactcctaatgagctagataatcgaagaatactaatttgaacccattagcgtacaccaagcaaaaagctggagtcaaaaaataaagattaattggacggcaaagtttctattgtatcaggtgtttgtacttttgcctttatatttacaagtccagattaatatctttatgatatgaagccattatcagcgctgttttctagatcattataagtgtataagtggtttatgactaaagttttcgcccccgttaccacttaaccagaacaacattccgccggtagctgatgggtccaagtagacattgactttgattccgcattagcgggaatcttatcagttcgaagagtccaaggcgataagaatgcaattccgttcaaaggtaagaaaggcgaaggggcagctaaacgtgtctgatccgtcgatctatttagctcgataacaggacgagcaaacgtctagcaaatctttataatagacgcccgccggggatctaatcaactccatataattacctgttcatgcgtctcgatggggttgcctcgaccttcggaattcgatgtcattttagttggcaatctcggtgaataatacaatctaaatcccaactaattccgacacacgccgtgtcggaaaatatatacgcaaggtgttgtgggaaacttttctatttttatactgcactaactaaattagttgaacactagcgagatcgagccgaagagaagtgcccgctagcggggcataaataaaactaaatcttatttcgccagagaagccgattaaatcccaactgaggccgaactttaatcagcggtgtttccaaatcagaaaacgggagaactgcttcaagagaatgggaaacgaccctataaagagactctacatagggagaactaaataaagcgatccatcgaaagcttttggggggaagatatatgcttagtcagtttcggttgcgatatggaatgagagagtctttatcggtgagcggggaaaaagctctacaatgtcatgcagacctaactaacaacaaatttattatggatcaaaggttaaaaagttaaaagaaactgaaagcattgattaaaatatatctgctgaaaatgaaacaagtcaactaatatatgtaatgtcgccacttaactaattaagaatgcatccactgaaagttaacatctttaaacagtatttttttatgttacaactgcgcgcacattaaaaaatccacaaattgcgtataacaacaaaccgtatatagaaaaaacctaagtgacacgccaattaaatcaaattattgggtttcgaataaacagagaccaaggataacattgaaattacaatgctcataacgcaaaatatgtgctcacccatataaaatcgaatatttacccagataaacatcaatatttatggatttttcatattccaaaagtgactatcaaataattgatgcaaacatgccaaacctcataatgccaaaccagaaaataaagcacactccagaatattgctttttgatcgaactacgaagatatgtatgtaggtagaaaaaatattaaacttttcatattttattattaatttttatgagattggcagaaaaagagcactcacgcattgcactaaaatgcaaatgaattcgatttgtgtgttctttatagcattttttacgcagccaacaatcggttcaaaaattaataaacgagcaaatcaataaatatttatttaactctcg

SEQ ID NO: 752 - DNA, 1246 bp, DROSOPHILA
ctagcgggcacttctcttcggctcgatctcgctagtgttcaactaatttagttagtgcagtataaaaatagaaaagtttcccacaacaccttgcgtatatattttccgacacggcgtgtgtcggaattagttgggatttagattgtattattcaccgagattgccaactaaaatgacatcgaattccgaaggtcgaggcaaccccatcgagacgcatgaacaggagcccatggacgtgcgcatcgacatgccgtggggttatgtggtgggcaagtggtacggcaatcggcaggtacgacccatcctggcgctgcatggctggctggacaacctgggcacgtgggacaaattgctgcccctgctaccgaagcacctgggagtgctgtgcatcgacctgcccggccacggatactcctcgaagctgcccgaggggattgcctaccacttcgtggactacctgtgcgtgatcctgcgcgtaatggaggagtaccgctggcagaaggtgtccctgatggcccactcaatgagcgccatgctgtgcttcgtattcgcttcgctgtacccacatcgcaccgacatgttggtcagcatagatatagtgaagacccgctataggaagcccccctcgcagatcgactatctgcgcaagaacatcgagggctacattgtggaggacgagcgatttgcgaattccaagcgccaggagccgccggcctatacctacacagagatggagcaggtcctgtacaaaggcaccgactactcggtggagctggagaactgccgccacatcctggagcgcaacatcagccgttccaccaagttcccggccaagttcttcttctcgcgcgacggtcgctgcaagtactacacggagttccatacgagtcctcccttcgccgctgaactggccaggaccatcaagaatgtgccctactgcgtgatcaagggctccgagtcgaactacatagacgagcagagcgacgaggtgattggcatcctcagggagaacaacccgcacttcgagctccacgaagtgcagggcacccaccacgttcacctcaacaatgcgcagggtgtggcggccgtcattaatcccttcattctgcaccaccgcccaccgcatctggagaactggacggtggacgggacggatgagacgctgcccgaggtcgtcaaggaattcaagttggccgtggaggattcagagaatgtcaagcggaggaagagaaaaagcaacctatag

SEQ ID NO: 753 - protein, 332 aa, DROSOPHILA
MPWGYVVGKWYGNRQVRPILALHGWLDNLGTWDKLLPLLPKHLGVLCIDLPGHGYSSKLPEGIAYHFVDYLCVILRVMEEYRWQKVSLMAHSMSAMLCFVFASLYPHRTDMLVSIDIVKTRYRKPPSQIDYLRKNIEGYIVEDERFANSKRQEPPAYTYTEMEQVLYKGTDYSVELENCRHILERNISRSTKFPAKFFFSRDGRCKYYTEFHTSPPFAAELARTIKNVPYCVIKGSESNYIDEQSDEVIGILRENNPHFELHEVQGTHHVHLNNAQGVAAVINPFILHHRPPHLENWTVDGTDETLPEVVKEFKLAVEDSENVKRRKRKSNL

SEQ ID NO: 754 - DNA, 2783 bp, DROSOPHILA
cctgtagaattcttttttagggattcacctgttgagttagtcattcccattagtatttcgtacagccacacggcaataaaaaatatagaaaattggaattcaacatgacgcatacgcagtgaaagtatgtttcaattcattgacacacgcacgcacagaccgcaacaccctgtcatgctcacattattgaaacatgttctaatttatgtatcttggcaatataaacgaatatgccaagaacatttggtgcctaaagcattgttttattttagattggaagtacacataaaaaacgaagataacataaaaaacgatttaatgtatatagcctagccactaaaaatgaaatgaatcgccgttccatctccctttcaagaactgcaagcaaaggatatattaaagtcgaggtatgcgactgattaataagcttttcattatcgattggcgattcatttttgtagcactcaccaagagcctttgattatgtctgtgaatttaaccatcgaaacatttttatgccgcaaagtatgcatcttttcaatcgactgacaaggtcaaactatggactggattgccccatcaagataagtcaagcttatctggccgaatctccgcgatagttgagaatttcgataagatttgctcatacataaggccaaaatagatcgataagatattacaggcttaaccgctagctaagccaaggggccaaaatgtgaatgcgaatgttcactactcagagatagcgacagcatttgaaaaaatatggtttcaaaaatatccaacaaaaaaattctatttacggaaatgaattctcaaaaactttttaaaatttgtgtgcccattgggcaatttttcgttcgactttcgcactaaatcatttattttagttcggaagtacacatattcgttaagtacagataatgaaggtgttataaattaagtaaaatgccaatctatataagaaggtacccctctttggggcttgcccatttggaatatgagatccgttaaggcagcgattttgctcggtagctttttgctgctgttggcagtgcccgtacattcggcacctggtagcctcaacggtcgagtggtgggcggtgaggatgccgtgaaaaatcagtttccccaccaggtgtccctgaggaacgccggctcccacagctgtggaggttcgattctgtccaggaactacgtcttaaccgctgcccattgtgtaaccaatcaggactcaaatggcaattccgttccaattgctgcggagcgtttcaccattcgagcgggctccaacgatcgattcagcggtggagtccttgtccaggtggccgaggtaattgtccacgaggagtatggtaacttccttaacgacgttgctctgctgcgactagagagcccactgatcctgtccgcgagtattcagcccatcgatctacccactgcggatactccagcggatgtggacgtcatcatttccggctggggaaggatcaaacaccagggagacttgccacgctatctgcagtacaacaccctgaagtccatttccttggagaggtgcgacgaactgatcggctggggagtccagagcgagttgtgcctcatccacgaggccgataatggagcgtgcaatggggactccggtggtccggccgtatataacaaccaagtggtgggcgtggccgggttcgtgtggtccgcctgtggaacgagctatccagatggatatgccagggtgtactaccacaacgaatggattaagaataactcggatgtgaaataatgctggcatagctgtattgagggaatttcatttaaataactgctcaacgataataagaattgtttgtgttgactatcaataaagttttcattttaaatagcttcgttcttagcaaatgtttaaaattatcttaaaagttggaaaaaatcgggcttattctattatgattattctatgacgtttttacgcaaccaacttgtgtatataaatcacttttcatgaattatctaacatacgtctatgaattcagccagagttcgtgaattggcgattgtacaatttatttgacagcgccatccgataaaggaaaaggaattagatacgtcttcaattttctgaattggttttcccttgaccggtgtcaattcgaaaataatcttttctatttgctttggtgacttttgagctttttattgtaaaagattcattgaaatatatgtaacaggtagaaaggagcttttccgactcttctaaatcgatcaggccaagtccgtctgtccggccgtataaacgcctcgttatattgacgctccactctaacgcccacatccgctcagaactgccacgcccacatttttgaattaatatattattttttttgtcaatgtttataggtattctaaacatacctataaacaaacctataaacatacctataacaaaacatattgaagccttctaattaagcgtaaaaattgtattaatcaccaaacattacgaaaaaatgcacaaaaattgtctgcagcaatgattctgagctattaaatatgagatataaaatctatctgtttcacacattaacctattattgctatatgatacattccccctttacagtgcgatatttggaatatgttttattgatgactatgtattcaaaactggtcaaagaaagtactttccttagatttgaccacaagttaggccaacgagccacaaaacaattagtaatgacataattttcaatcgccatgactcctcgattagatttattcacatt

SEQ ID NO: 755 - DNA, 783 bp, DROSOPHILA
atgagatccgttaaggcagcgattttgctcggtagctttttgctgctgttggcagtgcccgtacattcggcacctggtagcctcaacggtcgagtggtgggcggtgaggatgccgtgaaaaatcagtttccccaccaggtgtccctgaggaacgccggctcccacagctgtggaggttcgattctgtccaggaactacgtcttaaccgctgcccattgtgtaaccaatcaggactcaaatggcaattccgttccaattgctgcggagcgtttcaccattcgagcgggctccaacgatcgattcagcggtggagtccttgtccaggtggccgaggtaattgtccacgaggagtatggtaacttccttaacgacgttgctctgctgcgactagagagcccactgatcctgtccgcgagtattcagcccatcgatctacccactgcggatactccagcggatgtggacgtcatcatttccggctggggaaggatcaaacaccagggagacttgccacgctatctgcagtacaacaccctgaagtccatttccttggagaggtgcgacgaactgatcggctggggagtccagagcgagttgtgcctcatccacgaggccgataatggagcgtgcaatggggactccggtggtccggccgtatataacaaccaagtggtgggcgtggccgggttcgtgtggtccgcctgtggaacgagctatccagatggatatgccagggtgtactaccacaacgaatggattaagaataactcggatgtgaaataa

SEQ ID NO: 756 - protein, 260 aa, DROSOPHILA
MRSVKAAILLGSFLLLLAVPVHSAPGSLNGRVVGGEDAVKNQFPHQVSLRNAGSHSCGGSILSRNYVLTAAHCVTNQDSNGNSVPIAAERFTIRAGSNDRFSGGVLVQVAEVIVHEEYGNFLNDVALLRLESPLILSASIQPIDLPTADTPADVDVIISGWGRIKHQGDLPRYLQYNTLKSISLERCDELIGWGVQSELCLIHEADNGACNGDSGGPAVYNNQVVGVAGFVWSACGTSYPDGYARVYYHNEWIKNNSDVK

SEQ ID NO: 757 - DNA, 2555 bp, DROSOPHILA
taatttccatctgttgtatgcaaggcgcttgaactcttggctattgacaaagatgtcaaacggtaaatgatcgagcattgaccgagcacaaataaaatgcgctgtgatataaggggataccgtgggccgcttttaagaagtaaaataatgatggtgttgttgtgctgagaacacagtgcgatccctcacagcaacataccagatatcaaggacctgtggtgcgctttcccgctaagactgcaacgttgagaatgtagttgtgagggtgctacagaacataaaacaaggccctgcagtggtgagctttcccgacggccctcaaaggtggatttggaaatgcaccgagcaccgaataaagctgcataggactgggtttggcaatcacacatattaggtgtatgttccgtgggtttaaccaaagacattagaatgacaagatgcgtaagggtcattttgcgatatgcagccactttttggtgacatctccgctcacataaaacagagcgtaagaaatctaaaaatagagtttgcttgcttgtgtgagtaaaaacaataaacgaaaacgtttatatgtgtgcgtacttgtgctagaatacaattttcgggccgaaatcaattttgatatttagagtttttggccaatttcgttgaaaaatttcgacagggtactctgagaattaattttacagcattgatattaagttcatcaatatttcaaattataaataagtaaaattgctatctgcaattgttattataacttttgtaaatgaaaacataagtattgcaaaaaaagaaaatacaaataaaaataataaaaaaaataaaaataatacaaacatacatacataggtaaaagttaatatttataaaaaaaataataattccccgactatcagatacccgttactcagctagtgtgaatgcgaaaacgaaattttataatttattattttataaaaaacgtttcttcagcccgtgatctttcatgttgcgaaggcgaagccatgtttcccagatgaaacagggtgtggtgtttagatccgcacacactttaaacaaaaatccagtctcttcgcttcttgcaatcgacttgctggttaaggcttttaaaactttggaagtgataaattgagtgaccagaagcatgacagaaggcacaggtcgcagggctgaggcttgtggcaagaaggtcggacctacacaaagcaggtgttctattacaagcgttaagcttgccatggcgaactccatgttctccagcgtcttttactgctggtccagacgcaatgccatggattcccacgtcgaaattgcatttttgaacactgggtcctctaaaagctcttcccatttcgcctgactcgccggatccagcatttgaacaagtacttgtacatccggagatttgttccgttgagcccattttatttagcgcacgaatatgatcgttgaatttatccaaaagctcacgaagcattgagacggaaccactctgcactgcacttagccccagaatctcagtaatgtgttcctggaatattaaacgaatattagcaactccaatgctatagtcagcgaatgatttccagcgcagttcccctcagacatgatcgtagatgctgcaacttttctatgtttgtgaggtcaggatggctatatattatagaagtgcagccagttagcatagcgtacagcgaattttggaagcacgctgaacgctgctgatagccacaatcacacggaaaaatcccgttagcaaaaaatgagtgggaattcagttaatttctctttcaaattactttcaatttcctcaaaatccagttcttcgagctcgttgtgaattttcctgaacggttgctgaagctcatccaacctcacatgaagaacggactcgtcaacttaaattatggattccactcgatcacaaattgcagccgcctaatccaaaattgctatcatgtttccatcagcggtaacgtttccagaattcatagcagccatggcaatagcatcaacaacacagtggaagaatatgcaattttgagaaaccaacggagttatattcaatgttcactgtttttaatttgtctgaatattgcagacaaaatttgttgttcaacaacgcacttagcaacaatagcgaattaattgataagttaaagctttaaacagctttactatttattgtttatccacaaatcgcgtcttttattacatgtttttgggcaattaaaagacgaggtttatttgggattttgaacgatttgttttattggcgtagcgaacgaaaagtgcattgatgcgacatgtagaatggtacgcaagcaaacgataatgatcattctaagtggaacagagcgaacaacagaacgatacgtgtaggtgcagagagactgaaatagaaagtgcgagagaggggagagcttagatgctcccgcagctaatttgcatagataacgataatgatattgctgctcagctaaggcgcagttaagttgaactgtgtctccaaagttagcatgtaaacaaataacaatgtgtgcagatattta

SEQ ID NO: 758 - DNA, 555 bp, DROSOPHILA
aatattcgtttaatattccaggaacacattactgagattctggggctaagtgcagtgcagagtggttccgtctcaatgcttcgtgagcttttggataaattcaacgatcatattcgtgcgctaaataaaatgggctcaacggaacaaatctccggatgtacaagtacttgttcaaatgctggatccggcgagtcaggcgaaatgggaagagcttttagaggacccagtgttcaaaaatgcaatttcgacgtgggaatccatggcattgcgtctggaccagcagtaaaagacgctggagaacatggagttcgccatggcaagcttaacgcttgtaatagaacacctgctttgtgtaggtccgaccttcttgccacaagcctcagccctgcgacctgtgccttctgtcatgcttctggtcactcaatttatcacttccaaagttttaaaagccttaaccagcaagtcgattgcaagaagcgaagagactggatttttgtttaaagtgtgtgcggatctaaacaccacaccctgtttcatctgggaaacatggcttcg

SEQ ID NO: 759 - protein, 141 aa, DROSOPHILA
MLRELLDKFNDHIRALNKMGSTEQISGCTSTCSNAGSGESGEMGRAFRGPSVQKCNFDVGIHGIASGPAVKDAGEHGVRHGKLNACNRTPALCRSDLLATSLSPATCAFCHASGHSIYHFQSFKSLNQQVDCKKRRDWIFV

SEQ ID NO: 760 - DNA, 2969 bp, DROSOPHILA
aaccacaattgaggagtgcagggattggttggggaggagatggaactgggcactcgaaggagccaagcattgaacctgatcatcgccaggttcaggtgtgcgagtccgtgtgcagttgcatttttggcttttgttttcggccatgactggttgccactggactggaatcaaaacttgaaagtgactataataggtatcctaataacataaactaaacataaatatgaattagttatcattacataaaagacttatgactcagctactattatccttttaataatctttaggtatttgttgcgtcaactttaaaactgattgaagaaatttaatattaatttttaattgttaatctacgagctgatattttaacacaaggataatcattctgaatgggcaatcgcatatatggaatcctcgagttgaattaaaagtccagtttctctctatctaatatcactgacaccacacatgagatggcagcataattaattcacatattatttaatcgcttacaaaacaggccgaaagccaaaacaaattgcacattttgagcgttagacaaagcgcgaactaaactctacgcagtagtggcagtagtttggaaaaacaaattccaaaatcgacgcgaacatcaacaaaactttcgactccgactccgaatcaaacgaaatccaacttggcgctgctggagttttgaagatcgagactgagattttccacgcggctcccggtcggtcacgactcgtcggactttctttcggcaactgagctgagcgccaagaaagtggtctggttttgtggctcgaagaggcgcagctggaaccagtcgaatgacaaagcggcgtcgctgccgatgcacccacctggcggagattttaccagaaacattttgccctgctcttttattttcaatttattttattagtatttaactccgtgtgtgtgcccagtgccttggaacgatcactggaggcaccctactaggtggtaatggattatgcaaagaatacccgcgaagctgccatgcggatgcctcctggatacgcctgttaactggaggagatcggcgttaaataaaacccaaataaacagccatcgaggagcgcgtctaactggtttgcacaactgcaatcgagtgcttcctgtgcccgcggctatctgcacattgaacttgaacctgaccggacgtgacttgtggacttggagatgccgactgatctccaacagagtgcctggccaacagttggatctggaatacgcacgaagagtgcccccgaatcgaatgaaagcgaaaacaaattcaagctgccataatcgtcaatcttgatcttcaactcacacagtggagactgaaagaaaataccacaattgcaatggatttcatctaattgatcaattaaatcaatccttatatatactggtactttcaattagatcctggatacttaagagcttctataaaaaagaaattaagtttcatattcatctattatatatgaaatgttattatatgatgttttaaccagctggctattaatcacaattataaaaggcttaaaagattaggatgttttgcttacttaaggcttaagatatcaagatgttgtaggttgtttctctctctgtactaatctctaatttctcacactttcaggtgaagcctctgtacgatcgctaccaacgcgacatcgaactacatctgtgggagcccatcaatcgattctgggcggagtgctacgaggcctgcaaggctgcctccaagcagagggccaccaatcaggcggagaacaggcgcctcttccagcagaagatctacatgccgtggaaggtgcgccaggtggaggagatgcagcgactgcaggcggctgcactgcagcacaagaccatcgacagccacatacggaagcgttggaagaccgccaagcgtttcttgtacggcccacgcggaccatggtacaccgggtgagtacttctctgatatatgtacctattatcacatggaaagaaaaagtacctattttaataagtggattctaaggttataacgttaaatatcttctaaagatgttatatcaattccggttcttcctcctatattaccagttttaggtatcatccactctcatatttagtttacattttcacgtcagtgatttttctctgtgtaaacgtcactaagcccgccccgattccattatgaaatgacgcgaaattcagcattttaattgcccgcctcgcatttgaggcgacaattgtaatcgagcgtgccagcgtgcatggttataataaatactcgcattacatgtgtgcgtgatcacttaatcacctgaaggcaccactcgaatcactcgaagactcaaacatggccagaagccgccgcgctctgtgttaatttcacttccaaatgcaaacaaatccctctcaatcattaaagtctgcagcggagtcatcatgatcatcaacacactcggctggtggtaaccacaatacgtttagtagttccactgacacaatgggtgaaatgcgtcaaacacaatgccacaaatcggtgataatccgatggctatttatggtcggacttttggctgaaaatctcattaaaatcgtattcactaatctgagattagtggcgagattttgagattatcatatggccggggtctaggacttagtcgttattaataaaaactttattatgatgcaaatattttatagttttttattgaaaatcaatctactcaggtgtctatatgcttatattttgtttacttgcttacataaggcatttttaagtttcttaactacaattgtctttagaagttgttaaagaatgtctaaatttaaagtgttgctcaacttaaaggtgtataatgcgcagatattaatgaaatgtgaaaactatagtgcatcatcgtatttccgcaatactttctaaaattttcccgatattttggtagcccctcgag

SEQ ID NO: 761 - DNA, 543 bp, DROSOPHILA
atgcaaagaatacccgcgaagctgccatgcggatgcctcctggatacgcctgttaactggaggagatcggcgttaaataaaacccaaataaacagccatcgaggagcgcgtctaactggtttgcacaactgcaatcgagtgcttcctgtgcccgcggctatctgcacattgaacttgaacctgaccggacgtgacttgtggacttggagatgccgactgatctccaacagagtgaagcctctgtacgatcgctaccaacgcgacatcgaactacatctgtgggagcccatcaatcgattctgggcggagtgctacgaggcctgcaaggctgcctccaagcagagggccaccaatcaggcggagaacaggcgcctcttccagcagaagatctacatgccgtggaaggtgcgccaggtggaggagatgcagcgactgcaggcggctgcactgcagcacaagaccatcgacagccacatacggaagcgttggaagaccgccaagcgtttcttgtacggcccacgcggaccatggtacaccgggtga

SEQ ID NO: 762 - protein, 180 aa, DROSOPHILA
MQRIPAKLPCGCLLDTPVNWRRSALNKTQINSHRGARLTGLHNCNRVLPVPAAICTLNLNLTGRDLWTWRCRLISNRVKPLYDRYQRDIELHLWEPINRFWAECYEACKAASKQRATNQAENRRLFQQKIYMPWKVRQVEEMQRLQAAALQHKTIDSHIRKRWKTAKRFLYGPRGPWYTG

SEQ ID NO: 763 - DNA, 2744 bp, DROSOPHILA
gcacttagcccgttttacggtcgcgatgatcgtcctgccgagtcgactatccttcgattggtgggacgagaccaatccacacgcggttcaccaaatggcaatacatccgaagaaagtgactgtttggtgcggatttacggctgcagttgtgattggtccgtattttttcgaaaacaatatggtgtggcggtcaccgtcaatggtgagcgatatcgatcgatgataaccaacttcatatggcctgaaatcgagaatatggaactggacaacatgtggtttcaacaggactggccaccgagatcgtgtgatttgacccctctttttcatttggggttttcgcaggtccatgacaacaaggcgcaagacaccgatgtcctcaaagtcaacatacgccacgccatcgatcaaatacagcccgatttgtgcgcggagtcatcgaaaattggacatttcgtgcatttggtggtcatttgaatgatgtcatattccattcataatggattcgattgacctttcaaattttttttttcagttcaaagatcaagcgccccaatgaaaaccctttattagtttatagtttgtcagaagatcttctggctcccttcttacaagctaaactatactcgcatagaagaactagctaagtgggtaccttgtctgtctcctgtattgtgatcataatttaataacactgccaatcaaaatacatacaatcttgcaaatttgtaagacagacagtgtagctagctcccgcgatttaacctaggcacagtgtcctgtctttaacattttaagttaagaaaatcggaaaaaaaggaaaagataaaataaattatttgacaaatatttattaccttcgaattcgatacattttaaaaacatttgtagtggatttagtggaatgactattctaccttacatcgtatatatttgtatatttgttaattattattaaatattgtgtaaatggacggataattccttcgaattcatttttgatttatatatctgtttgaattcctccttgtacagcggaattcgatgcactactttgttggggtcttcttggtcggcttggctcagatgcaaaataggattgatatggcgatggagcggtcggaagcactgcggagggtccctgattctggtaatactcatctccgtattcactgatctcccgattgctgatttcgtttaagcgcttgtacctttcccgacgcgcttctactagatagagtacgccagacggcagtagcagcacagcgccaacaacgcccagagcaaatgaccagcccatatcattgttctgccatcctggcatccaatcccgagaatctcctttggcgccaaaaatgaccacagcaataaacccgaaaacagagcccacaacctggcatgatcctatcgccagcaggagcaccatgtacctgtcatcatcgcgagaagtgcgaagaaatgctacagtgagtggtataacaacaaggcacattacaaagcatagcgtagcaaaaagttgaacggatatgtagaagccaggcaggaggaagtcgtgtatgatgtaatattcctcttcgaaaacccataggcatccgttaaaggaattgtcaaaaaatcggtgtatgtcctggaagttgttgaaacaaacttcccaaaggcctaggttagtgaatcgcgggttttgtaatctgccgtctgtaaccagccaataaggcgtggaaaacgcgataacaaaacatattagggaaaacacggacgcgcaaagggcaacttgtaaaatgcggttggacgcacccatttgttatttctataaaaatttcgttaacaagtcggcttggaaaataacacgccctaaagtgtgaccgtcgcactcaaaatggtatttttgaatgacgaatcatctcgcttaatataccacttctatgcggaacggctgggatataagcagatgtgaaactttaaaaagcgcttctaatataacaacattataacatcccacagttttttttataaatcataacttaaaaatcctatgaaataaattaaaagttttcagagacgacccaacggatcatttgatatttgtatggtgctggtagacagatctgtaaaataaggacaactcgctaacattagagaattcaatcaaaattgtgtttttaaaaatcgatacagtggcgatggataacaggaattcgcacgcaaacactaattagcactagcccatatatatagtctagcactgaccttttgaattttggtgaataaagccttacgacttatgccttcaatacacaatgcaatacaattattcaatacactgtataaaaaactatttcatactgaatatttgaatggggagtatttcctgcgtggtatatttctcaatctctctcatcgaagatctgatcgcctgggcaaatgcatttttgtgacattttagtgcattaatcaaggtcatagtgagtgttgttgttgcctttctgtcgaataacttttgttattattcgagccacatcataaatgttaaatatctttctttaattgcatattaaaaataatacatattacaaatgtaacaaatttgaaaaagtataccatcaaatttggaatatattaataattcttgcaacttttgaaccatcattctattccaatacattattcaagagtttttctgaaatagaatttacacacctactgatcgtttcaaaaaactgattgcaatagatctgatttcgtatcgt

SEQ ID NO: 764 - DNA, 744 bp, DROSOPHILA
tccctaatatgttttgttatcgcgttttccacgccttattggctggttacagacggcagattacaaaacccgcgattcactaacctaggcctttgggaagtttgtttcaacaacttccaggacatacaccgattttttgacaattcctttaacggatgcctatgggttttcgaagaggaatattacatcatacacgacttcctcctgcctggcttctacatatccgttcaactttttgctacgctatgctttgtaatgtgccttgttgttataccactcactgtagcatttcttcgcacttctcgcgatgatgacaggtacatggtgctcctgctggcgataggatcatgccaggttgtgggctctgttttcgggtttattgctgtggtcatttttggcgccaaaggagattctcgggattggatgccaggatggcagaacaatgatatgggctggtcatttgctctgggcgttgttggcgctgtgctgctactgccgtctggcgtactctatctagtagaagcgcgtcgggaaaggtacaagcgcttaaacgaaatcagcaatcgggagatcagtgaatacggagatgagtattaccagaatcagggaccctccgcagtgcttccgaccgctccatcgccatatcaatcctattttgcatctgagccaagccgaccaagaagaccccaacaaagtagtgcatcgaattccgctgtacaaggaggaattcaaacagatatataa

SEQ ID NO: 765 - protein, 162 aa, DROSOPHILA
MCLVVIPLTVAFLRTSRDDDRYMVLLLAIGSCQVVGSVFGFIAVVIFGAKGDSRDWMPGWQNNDMGWSFALGVVGAVLLLPSGVLYLVEARRERYKRLNEISNREISEYGDEYYQNQGPSAVLPTAPSPYQSYFASEPSRPRRPQQSSASNSAVQGGIQTDI

SEQ ID NO: 766 - DNA, 5411 bp, DROSOPHILA
caataaattattctttaatttaatttatagtcaaactataagttcaaaagggtgtttggtaataatactatacatttttaaaagtattgataactaccccactgctcaatgatatcgcaaccgcagcaaagtgcctgtataaggaactgtaatatctaattaagtcagatctgaagcaacttccgtacatctgtaagatacgatctatccatacatacatacatacatatgtgtgccatcccgtttgcgtttcgggttattacttgggtaatcgtatatgggccacatatctccttccctgtcgctctgctcgatgcactgcggctaaccacgttttgtaataagcgtaattctatatagtcacgtcgagcagtaagtcgacagtcggccaagacagcggccaatccgccagattgatgtgtcgcccacttaatgccgagcgactcttttgggacaagttgatgcggcaaatcctcagcttaaaggaagcccgccaagtgcggcggagcacgttctgggttgcttggagaggtcaggtccagatatggacactgggcgccctgctccactggttgtgccggatgattgggtgctcgtcatcgtagcatcacggcatcatggcattatgcattacctcgatccaaattatagagcccagtgattccggagcagggctaaccagccggacaactggcgtcgattatggcgggccaccggacactggccaatctttgtccggggattgcttgataagcgggtgccagccgtccaatcggcccattcaaaggcccaccggctcttctcacgctcatttcgcaagcgatttggaggcggcaaccagtgttggtaagcacctggccagctatagcgattttcgtaactgtaatgctaaacctctcaccacaaaaggggatggtgcgggggcgggaccaacggggcgaatacaaaatttataaaagcctagtcgtcggcactggggattttagtgcgcgttcgtttagtctgggcaacggttgcttaaaaaaaaaaagctcgaggatcgtgcaggatcaggactggaaatcaagctggagcaaatggaatctgtgtagaatcgctagggatcaacagcgtcagttgaaaatatgcccaacgtggacgagcagcggggaaaagcagctacaaagagagcggaatcggagcaatcggaggaaaagggtgaccgccaggagggggacggggatccgaaagacgagtctgaggaggccaccgcgaagatcaagggccgttcccgattcactgcggctctgcgaagcctctcgaagaccaaaaccaaaagggaaagggagctggataaaagcaccgacagggaaacacgcagcgcggaggaagaggctcaggaaaccccaggcgagctcgaagacgtggccagctccatctccacggacagtggagccctcggcaagaccaagaaaaagagcctgacgcgccgcctgcttcttggaggcctgagaaaaagtgggaaaacgccgaaggggcggccccacagcttggcgaccagcgacgacatcagcgtggagcacctggaaacaacacccctgccatcgccacccggttcgcccacctccgccggcagcagcacgctgcagatcaccatcagtggcaagaaggtggagccatcgcccgccaagaagagcggcaagagcagacccaagagcgacacggattatctgacacccgccgcagaagaaaggaaaccgagaaagaaaaccactaccaccaccgtgaccacgagagatacgagcagcagcacccgcaccaccaagctgctggtgtcgaagaagaagccccagagccccgagagagagtccccatcggcgtcgccgtcgccgcttatcaccaccaccgagagcacgcgcgatacgccgcccagagaacgggcgccagcaaaaccaagtcgcgttcagtcagccagcggcaccggagctgttcgcaagtcccaatcctcgagcgcatccagcaggaagctggaattgatgcagcagcagcagcagcgcggccaccgcctcaacgccagaccactggctgaactagcgaacacggaaccccagccatcagggcagcaatccctggacccatccacatcccctccggcggctgaggacggagtctcctcggcggaaagcgcccagactattgctaatcccccgcccgttgtccgctttgaagtgggcagtgcagtcaggagtcccttgagtgcctacgaagccgcattggccgccgccgccagtcaacagcccaactccaacgaagagctcagcgactccagcatccggcgtctcagcttcgctcagcagcagctcatcctcggcgaccacgacagcatcgagggcaggcgggaaacactgcactatcagtcggtggctagtgaatactccaaccaggactccggatccgaggacgatagcgaggagcaggcggataccacagagccagagaacgccaagcccatgccggccttcggtgacctgaccatggatcaggaaatggaaccggtaaggtctcgtcgtcgtcggattgccaattcgccagttgtcatttacctacgaagaagcgaagaagccccacaagtgatatgttggcccccttatagtgtgtgttccagagtgtcattcaactgtgcgggcggcgggcggtggtaatagcccagggggtctcgtcaactaaccagcaaatctcagtgcggattgacgagcagcagaaggtgtaactaataccaggcttagaatttattaaagtggtgaattctcacttcctatattatatattgatatgcttttatataactgagtgtaaacgtgctatgatagaacaaactttactacttattataattcgaaatgcacggattatttatatttgtatcttgaaacccagagcccaaaagtatgtatctctttatcttgagatttcaagtcacaagtgggatttcattgtttagtgtatcaaatttatcaaactattctattaagcatggatcgaacatacaagtaactctcatccaatccttgcttgcaggccatcatgacatccaccagcgataagcgcgagcatctgtacaagattctagtcattggtgaactgggcaccggcaagacgtccttcattaagcgctatgtgcaccagttcttcagccagaactacagggccaccatcggcgtggacttcgccctgaaagtgctgcagtgggacgccaatacgatagtgcgcctccagctgtgggatatcgccggtcaggagaggtttggcaacatgacccgtgtctactacaaggaggcggtgggcgcgttcatcgtttttgatgtgactcgcagtgggactttcgattgcgtgagcaagtggaaggaagatctagactccaaggtgcagctgccggacggcagtcccattccgtgcatcctgctggccaataaagtaagtgattgcctaaaggttaaaggagaccgcataatttctatattatgtgattaatacgttgctcatccgttttccagtgcgaccaggaaaagcagggcatcataacgcagcccgagaagatggatgagtatgtgagggagaacggatttgccggttggtttgagacatccgccaaggagaatatcaacatcgatgaggcagctcgtgccctcgtgaataaggtgataatcgctgctaatgcccagccaaagccccgctaatcttcttccactcgcccgacagatactcatcaacgataagctgatatctgccgatctggccgatggcgacaagttcaacttgagcgcggccgatgcaaccggatcggatgccaagaacaagtgttcctgctgacctgggaccgaggtccggcgactcctattcccattcccagtttaagagcgagtttcaacacagaaacgccatgtgcctacgtccactccatgttcatgttgttagaagatagcgataactatgcttagggttttaacgtaacatttgtctaagacttagtgtcatccgtatcatcccgtccgtctttatctttaacaccccgtctgtgggtccacaatgttgcgccggcatcgggatccgtgtcactttgagaatttatatggtgacacataacatacctacgcatacgaaacattattactatcaccatcattgccctagttgcgaggattagccggaggtagtgcagcatccgtatcatagcatactacatttgtgtaaaatgcgaatcgtcttattgttttgtttgttttatttgcctctgctggcgagattgttttatcttggaattattattctcgtatgcaaacacactctgccatcattatttgtatttagataacaatacgtacgcttaatgcaatgcgaaatcagaaataaagtttttaatggtagttaagttcagacgacgtgttttattggctgaataaattctgtgtaagtgcttttgtgatacaatgaaaatgttatgctactagtatttgccttcattgaatcactggtctttgtaaataaatacgaataaaagctttgtttttacatttccttttttaacggtaaaaaatcgtatccccaaccggcaatgtttttctttttttttaatattcaaactatcgatagttatcaactatggtattccttattgtttagtgatcacatattaaacttaaaaataatgatatacagataaaagtgtcgtgcgttcatattctacataaaattattagcaattatttaatcgttatgaaaagcgaaacgtataaactggtaattggtatgggaaaaattgggaaaaagctggaatcaggtttaattgcaatttggttttataaaatgttttatggcacaaacaaacatcctgactcaaaagtgaattaagcttgaaacttaaatactccgagaataccgtgaatatgcgtttaccaattgctgctgaacgggaccactatcgatagaaccttacaaactatcgaatcgctgcaagactattgccatcgatacttgcacctctatttattagtgttgtgtagccgtgttactgctaaattgtttattgcaaaaattccgcaaacgagagatattaggaatagaagacaatataacaattgggcaaaatgtgttagatgtttaaggtaagccaccgccagggctgcagctcggcggagccgtatccaacggtccgcgctctgggggccgcagcattccgcactcgtcacgtttactccccttttctggtctttgttggggctccgttggcacttctgctgataagtgcccaagtcgacttaattaatcagtgccctggagtcgggggcaagtcaattggatatttggaaaccgctgggaacgtgaaccagctgcgcgcccgaaagaccagtcatgaattgccgcggctctgattt

SEQ ID NO: 767 - DNA, 2747 bp, DROSOPHILA
gtctgggcaacggttgcttaaaaaaaaaaagctcgaggatcgtgcaggatcaggactggaaatcaagctggagcaaatggaatctgtgtagaatcgctagggatcaacagcgtcagttgaaaatatgcccaacgtggacgagcagcggggaaaagcagctacaaagagagcggaatcggagcaatcggaggaaaagggtgaccgccaggagggggacggggatccgaaagacgagtctgaggaggccaccgcgaagatcaagggccgttcccgattcactgcggctctgcgaagcctctcgaagaccaaaaccaaaagggaaagggagctggataaaagcaccgacagggaaacacgcagcgcggaggaagaggctcaggaaaccccaggcgagctcgaagacgtggccagctccatctccacggacagtggagccctcggcaagaccaagaaaaagagcctgacgcgccgcctgcttcttggaggcctgagaaaaagtgggaaaacgccgaaggggcggccccacagcttggcgaccagcgacgacatcagcgtggagcacctggaaacaacacccctgccatcgccacccggttcgcccacctccgccggcagcagcacgctgcagatcaccatcagtggcaagaaggtggagccatcgcccgccaagaagagcggcaagagcagacccaagagcgacacggattatctgacacccgccgcagaagaaaggaaaccgagaaagaaaaccactaccaccaccgtgaccacgagagatacgagcagcagcacccgcaccaccaagctgctggtgtcgaagaagaagccccagagccccgagagagagtccccatcggcgtcgccgtcgccgcttatcaccaccaccgagagcacgcgcgatacgccgcccagagaacgggcgccagcaaaaccaagtcgcgttcagtcagccagcggcaccggagctgttcgcaagtcccaatcctcgagcgcatccagcaggaagctggaattgatgcagcagcagcagcagcgcggccaccgcctcaacgccagaccactggctgaactagcgaacacggaaccccagccatcagggcagcaatccctggacccatccacatcccctccggcggctgaggacggagtctcctcggcggaaagcgcccagactattgctaatcccccgcccgttgtccgctttgaagtgggcagtgcagtcaggagtcccttgagtgcctacgaagccgcattggccgccgccgccagtcaacagcccaactccaacgaagagctcagcgactccagcatccggcgtctcagcttcgctcagcagcagctcatcctcggcgaccacgacagcatcgagggcaggcgggaaacactgcactatcagtcggtggctagtgaatactccaaccaggactccggatccgaggacgatagcgaggagcaggcggataccacagagccagagaacgccaagcccatgccggccttcggtgacctgaccatggatcaggaaatggaaccggccatcatgacatccaccagcgataagcgcgagcatctgtacaagattctagtcattggtgaactgggcaccggcaagacgtccttcattaagcgctatgtgcaccagttcttcagccagaactacagggccaccatcggcgtggacttcgccctgaaagtgctgcagtgggacgccaatacgatagtgcgcctccagctgtgggatatcgccggtcaggagaggtttggcaacatgacccgtgtctactacaaggaggcggtgggcgcgttcatcgtttttgatgtgactcgcagtgggactttcgattgcgtgagcaagtggaaggaagatctagactccaaggtgcagctgccggacggcagtcccattccgtgcatcctgctggccaataaatgcgaccaggaaaagcagggcatcataacgcagcccgagaagatggatgagtatgtgagggagaacggatttgccggttggtttgagacatccgccaaggagaatatcaacatcgatgaggcagctcgtgccctcgtgaataagatactcatcaacgataagctgatatctgccgatctggccgatggcgacaagttcaacttgagcgcggccgatgcaaccggatcggatgccaagaacaagtgttcctgctgacctgggaccgaggtccggcgactcctattcccattcccagtttaagagcgagtttcaacacagaaacgccatgtgcctacgtccactccatgttcatgttgttagaagatagcgataactatgcttagggttttaacgtaacatttgtctaagacttagtgtcatccgtatcatcccgtccgtctttatctttaacaccccgtctgtgggtccacaatgttgcgccggcatcgggatccgtgtcactttgagaatttatatggtgacacataacatacctacgcatacgaaacattattactatcaccatcattgccctagttgcgaggattagccggaggtagtgcagcatccgtatcatagcatactacatttgtgtaaaatgcgaatcgtcttattgttttgtttgttttatttgcctctgctggcgagattgttttatcttggaattattattctcgtatgcaaacacactctgccatcattatttgtatttagataacaatacgtacgcttaatgcaatgcgaaatcagaaataaagtttttaatggtagttaagtt

SEQ ID NO: 768 - protein, 686 aa, DROSOPHILA
MPNVDEQRGKAATKRAESEQSEEKGDRQEGDGDPKDESEEATAKIKGRSRFTAALRSLSKTKTKRERELDKSTDRETRSAEEEAQETPGELEDVASSISTDSGALGKTKKKSLTRRLLLGGLRKSGKTPKGRPHSLATSDDISVEHLETTPLPSPPGSPTSAGSSTLQITISGKKVEPSPAKKSGKSRPKSDTDYLTPAAEERKPRKKTTTTTVTTRDTSSSTRTTKLLVSKKKPQSPERESPSASPSPLITTTESTRDTPPRERAPAKPSRVQSASGTGAVRKSQSSSASSRKLELMQQQQQRGHRLNARPLAELANTEPQPSGQQSLDPSTSPPAAEDGVSSAESAQTIANPPPVVRFEVGSAVRSPLSAYEAALAAAASQQPNSNEELSDSSIRRLSFAQQQLILGDHDSIEGRRETLHYQSVASEYSNQDSGSEDDSEEQADTTEPENAKPMPAFGDLTMDQEMEPAIMTSTSDKREHLYKILVIGELGTGKTSFIKRYVHQFFSQNYRATIGVDFALKVLQWDANTIVRLQLWDIAGQERFGNMTRVYYKEAVGAFIVFDVTRSGTFDCVSKWKEDLDSKVQLPDGSPIPCILLANKCDQEKQGIITQPEKMDEYVRENGFAGWFETSAKENINIDEAARALVNKILINDKLISADLADGDKFNLSAADATGSDAKNKCSC

SEQ ID NO: 769 - DNA, 22345 bp, DROSOPHILA
aaatttacccgaaagaaaaacgatcgaaagctttcttgagtggggaattaatcatagcgatatgcatacatatgtgtgtaattcccacacggggaatattttgtcataaacttgatttaccggaaagacttaaaaaattataatacaagtatataattaaactatcttattgctgttcaattctgggaatttcagataattcctatttattgttgagtattaaactgtttattaaaaatatttcctaattataacaattaaatatgtaaatcacttaagctctacactttaatattgatacccagcagcacagagtattaataaaataacaccgaaataaatttgacggttggcggaaaagttaatggaaagactcataagtcgctttatcaataaaaacgaaattttgtgcaaatgttaatatagtcaaatcccgcataacggccatatgtttacgagcagcacgatgaacaaaagaggccacccttacgtagtgcttacgtcacgggataaccgagaggagcggcactaacagcgcttaacatttacgatatgcgataacagagagctgttatgttaagaatgaagcgctctcgcttctctggcaccaccaccaacacaccacccatcagagcattagagcaccaaccacactacccccgcccgaatcacctcgtacatcggaacggtgaaccgttacaccgttatattatgctggtggtggcacggagcacacacacaaacagcgccgccctctctcactcgctctccgtggaaacgtagaaccccgccgtatcgccctcgcccgaaactcacagttcgcatccgacggattcggtagaggacgtcggtctctgtttcgttctcggatttggcttgatgcttcgaaacttagaactctgaattcagttgcatcgtagacgtcgcgacggcagcacacgcgtcgctcacccacagagaaaactctgagcagcacacagtagaatcacgcagatatagaacgcagatcagtgaaatcgcccacaaaataaaaacaaacgcgacactcgcagcggcgcatcgcgaagaaaaatcccagtgtttcccatgttcgaaagataaaaaacccaaggcccttgcccaaatggccgccacaacacgtgtgtgctctataagaaagaaataacgccgagcccagaagaacccactagccaactagccaactagccaaacaaactatccgcatcaaagtagagcaagtgttgcaacaagcattccaaatgttgtcctgtctggcgccgtcgtcttcacgtttcggccaagaggataccatcattcagcagagcatgccctccacctcccccttcgccatgcagtgtaagtgatcagaacgcggatctggagcacagatctcgggtgattcatccgcaaaccgcctccattatcaccaatcagccgtgccatagaactttgtgttcaagtgattcgcgcgccaagactcggtagcttcgatttgaagatccccacatgcaagcttagcagtttcccagaaaccatccgccatcttgggtatatgtgtggtctccaccttcaggggatcataagaatgagtagctatagaaaaacaaactcataaacggcgagtaaggatcgaggcaggtctcgaattaccattacctactcctacgcagagaacgggctccggttctcaaaaaggagagagcgagcccgaaaccgaaaaagtttgcccgatcagcacactgagagaaaactgggtcactttgtgcaacttctatacgctttgagaacttaaagaacttattgttgttcaactataatcattcgctggttttcagctacgaaagtccttttccatgagctaaaactacaatatagttaaaattagtacggtttaacatggcagatcattcgatttcttatatctattggtcatatcacgctcttcacacatgaaagtcggccagtcgatcttgaataatggcattattccctgcattgcatagcatagccacctctctgttcctcccagtggccgaccaattgcagccacatctcaatttgatttgttggcaccgccgaaacagcaccgccgccttgccagtaatctccacccaccgagaaccaggtagagctacccctgaccaggaaaaccgcatgcgcaggctgaaacagcagacgacaggtagctaacttggccaacaccattaccgcgatgccgcacctccatttaagaacctgttttatggccatattgctggtcgcttgccactctgtttatcgagtgtaaacaaagcataaaactgtcagtgggcagagctcatcggttgaaatggaaggtgtgagaaagagccgaaattaattgaaaacgcttagttggggagcattggggatggcgcaatgctggggaaacgcccacgattcgttcggtgctccactcctccgactctgacaattgataagccagctaaagagacggattaattgcacatgttcggtggaaacggttgaaacggtggcaacaccgctgccataaattataatttatggctatttaagcagctccgttctctgtgggcggaactaaaagccctcgaacacgatagtttggctaatcgatcagagatggctgcgcacaggttggcccacatatcttcgatccatatactttccgcttgttttccgtctcttccctgggcaaaccgagctgcttgatggcgctgggcagctgcgactgcgatggatattaatcgccggctacatacgaaatgctgttcgctgggcttttggaaaagccgggggaaaacgccagccagccagccagctagtcagccagccagctagtcaagttgtactaattttccggctgctcggcgtgtgttgtgtcgcatttcgaaacggctccaaaatgccgtaaatcaaagatttcgccctggcgaaaacctgtcgcctgttatcaccttcgactacgccccttagctaaatatactctaaatatactctatgtataaatcagcgccaatttccattcccattttcgcccatcgaagccctgagcagaaattaaacatttatctgacatttgcatcttcgattgggaatacctacctagtgtgtgtgttccaccagcaacaagattgcctcctgtctaattaatcattttggctgctgtcagtggatgtcagttttatatgctggtgctgtcggtgctgccatttataactcctggccggctcatcctgcatctttcaccgggcacaggactctgccccgtcagctggtaatcgaaattaaacaaacttggccccacaaactatctggcaactggcatgcaaagatgattaattttgccgatgcctatctcaagtggagttggagacttcggcccgactttgcccaaaataaacagactgtgtctttaaattgcaattgagccaggctacagagcaaaaaaaaaaaaggaagctccccatttgcaaccagcacaaaaggacaataaatcaatgaggggaaagtcctctttgatatcctgctgcagattccctttattccgtgttcaacctgccgcagctttgggcaaattatttgccacattttacttttatttcgcattttggccaaaaagtaaattgtttgccaatattttttgctgctcgctttttgccgccgtcgtgcacacaattgaaacaaagataactttgaaacagttgtaaagtgaaaattgcacggaatgcagcccgcctccttgcgaatatattttttcttatttatttaatgcccgccgctctccacgagacaacaattgctacccgtgctatcccccgaaaaaaaagtgccaaaaaatcggcgcaaacaaaagggtgccccctgccacccaacccttgcaacacccccttaaaaaaggtgttgccaaagggcaggcaaaattgcagcgccaaagaggaggctctaaaaaaaaaggagtgagcaggcacaatttaacatgtaaacgattttggttaacgggtgctggcattgagaaaaaccggagtggaaaacccagggaaagccatgaaattggcgagtggagagggttcagaagggcacttcccttctgattggcgttcaattgcaataaatttcgcacaattgcacaataattgttaaaagttttaaataaacaaaaatagtcaacagctctattgtggtagcgccaactgaaaaagtttcaattgcactcgatgggctttatttcggagttgtttttttttcgagcgcgtacaatttatacacgagtcgagaggaccaagtgaatatcaattagccaagttaagcccaactttggttgtacttgctgaattaatgaagtacgtttcaactggctgaagcttcggtttttggtattcagtttggtatttatatatatgtaaattaatatgccaatttttaaataactcataactattgctattctgacaaatgtaatcgttaaagtatttcagagatctctttaaaatggcgaatttagtttgtgcgttattaagatttttcgaatattattcaaactaattaaagtaactatttcgctccctttgaggaacaagatgccaaagtatctcatggatggccgggcatatttccttcacgatttcccctgctttgaacacctctgcggcatatttctctaattgctttcggctcgccaacgcattgcaactccaatttcagagcgtagaacgcccacaccacgacatcacacgcgtttctgcatattttttcaaggtaaatcgcagaaatagttcgccccgggacacatatgtttccctaccctccagatagacctactatatatgtacatatgtacaatatgtacatttgtgcagatgcagggaaaaaaggacagggacacgaacgcggacacggctcgcttggctattaaaatttcacactcagcaaagcaaaatgctacaaataaaataaacgtggcagcagcaactagcaactagcaacgtgcaacgtgcaacatgcagcaggcagcaagcagcaagcagcaagcagcacgcagcatcagcttgctgaacaaacaaataaagcagaaagggcagaaaggagaactctatttataggcgatcgtctggctccgaatctgcacctttgcatttgccacttgaaggggcacaacgtggccacctttgtgcccattcgaaagtggagagtagaccagggcaaaggtgcgacactgaaagaaaccgtcactttaaagtccgttttttttttttggaaggagtggagtgcagggcagaaaccccttcatatatattttgtatctttcgctggcaattgttctcagtgcacggatctctaggtaggcaagccctcgaaagggcattccaaatttagagcgattatcgggacaactccacatgccgctcacatgtgtggctgtgcccaaagccgattgccacttgagatcggacttggaccctcctggaattccaatacgattcgattcgattcggttcgagacgggttcgttctccactcgattgcggccataaatattcgcacgtctgaaactcgacgaggcaaacaactgagccgtaaaccttcccacaggttttcatttacaaattaattgcgactgtctgatagtgtcgtttttcgcatttcccccttatttttttattattttttttttttttgtgttttgtttttccactggcaattagctagctctgtactaagtgtttttgcactcgctctcatttgcaggcaatttatatcataaatatgctaaccacgttcattgactgcaaatgagcgcaggcccggaggtctgtttataattaagtgctagaatttatgtttatttgcattaaatatcatcgaacccctcttcgccagcgggcgccacctgtcgtccatttgtctgcaactgcgtcagcaatcgctaaacaattttccggtgccccaaagaatttccctcacctgtcggcgctagagcgcggaaaattgtcgtgacaatcggctgtcagtgaaatattaaaaaacactttggccactgacaagcggggaaaagctggggaaagtcaggtggaaaattcgacgagcaaataaattattggaatgaaaatgttgaattttttcaaaagcgtagaacggcgcaggagaaataaataaatttgcattagccgggcttagtcgaaatatgtctggctaataaaagttggcaataaaaacgagcacataaaattagtgggtgtatctcgggtgtccgtccatcctgcagatacaaatgtatcttttctcgcttattttgccattgatttacgccgcctgcccatctacgtattatttataatattcagacctcccccacatccgtttatctaccctatttttgaatatttttcgctgcgcgtgttttccaccgcacaggtgaaccaaaaaaaaaaaaaaacagaacagaatacgaatcggcagcaaacacttgacatcgttccagaagatttcccctcggctagattttgattgctggcgttttttgttttgtttttggcaaacgtgcggtcgcccataaattgccccagaagtcccccctcgcaaacattcgaaagaataaaaaacataatgccccaatcaacattttggcaactgtcaaagcaggagattcgtggcttttatttttttaataactttgaattttagaaagtattttcaaaatgcaaaactatagtatctttccaacgtgggcccataaagttcaggttgaaatgaaagatttcaaataccttcgtctttgaagaattcaaatgcccggcgctctctctttcgatttcttctaacacacacctaacactatcaatcaacttcaattggttcgcgttggtcgcaaaatagttgaagccgaaagatgagaccgaacctatagaaatacacgaaaaacgctcgagtaccgttctgaaaaaaaaaaaacagaaacaaatacaagaaattccttttcacttcgtttcggtggcgcacaaattgaaattaatttgcgggacactttcaatatttcagcagcagcagcgttacggggcggaaaaataaaagtgtaaaaccgattgcgttaataattcctcggttatgaacaattgattgggctaaatgagctggtgacacacttgttgagctccacgtttttcaccacgagcgcagtttttctttggggcacattatgctgatgaaaccaaatgtaggggccataaaaaagtgttgtcgttttacaactttcaataaaaatgtcattaggcggaccaggcgaaataaattcttgaactcaaaattatataaactatttagtccgaagatacggaatcgaaagatagggatctacgtgtgtcagctgttgtcccataatgacttttaatggcttcttaagtgataaaggtgggaggcatccagcgatgaagcatcatcatcggttttaattcctttttgatcggagcccgcatcgaaatcaattaagattgcaactattgaaagtgaaaacgtgcaatgaactttcgtagattgcgcttgattgaaccgacagccctcagatacagatacttctggcagaaaggtggcgataaaacagggttcattcattcagtgcccgtatgtgagtatcgcgcatctgagtattcgagtattcgagtattcgagtatcccagtattccagtattccagtatctgagtaactgagtatctgtcttcgtctgccgccagttaattggcttaaattaaggtagcgatcaaatggcaatgggaacaaagactcgctctgttgtgccctctacacactctataggaaaaacaaacagaaacagacccaaagaacagaaactccattttgtgaagtcttccaccttctcagatacagatacaaagtttcagagtagcgcgagagcgagagggcaattgagtgaccctcgggggaacaaagcaacagcaatcttctgggaccgcgtcttgcctctctgtctgcccgtctctttcttctccttcgccatggctgaacgcttttttcaactgattaagtcaactcttctctctcaagtgtgcgtgcgttcttcaattcttccacttcttttctccgcttcttttgcccgtttctgttttcttttcttttctttttttttttgttttttggtttctgtggcggatcgaaagaaaccatgagatcatcgcctctacggatttcagtcttgcgtgaaggcctgcgaagttgatttgccacgaaattaagtcgatccaccagttcttgggaacacagagaaaataagattcaatcagccattcagtttgaaatctatacattttcttagagtaactttaaagttctcatcgttctgaattataacttttgtcatctctatatgtaagttagccccgaatttctctctgtggattctgcagcacctcagccagcagttcgccccactcacactacatacttctcatttggttttcgagttccctttcgcatattttatggttcttaaacgatctgacagttaatttgttttcctcccccatctctccgcagttccctcgctggcctccactttgctccaccacaaccagtcgccgaagcacagcaatccgggatccagtgggatccaggatgcccatcccaaccagccaggtgccgctgcagatgccttcctggtcaagtgtacccagtgccacaagcgattccccgagtatcaggtaagatttggataaccaacaaaagcctagttactgagcagtacaaataattattgctcattaattcttggtaatttttgatttaagagtaattcagcttaggaaattaaagaactttcgtcagtaggattgaagtaggggaaatgccaagtgattatgattatagggccaagttcatggggctaaacgccagataagcgccatcttaatcaagtaataaatttaaatcctttttcattcactttcacagtccctcagcgagcacattgccagcgagcatccccacgacaagctgaactgcggagctgcccagccggagagcgatgccgaggacgagcagagcaacatgagcggcagcagcaggcggtacgccaagtcgccgctggccagcaacaacaacagcagcaccgccaacgccaacaacaacagcaccagcagccagtccatgaacaacaacagcgagctggccaagaaccacaacagtgctaacaaaatgtcgccgatgtgctcacctggctccctcacgcccggcgacctcttcgcccagctgcagcatccgccgccccaactgccgccccacctgcacgcccagttcatggccgccgccgcctccctggccatgcagtccgcccgcaccgccagctcgcccagccaacagcagcagcagcaactgcaacagcagcagcaactgcagcagcagcagcagcatcaaatggccatgcagcaactgctgccgccgcaactgcccggcagcaacagcagcgtgggcagcaactccgcctacgatttggatctcagcgccccacgctccacatccagtccgggctccaccaccggcgacctgagtggcgcctatccatgcatgcagtgcaccgcctccttcgccagccgcgagcaactcgagcagcacgagcagctccactcgccatgcggaccggcggcggtcagcaatgtctcccaggtgagttggacacaaccatccaaaaaaaaagcacatcaatgtgctaatataatatccaaagaactatttaaagagtaaagacgtagtaagggtttctatatatagaatgtcaaggctgaagttctgtaggcatgaatgaggcagagtttatagtatacctaataatgtttaaaaatattttatatacacgcatatgtccgagaagtgataatagctttgagtcagtgagtcacatgtccaaaataatgtttcttgggacaatcagctcgaaaagccgtggaatccagtgactaaacctgcggaatgcggtgcgaggatcgaaattcctggaagcgtccgataagagagaagttacttgttcttatccctcgccttccacttgcttacgtgttggagaccgctgctcatgcgcagtcggaatctgaatgcccgcgatggatgcaggcgggcagggatggcagggatggcaggagatggttctgggggcacttgatctttgaacacatcacggcggtcgtagcacaatgcgtgggctttgttcgcggctaacgggaaatgagccaaccgataacggcagtgcggtgccaagtacggcatccaatcaaaccccatgccatccgatccggatcccgagccaaccttatgcatatttcctgttgacaaatcgtcaaaaaaaaaaaaaaaaaaaaaaaaccagcaacgcaagtagctaagatatgcatatttcgaaaaacaaacagcacacactcgatagtgactaagagtaaactactcacttggaatttagtttttttttttttttttcaaatatgacctcaaggtttttttctccgtgcacgccacaagcactggcacttttaaagacgcgtttcgagaaacgcgcctcactcttatcgcctaccgccattcgacttttgttttatcggcgtggggcaacaacaaaacaatagtaaactatgataaggggcataaaaataaaacgtaggcgttcaccggaccgaaggaaaaatagtaaaaacgaaattccccaatggcggcgacggggaaaaacaattgggggtgttatcacaagggtatataaaaagtgtgtgcctatgtgtgtgtgtgtgtgtgtgtgtgtagaaatatgttgaaatatgggggaagactgtctgtcagtcacacgctcataactcccaattgtgcagttgttgttttttctaaggcctgccagcgtgataaggcattgttgcctcaggcaagtggaacctgataacacctaaccacacgaccccgcccacttggttttccactcgcctccgcttttcctgtccttcgtcgccatcttggccttatgtggcggcacacgagttgtaaaaagaaaatacccaggcctgtctcgtacgtcacacacgcgataaggagaaagtgggaaacgggtcagggatcacagggagaggcggagcaggcactggttcaccttggagctacccagcggccattaaagccacataaattataattttgttgcactcccccaatacagaatacagtctccatccaaagttttccccccaccactgctggtcataaattcatatggctagtttgttgttgtttttcctgtatgatgctttttttcggagggctgtatcttttaccttccccatttgggggcagaaagcacaagtgaaatgaaaaagtttgacaccaccccgaaaaaatgcgagatgagatttcaggttttttcgtgaaacagtggagcaaggtgctaaataatcgtatatcaatatataataaataggcatactcaagtatattccattattctatttgtatattttacaagaatttttaatacttcttcctgcttgagtctcctcaaaatttccatctaagcccactgtacactcttttcccttctattgctttttttgcacttttcacaactgctggccgttattaatatttacctaagctgcgatgattaccagcctggccaaaagctaataaagttggccagttctggagctgaagagcaggtttatgagttgcaacttcgcgtatgtttgcctctttttgccacccgacccgttgcccacgctggttgcatataatttacggcttcgttaatgacatttaaacatttaaacacatgcgaaaaggccaaaatggcaacagccacattgacacatggccaagtgtgcaaactatacgaacaaaccaattataattgatgtggcacattgcatttatttaatattgttggccattggcttttacacgtgttcgccgtattaaattattatgtgtgaaaacaattaattatgcggcaaacaaaaacagtgccagaaataacaataatgccgcccgctcggccagcgagacaaatggctcattatggaaatcaggctgtcgactcacaaaagtaggcaacgattttattgaaaaggcattaaagcgcttgacatcgatggtcagcgggggcagcaggatggccgtatcaatccaacattgttgatgcaacatttcaacatttgtttttaaggtcaacatcattaaccgggggagggggaagcggggagacaagaggggcagacggccaagcaaatggcaggccataaattacgggcgaaaaaagcagaggtcctggccaactttcagcagaaaaagtgcagcaattaaatatttgcttaactgcaaacgcacatggctgcaactttttggccacaactcatttggtgggttggctggctgccttccgcttttccgtttccggtttgccacctttttggccgccacaaactggggcagggcgcagacaattcaaattgaaaaattatatgcactttaggtgtagtcctgtgactgctgcgaatcctgcgagtcctgccactgctgccagtccacacatatccacattgggtcgtcgtctttggggcgccgcttgacgaacggagcgagtgaaaaattaatagcaatttatttcgctcaaccctttatttgctcgtctacccacttttaaatgtatttttatgcttttctgcggactccgtaaggtcaaaggtgacggggagttggcatttgctgccgttaaaactttcaaaattattcgcaattaaagcagacaaattaaaaaacttttaaacacagcgagtctacgatttatggtcagtggcatttaaatattataattagttgcaaaggatatttatattggcttacaaatcattttagttttttttttaatgactctaattgcagcatctccatttccacttcagtttctcaagtgaaaacccctgtcttaggatcattttttatggttcccattcccttaaacacatcatcatcatcatcatcattgggagttcctgtttccttgagtatatcccctggttttccccaagtttttcacctgtcttttccacatgtcaggcgctcgactacaatttaaacttcttgctcatttctttctcttatttttaagttactcctgagatttatatcaactttcaccgtgagggccataaattatgtgactccgcttgtggcgcagtttctcacatggaaattcctcagacgatttcccccgacttttccgttttcctcgctgcaagtcccatgggttttttcacttgtgacgtttattgtgcggttgttacttgatatgtttaatgagaaatgcagtgagagtgggaattcaaaagtcgaggggctaaaggaacacggaatgctgtgatactagagcacttgacatttcattgggcagtctgattgtgacaagagattgcacttgaagacgactcctaaaaaagtcacagcagaagtttccaattgcagtttcaaatggcattagttgaagatcttgaaagtgttggtacattaaacaaactctctaaaatggtcgtggaaagtgaatacaaacctagattagcatgagccacagctttaagcttttgaaacatttttcattggaacgtctgattaaaactacttccagctaaaagtgatagccacaccagcaactgctgggccagaaaatcatatttttcaacgacacgtttccttaatttcccaagacattggcttttatcaagagtgataaatttaatttataccgcagcgtcgcctaatttatgttttcctaatacgcaactaatttcgcagctctctcgctggcggcgaaatcagggcgtcctcatcatttgagaaaatcgttttatttataaacaattaaatttgatttgtcgctgcgttggcgaatgaaaatcgaaaacgaaacgcaggcagaagcagcaacagaaatttcggcaaatgtttatccgctcctccgactgaactcgagatgatttatggaaaattaataattttaaatcccagcgctgctgcagatccccgtatatgtgttgtatttacatatgtacatatgtgtgggtttgtcgtctgcacaaagcgcgtgaaacggccataaaatattgagaaatgcggcagcaaagtgaccgcaatggctaaaagtatttccctgttaactgcgcgtgttaatcaatttcccaatggacttaatgcagcgatgatcgcgctgagggaaagttaatgaacccgcccagcaatacgtaatggcatcactcattgttcctcggcaaaaaaaaaacaataaattaaccgatcaaaagtccgcgatctacctccggattatcaggttttcccgcgataacccggcgacctcctcgattccacgaggtactacaattagttccctctctctgtcttcccagaaaggtacgtcaatggcccgacttggggtttcattcatttgaaaagcctaatcagtcgtagtccacttttgtcttagtactattttcttgtggggcggcagctggcaggcgataagctaaaaattgggtcgcgtatttcgctataaagcagttagagatcagacactattatgttcgtcgtatttttcactcgagttcctctccctcgtttcatctttttgcgctaaacatttctttgtggcgtcgttaatattctgctttttgtttctatttgcctgacctcaaaagaatcacatagaataaaacaaaaacataagcagcaactttgagcttgtcgctttttgttatttttgtttacgcatttcgtcaggcgacaggtgcgcttctatatctatcagatacaatatagacaagtctatgtggacaaaccgcatacagcgcgttccaaaactttaggacttaagtgctacatttatagagaaaacaatgtgttttacactcatttgagtcctttgagccggatcgaggttgattattcatccaactaactcattactatccaaaaatccatagattttcgagcgccaatgtacccaatacatagtattcccccaattcgacatcgtttggtattttgtcaacattgtttgcttgcctttggggttgacactttgaaagccgaacgatctccctttggacgatcatcttttacggccaattatgcgcgctattatggccaaattcccatgtcactcagtgcataaggcatttttcaggcagcagcaatcgtgaaatacgttcacaaattagctttctgtctgcgccgagacattatcttagcgtgtctcgttcgtttgatttgtctattggtggggcgcaccattttcggcccggtccaaagacagccgcccacctacgatgcgttataattatagccaaaaggcctgtcgcccgcaattaaccaggctaaaatgcaactgctggaccatccgcacactacgcccagtacaattaaacttgacgaacgctttgaagacgctgccactgtgtgtggtcgctagtttttcgtccgaatttggctatttcacactgataagttgctgataagtagtcagcctcccgctgctttcaaagtacttgtaatatttatttttgtactcacctgatcgaggttatctgcaaagggaagagatagagaggggttagtaattgttttggtcgcctaatccgcatcccactcgacatcccggccctgatccgctcggcggttcgattgtttacgagcacacgcgcctcttcgaaatcgattgatagtgatagtgtgcgcttatcagctccgagagactcggttgatacatatatacatagttcaaccgcgtacttaaggtgaacagtgaaagtaccctgaggccaaagtgtacgtagggtgcgtattacttttatctcaactacttctgtcggtttcatccgactcaaaggaccaaaaccacatatttttcaaccaaaatatgtccataatctacatcgtttttccctgtgtacccagcccaatcgctttccctcttacatttcgaacggttcagatgaaatttaattaattaagcagctagcaacatgtggaaaagaaggggcgatcgaagcggacgtagtacgcacgtgtgtgtggcttatcgacactaatgccacggaggttagactgtaccttgaacactcgagtggttttagcttccatttccatgtgcgcggcccattcgcttagtggaatcaatcaattttcagcttcggctcgagtggctcccctgaaaaacacttgagtcatgcacacagtctgtccatccgtccatccgtccgtccgtcagtccgtcagtccatcagtagttaaccccgggggcgggcatcttcatggggctttgttaaaggtagcttcaattggcatttccgctcatcgcaaatataataataacaaactgtaacaacaaaagcgcataagaatccggctgacgcatcgcaaatggaacttaccttttgtaaacgtgtgcagcacatacgaacatacgagtaagtatctgtacatagtatctgtgtgagtggcgtatctcacggctgccattttcatttccatttcgtttgcgctgcgccgcgctttacatttaattgataacgccgacgacaacaaagcgcttccattgtgagctgctcttgcggtttaatgtccgctctgggaggtgtgtacagtggagactcggtagatggatagttgattgtacacgacgatctatatgtgtttgaattgttaatttctaaaaatgaaaaaggttacatattaatgtagggatataaaatatgcccttctacatttattggtcatgaatatctttcgtcacagccagttatcactgtaacgtttctaggctctgtggttccatggtttctgatttctaggtaggcgttattgctgtttacagccgaacaacctgattaagtgagtgcgtgcgagagagatgcagatagcccgacttcatgtggagagataacgggttctgaactgcgcttgtgtgagtgtgcatgtatgagtgcgtttgtgagcgggagtgagccaacaggtggccatgtttatactatagctatttatcgcactcactcacctgacaaacaaatggccgcacaaaaatggtacttttcctggagaacgagaatgtggtgaggggtgacgtcacaggtaaaacaacaagcggaaacggaaactgttagggctgtcgaaacgagatgaggaaaagcattttccgttcactttttaccatcagcagcagcacaaacaaattagaaggcccgcgctataaatgtattattatttttcccaacacgcctaaaacaataaacaccgtgtcacgttaacgaacaaactaattacaatacatattaatagtgtttttttggagtgatctcatcctgagtgggtaaattggttatgagttgatgctaatgactaatggcgcaatgtgcgttaattgaagctcatgagtaaccgtaaccccaaatcagggacaaagtccaagactatacagtggaacttgactttagaggcgaggaattaaaagaaaatcatttaattatattaacttattcctagaatcgcattaatatatttaatctgattacgatgtggaaaataaagcaagaataacaactaaaaacgctcgaagcgaaggtaaaacggcaataaatggaaagttcaacggctgaacggtaaacaacacacacatgcacaggcgaatacaaacgacagcgggtgggcgggggacaacaacacgtgttgccatctgtccgccaaagtaccgcaaatctttcaacgcagccgctaagtggaaaagtagaagacgccgggaagtcgggaaagcgggaaaagcggcgctgcactttcgttttcctttccactcccatttccaccttttttttttttgatgcgttcaatttgttgccaaacaaatcaaagcacaaacaaaaacgctccccgaaaaaccgaaaatttgattagcatcagctgttgaaacatattgatgtttttgtgcagctccccgctgcacttttgtttattgtgtcgcaattttccaattgaagtggaatttttattggaaggcaccaacagatgagcgcagcttttgctttgtttttgtttggtttggtttcttttcttttggagtgacaacctacctttgctggataatagccccgtctttgtctagcaagccgaggtctttttcgtcgtcttcttcatttcattgttcgccttcgtccgtgctgtgcgcgttcgctttttctacattttcattggcgcgtttaattgaagtttcggcgtattttcattcgaaaacgtttgcacaattcaccaaatatcacaaaatcacaaaacgtccacttttacgactcagaaacacacacgcagcaaaaaatggcccgttttccgcggtcgctttggatttggcccgcttttttgtggtcgcagctctcgccttgaaacaaattagaaagccattaaatttaaaacaaataaatacgcgtgttgttttaaacagtttttattacctgtgcgttggtgtttcgttttacccctgattccctaaacacgaccccaaaataaagcaacaatgtcggcggccgcttgcctactgtcttcttctacttcttcgttcgagaaggtaaccgggaaaaaaacaaaagatcgtagaatgggagaaatggtagaaatatgcgtggggagcgaaagttgccaactagaggtgacacttttgaacagcaaactatcggcattgaaaacttttcaaaaattgatttaaatatgagcctatgtcaaatcaacaagttcattaaaatgaagaatgttagtactgcgtaactagggataacatatctagttttcctactactcttagcattaagagtctccttctcatgttcccactacaatcgcaacctacctcctatttgcagacctgccgcatctgccacaaggccttcgcgaacgtctaccgcctgcagaggcacatgatcagccacgacgagagtgcgctgctgcggaagtttaagtgcaaggagtgcgacaaggccttcaagttcaagcaccacctcaaggagcacgtgaggatccattccggcgagaagcccttcggatgcgacaactgcggcaagcgattctcgcactcgggcagcttctcctcccacatgacctccaagaagtgcatcagcatgggcctcaagctgaacaacaatcgcgctctgctgaagcgactggagaagagcccgggatccgcatcctccgcatcccggcgatcgccctccgatcacggaaagggcaagctgccggagcagccgtcgctaccgggactaccacatccgatgagctacttcgccagcgatgcgcaggtgcaaggtggaagtgcggcacccgcgcccttcccgccattccatccgaactacatgaacgcggccctgctcgcctttccccacaactttatggcggctgcagctggcctggatcctcgggtgcatccctacagcatccagaggctgctgcaactttccgccgccggtcagcagcagagggaggaggagcgtgaggagcagcaaaagcagcagcagcatgatgaggaggagacccccgatgagcccaagctagtgatggatatcgaggagccagagaccaaggagatggcacccacgccagaggccaccgaagcagccactcccattaagcgggaggagagcagggaagcctctcccgatccagagagctaccgttcctcctcgcaagcaatcaaacaagagcaggagcccctgaacgtagcagaggaacgtcaaactcctgtggaagaacacgcccccgtggagcatgccgctgatctgcgctgcagtcgctgctccaagcagttcaatcatcccactgagctggtgcagcacgagaaggtgctttgtggcctgatcaaggaggagctggagcagcacttccaacagcaacaggccacgtcctttgccttggcctccgccagcgaagaggacgaggaagacgaggagatggatgtggaggaggagccccgccaggagagtggcgaacggaaagtccgcgtgcgaacggccatcaacgaggagcagcagcagcagttgaagcagcactactccctgaacgctcgacccagtagggatgagttccgaatgatagcagctcgtctgcagctggatccccgagtggttcaagtgtggttccagaacaaccgctccagggagcgcaaaatgcagagtttccagaacaatcaggcggcaggcgcagcaccgccaatgcccattgactcccaggcatctctaacccgggaggatcaaccgctggacttgtccgtgaagagagatcccctcacgccgaagagtgagagctcgcctccgtatatagctccaccgtcgggagaagccctcaatcccgaagcaatcaatctcagcaggaagttctccacatccgcatcgatgtcgccggcctcgatttcaccgtcatccgcggcagccctctactttggtgctgccccgccgccttcgcccccaaatagccaactggattccactcctcgcagtggccaggcctttccgggactacctccctacatgctgcccatgtcgctgcccatggaggcgctgtttaagatgcgcccgggcggagacttcgcttccaaccatgccttgatgaacagtattaagctgcccgattaccggggcaccagcttgagtcccggtggatcggagaagcgttcgtggcgggacgacgactcgcgcatctcacacgaggacgagttcggcgccggcgttctgatgccaccgaaaccgcgtaggggcaaggcggagacccatggacacgctggcgatcccgatctgccctatgtgtgcgatcagtgcgacaaggccttcgccaagcagagttcgctggcgcgacacaaatacgagcattccggtgagtagatcgaacttcaatgaccatagaatcctcactaactccgtgatttgtatcttctttaacaggtcaacgaccctaccagtgcatagagtgtccgaaggccttcaagcacaagcaccacctcacggagcacaagcgtctgcacagcggcgagaagccctttcagtgctccaagtgcctgaagcgcttctcgcactcgggcagctacagccagcacatgaaccaccggtattcctattgcaagccctacagggaataggtaagcgacacctcagtgccgcccacctgccaaccaggagccaatcccctagcgccgccagcgatggccagcaatcggggccgtcgtcgagttcaggttccggcggggaatcccccgtacacgccgcatcatcagcatccccaccatccgcatctggcggccatggctgccttccagcagcagcaccagcagcagcagcaacagcatcagcatcacaggctctcctggaatggaggtggagtgatgctgccgccgccacccagtcagcaggcgcatcgtccgacggctccacatccgcctccattgctttctggctccgggtttggccagccaccagcggcgcagttctttcaccaccatgcgggactgctgccgccgccgccgccaccgccacagaccacgcccacgtccgcgcccgccttcgacttcttcaatgcgaaaatgtttcagaattgagctgagaaagccgagcaagccgatcaagccaagccagccaagccagcacttacaggctgtacttaaaaaccgacgaacagaaaatctcaaaatgtgcaggaacacactgaaagaaacacccatccccgaaatgcactttagatcgactcagagtcagaaaggcaagagagaaatattttttatagccatatagacaggggaaatgtaagaagccgtagttgaaaacctttcgtttgagcgaatttattatttttacaatgttgcaaccactttgttcttagtattttattagtttagcttaacttagcttaccgcctaagttcgagcgcagggctgaatcattttgtttggccccctaaactcgcttaagatatcgttttatctatttttttacgcattaatgttttagcttttagtttgaggagctgaagagaccagtaccaagtgctgcggaatactcaaaactcgatcgttagtaaaaaaaagcccactccttgatggaatgaatgtatattttcaacgattgtgtattcttttaagctgtaacttttagttttcggttaagccaggctgggttgacattgcacaaccgctcgaaaggaattttccacccacaacctccggaccaacacagaagaagaaagcagagaaagtgaatgaaatgaagaaaatatacaagcagacaatacaacaatacaacaatacaagct

SEQ ID NO: 770 - DNA, 3590 bp, DROSOPHILA
acgcagatcagtgaaatcgcccacaaaataaaaacaaacgcgacactcgcagcggcgcatcgcgaagaaaaatcccagtgtttcccatgttcgaaagataaaaaacccaaggcccttgcccaaatggccgccacaacacgtgtgtgctctataagaaagaaataacgccgagcccagaagaacccactagccaactagccaactagccaaacaaactatccgcatcaaagtagagcaagtgttgcaacaagcattccaaatgttgtcctgtctggcgccgtcgtcttcacgtttcggccaagaggataccatcattcagcagagcatgccctccacctcccccttcgccatgcagtttccctcgctggcctccactttgctccaccacaaccagtcgccgaagcacagcaatccgggatccagtgggatccaggatgcccatcccaaccagccaggtgccgctgcagatgccttcctggtcaagtgtacccagtgccacaagcgattccccgagtatcagtccctcagcgagcacattgccagcgagcatccccacgacaagctgaactgcggagctgcccagccggagagcgatgccgaggacgagcagagcaacatgagcggcagcagcaggcggtacgccaagtcgccgctggccagcaacaacaacagcagcaccgccaacgccaacaacaacagcaccagcagccagtccatgaacaacaacagcgagctggccaagaaccacaacagtgctaacaaaatgtcgccgatgtgctcacctggctccctcacgcccggcgacctcttcgcccagctgcagcatccgccgccccaactgccgccccacctgcacgcccagttcatggccgccgccgcctccctggccatgcagtccgcccgcaccgccagctcgcccagccaacagcagcagcagcaactgcaacagcagcagcaactgcagcagcagcagcagcatcaaatggccatgcagcaactgctgccgccgcaactgcccggcagcaacagcagcgtgggcagcaactccgcctacgatttggatctcagcgccccacgctccacatccagtccgggctccaccaccggcgacctgagtggcgcctatccatgcatgcagtgcaccgcctccttcgccagccgcgagcaactcgagcagcacgagcagctccactcgccatgcggaccggcggcggtcagcaatgtctcccagacctgccgcatctgccacaaggccttcgcgaacgtctaccgcctgcagaggcacatgatcagccacgacgagagtgcgctgctgcggaagtttaagtgcaaggagtgcgacaaggccttcaagttcaagcaccacctcaaggagcacgtgaggatccattccggcgagaagcccttcggatgcgacaactgcggcaagcgattctcgcactcgggcagcttctcctcccacatgacctccaagaagtgcatcagcatgggcctcaagctgaacaacaatcgcgctctgctgaagcgactggagaagagcccgggatccgcatcctccgcatcccggcgatcgccctccgatcacggaaagggcaagctgccggagcagccgtcgctaccgggactaccacatccgatgagctacttcgccagcgatgcgcaggtgcaaggtggaagtgcggcacccgcgcccttcccgccattccatccgaactacatgaacgcggccctgctcgcctttccccacaactttatggcggctgcagctggcctggatcctcgggtgcatccctacagcatccagaggctgctgcaactttccgccgccggtcagcagcagagggaggaggagcgtgaggagcagcaaaagcagcagcagcatgatgaggaggagacccccgatgagcccaagctagtgatggatatcgaggagccagagaccaaggagatggcacccacgccagaggccaccgaagcagccactcccattaagcgggaggagagcagggaagcctctcccgatccagagagctaccgttcctcctcgcaagcaatcaaacaagagcaggagcccctgaacgtagcagaggaacgtcaaactcctgtggaagaacacgcccccgtggagcatgccgctgatctgcgctgcagtcgctgctccaagcagttcaatcatcccactgagctggtgcagcacgagaaggtgctttgtggcctgatcaaggaggagctggagcagcacttccaacagcaacaggccacgtcctttgccttggcctccgccagcgaagaggacgaggaagacgaggagatggatgtggaggaggagccccgccaggagagtggcgaacggaaagtccgcgtgcgaacggccatcaacgaggagcagcagcagcagttgaagcagcactactccctgaacgctcgacccagtagggatgagttccgaatgatagcagctcgtctgcagctggatccccgagtggttcaagtgtggttccagaacaaccgctccagggagcgcaaaatgcagagtttccagaacaatcaggcggcaggcgcagcaccgccaatgcccattgactcccaggcatctctaacccgggaggatcaaccgctggacttgtccgtgaagagagatcccctcacgccgaagagtgagagctcgcctccgtatatagctccaccgtcgggagaagccctcaatcccgaagcaatcaatctcagcaggaagttctccacatccgcatcgatgtcgccggcctcgatttcaccgtcatccgcggcagccctctactttggtgctgccccgccgccttcgcccccaaatagccaactggattccactcctcgcagtggccaggcctttccgggactacctccctacatgctgcccatgtcgctgcccatggaggcgctgtttaagatgcgcccgggcggagacttcgcttccaaccatgccttgatgaacagtattaagctgcccgattaccggggcaccagcttgagtcccggtggatcggagaagcgttcgtggcgggacgacgactcgcgcatctcacacgaggacgagttcggcgccggcgttctgatgccaccgaaaccgcgtaggggcaaggcggagacccatggacacgctggcgatcccgatctgccctatgtgtgcgatcagtgcgacaaggccttcgccaagcagagttcgctggcgcgacacaaatacgagcattccggtcaacgaccctaccagtgcatagagtgtccgaaggccttcaagcacaagcaccacctcacggagcacaagcgtctgcacagcggcgagaagccctttcagtgctccaagtgcctgaagcgcttctcgcactcgggcagctacagccagcacatgaaccaccggtattcctattgcaagccctacagggaataggtaagcgacacctcagtgccgcccacctgccaaccaggagccaatcccctagcgccgccagcgatggccagcaatcggggccgtcgtcgagttcaggttccggcggggaatcccccgtacacgccgcatcatcagcatccccaccatccgcatctggcggccatgg

SEQ ID NO: 771 - protein, 1054 aa, DROSOPHILA
MLSCLAPSSSRFGQEDTIIQQSMPSTSPFAMQFPSLASTLLHHNQSPKHSNPGSSGIQDAHPNQPGAAADAFLVKCTQCHKRFPEYQSLSEHIASEHPHDKLNCGAAQPESDAEDEQSNMSGSSRRYAKSPLASNNNSSTANANNNSTSSQSMNNNSELAKNHNSANKMSPMCSPGSLTPGDLFAQLQHPPPQLPPHLHAQFMAAAASLAMQSARTASSPSQQQQQQLQQQQQLQQQQQHQMAMQQLLPPQLPGSNSSVGSNSAYDLDLSAPRSTSSPGSTTGDLSGAYPCMQCTASFASREQLEQHEQLHSPCGPAAVSNVSQTCRICHKAFANVYRLQRHMISHDESALLRKFKCKECDKAFKFKHHLKEHVRIHSGEKPFGCDNCGKRFSHSGSFSSHMTSKKCISMGLKLNNNRALLKRLEKSPGSASSASRRSPSDHGKGKLPEQPSLPGLPHPMSYFASDAQVQGGSAAPAPFPPFHPNYMNAALLAFPHNFMAAAAGLDPRVHPYSIQRLLQLSAAGQQQREEEREEQQKQQQHDEEETPDEPKLVMDIEEPETKEMAPTPEATEAATPIKREESREASPDPESYRSSSQAIKQEQEPLNVAEERQTPVEEHAPVEHAADLRCSRCSKQFNHPTELVQHEKVLCGLIKEELEQHFQQQQATSFALASASEEDEEDEEMDVEEEPRQESGERKVRVRTAINEEQQQQLKQHYSLNARPSRDEFRMIAARLQLDPRVVQVWFQNNRSRERKMQSFQNNQAAGAAPPMPIDSQASLTREDQPLDLSVKRDPLTPKSESSPPYIAPPSGEALNPEAINLSRKFSTSASMSPASISPSSAAALYFGAAPPPSPPNSQLDSTPRSGQAFPGLPPYMLPMSLPMEALFKMRPGGDFASNHALMNSIKLPDYRGTSLSPGGSEKRSWRDDDSRISHEDEFGAGVLMPPKPRRGKAETHGHAGDPDLPYVCDQCDKAFAKQSSLARHKYEHSGQRPYQCIECPKAFKHKHHLTEHKRLHSGEKPFQCSKCLKRFSHSGSYSQHMNHRYSYCKPYRE

SEQ ID NO: 772 - DNA, 6772 bp, DROSOPHILA
gttaagagcttttctcttgacagcacctataaaactagttatcaattatagtactgtagaaattgtacaaccaaacaatctaagcaattaaataactagttctatttcattgcatctagaagattaatgaaaactgtaagcaaatcaacacacacaactagggttaacgtagattcacaaatccctgtttgtaacatcttccagttcaatggcaagttcgttgtttaagtctttcgatttggtattgggccaatggtaccagctttttggaatcaagttcggcaggcctgctacaccgacggtacttacataaatacggacagtttctaagagtaagatgatatcagatggctaatgacgatgctaatatagaactagtactagaatgtcgtcgatggctttaactacttggccaagtgattcccaattgacaatgtcaacgggatacgtttttaatttaccttgattaatggcatttatcattcttgactagacgcgcgtctaattgagtcacagaattctcggacccgatggaatgacaaattgagaacagagcaaggtcatcaatttggcgccttacttgactcatgccctaattgagaatccccaattgtgtccctatattattacaaaccattatcactgatccatattattaggcagcaaacacacatcatatacatagtatttgtttccattttcggctggcgccggtctgggaaattcattttacaattcaaatgtgcgaatttggtgctttggcgtgctagccgagatcgccgagtgtgaaccccatttgaaatgtgcccacttttcccggcgagagagttgcccagagagatcgattgattgagagatcggcatactgggagatcccaagagaagcctgtatataaagctcggctccgagggccgatcgctcagccgaatcgaagacgcgatcgcgttggtcacgcaggccacgaaaagacacacaagtcaatctccgaagaagcttcagcgggtgaagacgcgtctccagtctccgtttgtccggttctccaaaaaaacactcagtctgataacgcgattcggacggtgaacgtcggtacgtcgcgttgccgctcgatattccggatatatgatcgcatatatataatagatcgatctcgccatgaagtcgatgtgctgtgttagtgctgtgatcacactcctgccccttgtgctcctccctccgcccactgtcgcccagtttaatcaacgcaggcaaggtagtcgcagtcacttaattagtagagagcttttcgctttgccatatctatctatttaactacaactatctaaagtctatagaacttttacgaccgatctaagcaaacaacaaaccagttccattaacaacgcatctcgaaatttaatcaaaaatcattaaaaaatcaacgcattcaaatgagtttaacccaataataccgatttgcaaagacctctaacctgtgaaaacttgacgacatcttcaagttcaatggcgagttcgttgtttaagtctttcgatttgactgcggtccgaatgcggcgatttgtattaactgcaaaacaaacaatcatccccgcttattcacaacgaaatttttggctcattgtattcaagttcactaccaattcacaaaaccagtcaccaaggtcggattttgactcggacaccgacttaaacaggtgtttattacctgcggggcgttcccttagagcacgtatcgcattgtgaccggtactcgtaaagttcgattgagatatagacttctaagattccgttgaccagcaaacgacgatctttacgactatctaagattgttaagattatgagaaagtcttatgcaagtgtattgcattgcacataaaacttgttaggcctttagaatttgtcgtatatcgaatgtctatattgagctctgaatcacattagaaagagctccagtttagatatcaattattcaagacaaagaagcatagagatatgttagctcgaaataaaaataaatcacataagacaacaaggaaccccttttgttatttttcttgtgcatgcgaagtataataatagagcttgagtgctttcatatgccggttttgtttagaatttgtgttctggctagcgatagattgttgacttgctaagaggtgtcagaaagtatatgactaaatctgacattcccattaatgactcatatttggaagaaggccaatccgtttaacacaaaactaaccaaaccataataaaaaaaaacaaagttactactttgtttgaatcgattaaaagtaatagctgttctaaaagcttgggaatattgttaacaaaaagactacatttttaaaagcaaaacgcagtggattaagaaaaacctgaacttcaagtttatcacattttatacgagaagctaacgaaacgatgacccatttctttgttatccagttcgccagaactgcatcacacccgagaactattatggcagttgcgtggccctgacctactgcccccaggtggtgaacatcttccagaccaccagtagggatcgggcccagcgttatgtgatcgccctgcagcgcagctgtggcacccgcagcatcaacggtgatccggtggtagggacacatcttaggtctatccttccactttccatccttgctaagctttgccccgctcctcccacgtagatttgctgcactgaacccagatataacccggtcacagaacgtccacggaatcccttctttcccagcgagtccacattcattggcccacagccgccgccggaagttcctgacaatcccttcctgatccccacgcccaggactacgaccaccacgacgactaccactccagctcccattccggatacctcggcggctccccttatagaaccacgtggaaccgtttgccgcggccctgatacaaaaccaggaaactgtgtgggtgagtttatttgggaattcaaactgaaattttatatttttttttatcaatgtgcacacgtgttttttgtttgtggttcgatgtgctcgcacgtttttgttttaaatctttaaaatgtattttattgcgcctttgacgtgttttgcttgtaattaaatggcatttaatgctcgggaagagcccaaaaatcaattatacctgatgcattgacaggaataattagttgaaacctgtttctaattagaaagcattgtatgcaggcaaagtaatattgtttctcgtacagattcatttgatgaaccccaaaagttgatctgattatccaaaacagtttacagtatatgaaaatcaaaatatattttggatcaatctcaatcttttcgagtcttattatatttttatatgtatatttacttatcccatttagaaatcaaggagtgtgcctcactgctgaatgagcttaggtcaaggtcgcaggacgcgacctttgccaatttcctgcgtgcctcgaacgcggtttgccaaaacaagggcacccaggtgtgctgccccactggccagggcattaccaacaccactccggcaccgtctcaaatagttcccaagaacacggacgagataccacgtcggttgctcaatgtggaggagggatgtggctccacggtgggatatttcaagaagattgtgggcggtgaggttagtcgcaagggggcgtggccctggatcgcactcctcggatatgatgatccctccggatcgccgttcaagtgcggaggaaccctaatcacagccagacacgtgctcacggcggcccactgcatcaggcaggatctgtaagtgaaagatcctttatcctttaggatttcaattctaatctgagttccacttttccaaggcaatttgtacgtttgggcgaacatgatctgtccacggacacggagactggccatgtggacattaacatagcaagggtgagccaaccaatcgagcattttaaatgaatcaatttactcacaatcttgttgccccttttcagtacgtatcccatccggattacaatcgccggaatggacgcagtgacatggccatcctgtacctggagcggaacgtggagttcaccagcaagatcgctcccatctgcctgccgcacacggccaatttgcgccagaaatcttacgtgggctacatgccgttcgtcgccggatggggaaagacaatggagggcggtgagtccgcccaggtgctcaatgagcttcagatacccatctacgataacaaagtgtgtgtgcaaagttacgcgaaagagaagcgctacttctcagcggatcagttcgacaaggccgtactctgcgccggagtcctgtccggtggcaaggatacgtgccagggcgactccggtggtccgttaatgctgccagaaccgtatcagggccaactacggttctatctgattggcgtggtgtcctacggaattggttgtgcccgaccaaatgtgcctggagtttactccagcacacagtacttcatggactggatcatccaacaggtccaggacacaccctgatttgccatcgccatcgtgctgcacctagctcataagatccctaacttaaagcaaacccataaccagcagaaaacttgtgcaatgagaacaaaacgattgatttaaaattcattatgatattaaatgcttcaatacgattttatagtcctaaatttgtataatataaatttaaatttatttcacatttattactactatgtagtaggttgcactagtaacgttttgatcgctatattttgtatgtacattgtgatgtaatatcagtactttttgagtgcaaatattgacactcctggctttgttctcaggacgtctaatccctgtgcccgatgcctgaaggcagaaggattccttttttctttttttttttgggtcacagcatcttatgcaaatcgagcgcaagacgcccatcaatcattctggtaatgatcgcgtcttgggcgaacccgcagaagggacaaaaggggctaggggtgcacatatgtaaatgcggggtaagaaggcagcctgcgatcctggacatgagctgcattgtaattgctgcggcggccacaagcggatttgcataactcaggaggggatggaatgcccaaggtatcgcatgggcgccatctactggaggggaacaaagggttgccttccccaatcttccctcttgctttcttttctccagcggcagatgaacaaatcaaatgttggagtacaaaagcacgacgaatcctttttgaagtcagaacgcctcccgcgcatttgcggccatgtggtctggtttcccttcagattcaaatcgcatctggcagatgatttatttcgaagaaagagttcattaaactgcattcccttgaactattctatcctgttctctttacaattaagatgcaatcacaagagcgaaagtaaatcgttcttagatcatcatccgatcatcatcatcatcaataatgccaaccaaatttgcatgccccgcgatttttgcaccacatttgcatacctaagtccatgccacaagggtgttaatttgctcattacccgatcccttagatcgcacttcttcatcgccaatctgaaagatatttttgcaagggttcgcaaggatcgcaatgatcgcagggaggttcgccaggatcttgcctttttgcggcgtcaagaggcgaacaaaggaattgcccacaatcgcaaatgtaaacacgatcagtcaatttcaatgggtgcaattgtgatctatgatctcgatgatctttcaatttgccatgatcaatgagggcaattgtcaggtattgtatttttatctcctctaatttctctatatttaaaattagcttgttgcatttaaaaattattataactttttattgatagataaataatgattttattacagtgttttagtatagatcacagagactacaaaataatcgttgtcttaaagctccttaaataaagttatgtttttagacgatactaatctagttgaattgcactggaatcaaaacgatttgggtgtgggtaacccaatctggcactacgaatggcatccatccaattttctccagaactaagtctctggtgaagcagcactcctcttgagcgcgagcacctcgttcaaagcgggactgagtgccagggcgggattggccaccgcgataatgttgtcccccgccgcggagatgacctggactccacttagagctgcgcccgaggatgtgccactcagatccactgattcccgtggcggcgacgatgtctccatctggcgagagacgggcgatcgctcaccttccattccattgcatggcgtctgtggaggattaaatgtatttctcttattcttcggcctttcccgggtaacggaatgccctcgtagagctccaacacatactcactggcatggtcggcgagcttgagttgctgaacgagaagcgcgaatcgttgtcctcataatcagccgccttgctgactctgaaaattaatttaagtattataaaataatgtttagcttgtatacgtatatatatataaatacattatatattaatataaaatatattaagctaattttaagttttgaccttatactcacgagaacttggcaatttccgacagatcaaatggcggcttggcaaacttttggtacatggcgaacagattgtagcgcgaatcctcgacagcttcctttatttttgggttggatttatcaacaagatcggggattagagactctcaatcgcatttcaatggaaccaaatggaagctaagcgagg

SEQ ID NO: 773 - DNA, 2259 bp, DROSOPHILA
cgggtgaagacgcgtctccagtctccgtttgtccggttctccaaaaaaacactcagtctgataacgcgattcggacggtgaacgtcggtacgtcgcgttgccgctcgatattccggatatatgatcgcatatatataatagatcgatctcgccatgaagtcgatgtgctgtgttagtgctgtgatcacactcctgccccttgtgctcctccctccgcccactgtcgcccagtttaatcaacgcaggcaagttcgccagaactgcatcacacccgagaactattatggcagttgcgtggccctgacctactgcccccaggtggtgaacatcttccagaccaccagtagggatcgggcccagcgttatgtgatcgccctgcagcgcagctgtggcacccgcagcatcaacggtgatccggtgatttgctgcactgaacccagatataacccggtcacagaacgtccacggaatcccttctttcccagcgagtccacattcattggcccacagccgccgccggaagttcctgacaatcccttcctgatccccacgcccaggactacgaccaccacgacgactaccactccagctcccattccggatacctcggcggctccccttatagaaccacgtggaaccgtttgccgcggccctgatacaaaaccaggaaactgtgtggaaatcaaggagtgtgcctcactgctgaatgagcttaggtcaaggtcgcaggacgcgacctttgccaatttcctgcgtgcctcgaacgcggtttgccaaaacaagggcacccaggtgtgctgccccactggccagggcattaccaacaccactccggcaccgtctcaaatagttcccaagaacacggacgagataccacgtcggttgctcaatgtggaggagggatgtggctccacggtgggatatttcaagaagattgtgggcggtgaggttagtcgcaagggggcgtggccctggatcgcactcctcggatatgatgatccctccggatcgccgttcaagtgcggaggaaccctaatcacagccagacacgtgctcacggcggcccactgcatcaggcaggatctgcaatttgtacgtttgggcgaacatgatctgtccacggacacggagactggccatgtggacattaacatagcaaggtacgtatcccatccggattacaatcgccggaatggacgcagtgacatggccatcctgtacctggagcggaacgtggagttcaccagcaagatcgctcccatctgcctgccgcacacggccaatttgcgccagaaatcttacgtgggctacatgccgttcgtcgccggatggggaaagacaatggagggcggtgagtccgcccaggtgctcaatgagcttcagatacccatctacgataacaaagtgtgtgtgcaaagttacgcgaaagagaagcgctacttctcagcggatcagttcgacaaggccgtactctgcgccggagtcctgtccggtggcaaggatacgtgccagggcgactccggtggtccgttaatgctgccagaaccgtatcagggccaactacggttctatctgattggcgtggtgtcctacggaattggttgtgcccgaccaaatgtgcctggagtttactccagcacacagtacttcatggactggatcatccaacagcggcagatgaacaaatcaaatgttggagtacaaaagcacgacgaatcctttttgaagtcagaacgcctcccgcgcatttgcggccatgtggtctggtttcccttcagattcaaatcgcatctggcagatgatttatttcgaagaaagagttcattaaactgcattcccttgaactattctatcctgttctctttacaattaagatgcaatcacaagagcgaaagtaaatcgttcttagatcatcatccgatcatcatcatcatcaataatgccaaccaaatttgcatgccccgcgatttttgcaccacatttgcatacctaagtccatgccacaagggtgttaatttgctcattacccgatcccttagatcgcacttcttcatcgccaatctgaaagatatttttgcaagggttcgcaaggatcgcaatgatcgcagggaggttcgccaggatcttgcctttttgcggcgtcaagaggcgaacaaaggaattgcccacaatcgcaaatgtaaacacgatcagtcaatttcaatgggtgcaattgtgatctatgatctcgatgatctttcaatttgccatgatcaatga

SEQ ID NO: 774 - protein, 701 aa, DROSOPHILA
MKSMCCVSAVITLLPLVLLPPPTVAQFNQRRQVRQNCITPENYYGSCVALTYCPQVVNIFQTTSRDRAQRYVIALQRSCGTRSINGDPVICCTEPRYNPVTERPRNPFFPSESTFIGPQPPPEVPDNPFLIPTPRTTTTTTTTTPAPIPDTSAAPLIEPRGTVCRGPDTKPGNCVEIKECASLLNELRSRSQDATFANFLRASNAVCQNKGTQVCCPTGQGITNTTPAPSQIVPKNTDEIPRRLLNVEEGCGSTVGYFKKIVGGEVSRKGAWPWIALLGYDDPSGSPFKCGGTLITARHVLTAAHCIRQDLQFVRLGEHDLSTDTETGHVDINIARYVSHPDYNRRNGRSDMAILYLERNVEFTSKIAPICLPHTANLRQKSYVGYMPFVAGWGKTMEGGESAQVLNELQIPIYDNKVCVQSYAKEKRYFSADQFDKAVLCAGVLSGGKDTCQGDSGGPLMLPEPYQGQLRFYLIGVVSYGIGCARPNVPGVYSSTQYFMDWIIQQRQMNKSNVGVQKHDESFLKSERLPRICGHVVWFPFRFKSHLADDLFRRKSSLNCIPLNYSILFSLQLRCNHKSESKSFLDHHPIIIIINNANQICMPRDFCTTFAYLSPCHKGVNLLITRSLRSHFFIANLKDIFARVRKDRNDRREVRQDLAFLRRQEANKGIAHNRKCKHDQSISMGAIVIYDLDDLSICHDQ

SEQ ID NO: 775 - DNA, 3544 bp, DROSOPHILA
caaaacaacggaccgagttaaagacattatccgctaataggaaaaccactactatgggagaggcactactaaaaccgaggcaaatccctttaaagttcacgtagcaaggacacaaacttaccagttagcccaaaaaccctcgaatcgatgagatttcgagccacgataatcacacacaaaaccgaacagaagttaaagccagcggcaagaattagtaagatgccgattgaaaatatagctgaattaacacaattaacaatggcattataccctagcgacttttttttacctgtttgtactttagtttgtggttcggatatgttctagcatttgtcatagccacttatagttgtgtacataactagttaaaattgtgcatacagaacggttatcttaagtatataaatacacgcaacggtgaatattagcaagaccctgaagaaacactcaaactatacagacttgccagccagattcgcattccgacacactgagaatattcggaggtggaagtgggagtaacgcggaataataattacattattaatatacaacaataaacttgaacctaggtatatgattctgaatttaaataatttttagtaaggcagagcaaagaaacgagaagcaaatgcaaaacggaaactctaaacacttgaatgaaattaaaagacaacttattaaaaatacaaataaaaattgatgaattaagtaaagtaaattgctcaatttagctgagagtataaataaagaattatacgttaagtaataatttcaaaatacaaaccagtcttgttcttgggccagggtaaaaatgtggctgaaaggaaatcattttcatgacaatttcgggtggagaacacttttaagaaataaaggatacattggcagcactgattgcgatatacatcgataaaaaggattcgagtgcgcactgcgcatgtcaaggatgtgtcagatttggttgacagttctggactttaagggtatatacccgtaccttcgatggggtgtgtaagcaagctggttaaaaatggaaatctctggcttttaaaatgttgaccgccctgcgtcggaaaattcggttcggaatgcagcgcacggttttaattgcggtcctgctggcggtgggcattttcagctacgcctttctcaacctcaagttctgcttcaagttgatgtcccatcggagcctcaacttgatggtaagctatttcccctttccttcactgcaatatatgcatttctcaatataatcttgtatggaatagtgccagaaattcgaaaaacatgagtacagcggctctctgtgtgaggaactctgtggttcccaatcttccttcgacaactttcagtgtccgctgaatgatatgaaaactatcctctttacggccgaaaagaacggcgacttgtatgcggtgaaggtaggtcgcgttttcctggttctcacgctctggttgccaagactacgacttttccatttttccactcacttagctggcccggcacaacgatgacgagctgagctggacgaacaacaagggggagtcgatataccccaagctcgaggagttccacgagatcgtgaagctgcacatcattctggcgtacaatgtcaccctggatgataatatggtgaatagacacgagattagattgtgctcagaaaataaagtatctggctttcatgtgaaaatttcagatccgcgctctggtcaaccaggaaatagccgatgataactcgcagcagatggtcagtttttggcggctcttcaaggacaacaactacatgatgggcaaacttttcgacgaggaatccatctttccggctgtgctgggctcctgtggaccctactacgccactgagggactggagattgtgcagtccaaccccagcataatgcagtatctgtgggttcttagttctaacgaaaatatgatcggaacttatgtatcttttaactgtatagggcctccaatcgcgtgcagcggctgaagcatgctctcaatattatggagtacattttccgactggacgaaatgaagccggagccgctgaagatgtgcaagatgcaggtgaatcgcttcggaaccgcctctgagcgaagactgaagtaccagagtgccgagcacgtctatgtggagagccagctggacaagcgattgtccaggggcgtcaagtgccacgcccaccaggactgccacttccactcctgccgaggattgtgtgacgaggagaagcaatcctgcacgcacattcagcagaacaacaacttccagattttctgcgagcacatcctactgggcggaggcacatttcagcccggcctcctcagcggagtgcgcctctccaaggcgctccagaagctggtcaagatgtgcgtccagccgcccaaggagcatcaagtgccaggacgccagtgggcacccaacacgcagctcgccctgaggctctacaacgagctgaagcaactgcatcaggctgcaacagcatccgcaggatccgtgattcccgacgagggacaggcacgtcggggagtctaaaacattcggggattggtacggaagtcggagaagctcggaagcagcggacggtagatcaattggcgtacagctggctcaaaactgatagcatttttataagtagacttaattaattacaagtaaataaaacaaaaatgctttttttgactacaacaaaacaaatcttattgcctctttaaattaattaccaatctaatttaaattggataaatcaagaagccactgcaaaaacaaaatgtagttttttggacaattgaaattcccgccattcttcttcttggttacctaacattcaccattcttctctagaactgtagggttcccaaccatttcaacataggcgccaaatttaaattctgtttaacggtcgtggtttttaaaatcaagtaccattaaacggaatttaaacaatgagaataataaaaaacatttccgttgagtatgttaagtttattcagctacttttgctttgttattattcactttgaaaaatttaaattcagattacatgctttgttggttacatacaatttgcatagtggtttctggatataattatatttatttgcagcctgcgcccgggccaaaagtttatctcgccaggcttttccgggcattttccgagggaaagctgatgcttacttgactaaaacacagattaacacgtttactttatgctgttcgcattgcactgacgcacatgatgtcgcagttgtaattaatatatttatagttagtcagagtaattagataaactaaaacacacactttaattaccacaattatctagaatttcgacagggcttaagtacaacaattagttaatcggtaagtgccattaatacaatcgaaaagaatttagtatgttacatgttacggtcgatcggttgtgagttgagtagagctccctccacgagtaaagtgcaaaaatgtagaaaatgttgtggctattgggttcccctcactgtgcgtttgcttgtcatctgatcatcggatcatt

SEQ ID NO: 776 - DNA, 1279 bp, DROSOPHILA
cttcgatggggtgtgtaagcaagctggttaaaaatggaaatctctggcttttaaaatgttgaccgccctgcgtcggaaaattcggttcggaatgcagcgcacggttttaattgcggtcctgctggcggtgggcattttcagctacgcctttctcaacctcaagttctgcttcaagttgatgtcccatcggagcctcaacttgatgtgccagaaattcgaaaaacatgagtacagcggctctctgtgtgaggaactctgtggttcccaatcttccttcgacaactttcagtgtccgctgaatgatatgaaaactatcctctttacggccgaaaagaacggcgacttgtatgcggtgaagctggcccggcacaacgatgacgagctgagctggacgaacaacaagggggagtcgatataccccaagctcgaggagttccacgagatcgtgaagctgcacatcattctggcgtacaatgtcaccctggatgataatatgatccgcgctctggtcaaccaggaaatagccgatgataactcgcagcagatggtcagtttttggcggctcttcaaggacaacaactacatgatgggcaaacttttcgacgaggaatccatctttccggctgtgctgggctcctgtggaccctactacgccactgagggactggagattgtgcagtccaaccccagcataatgcagtatctggcctccaatcgcgtgcagcggctgaagcatgctctcaatattatggagtacattttccgactggacgaaatgaagccggagccgctgaagatgtgcaagatgcaggtgaatcgcttcggaaccgcctctgagcgaagactgaagtaccagagtgccgagcacgtctatgtggagagccagctggacaagcgattgtccaggggcgtcaagtgccacgcccaccaggactgccacttccactcctgccgaggattgtgtgacgaggagaagcaatcctgcacgcacattcagcagaacaacaacttccagattttctgcgagcacatcctactgggcggaggcacatttcagcccggcctcctcagcggagtgcgcctctccaaggcgctccagaagctggtcaagatgtgcgtccagccgcccaaggagcatcaagtgccaggacgccagtgggcacccaacacgcagctcgccctgaggctctacaacgagctgaagcaactgcatcaggctgcaacagcatccgcaggatccgtgattcccgacgagggacaggcacgtcggggagtctaa

SEQ ID NO: 777 - protein, 407 aa, DROSOPHILA
MLTALRRKIRFGMQRTVLIAVLLAVGIFSYAFLNLKFCFKLMSHRSLNLMCQKFEKHEYSGSLCEELCGSQSSFDNFQCPLNDMKTILFTAEKNGDLYAVKLARHNDDELSWTNNKGESIYPKLEEFHEIVKLHIILAYNVTLDDNMIRALVNQEIADDNSQQMVSFWRLFKDNNYMMGKLFDEESIFPAVLGSCGPYYATEGLEIVQSNPSIMQYLASNRVQRLKHALNIMEYIFRLDEMKPEPLKMCKMQVNRFGTASERRLKYQSAEHVYVESQLDKRLSRGVKCHAHQDCHFHSCRGLCDEEKQSCTHIQQNNNFQIFCEHILLGGGTFQPGLLSGVRLSKALQKLVKMCVQPPKEHQVPGRQWAPNTQLALRLYNELKQLHQAATASAGSVIPDEGQARRGV

SEQ ID NO: 778 - DNA, 10868 bp, DROSOPHILA
gtttaatttgtagagcgagaattataaagggtgcggtattcccgctccctccctcactccacccgccaaccttgcaatttatggagcttatgggggttggcaaaattctatataatcctgcatatttcacatttatatgtatgtgattgattcggccgggttcccgggacgttcgatttatgtggaccgatccgatttttatggcttatctcctgaggtggagcaaaagggaagaaaaaacataatttcctgaccgagattgcagctttgcgataatgccgctccacccgacatttgatgcttttggggccctgataatgatgggcttattatttattatattgttcttgtacgctaaggacatgtaggagtgccaattaaaattgaaaaaccgcctggtctatatatacatacatatatatgtacatattaggcgtacataaagcttaaaaaatcacgccaatttggccaaatgaagtcataaacgataaagagggagatagagggaaaatggagatggaaggaaaagccagaaaaccaaagtggaaatggacaggcgtttgccgccgctgcttgttataaaatgctaatacgcgcagcagctcgaaaaaaaagtggaaaaacgctttgaagattgaattattcaataataattaggcgtgcgacagggacggctatactgcggggcagctacaccatctctgtctgtacggcaagagtgcggcaaactcaccacactgaagcgagagcgaaagagaaaagaaggcggaacaaaagtcagaaaagtggagaaatacaagactcacaccggaaaaaaagagcgagcgagctagtctcgaaaccaataaaaatggtgtcgcacgcggtgcactccaccacgggagtgagagagaggcacgctctacacagccggtttcccaccaccaatcgtcgagtgcgtcggtgtgagtgagtatctgtgtggcaggcagcggtgcatccgaaactgcgaccacagtttcagtcgcagaacagacgtgatctcaagaggacgtgtctctctctggaaataaatagcccctgaaaagatacaaaacgccgcgtgtgacagtgtgtgtctgtgtttcccaagcgtgtgacgaacgagcgcattaattgaaagataatcaaaacaaattaacagcagaccatgtctcaatgaaccaattaaccggcgcacctaaagcacagtattaacgagccacagttacacaaacgatcgaaaggctttatgttaaagctcagcccagcgagcatgacagttacaggtctgcgccagacgatgaccagtcccacggtgccgccgagcagtaacactcccgcgggtaacctcatcatcaccagcagcagtagcaacagcggcagcaacagcggcagcaacatgagcagcggcaacatgaccagcagcaacctgaccaacctgagtcctagccacccggctggcctgaatgccctggccagtcccacctcgccgtcggcactgctgctggcccatcagcagcatctgctgcagcagcaccagcaacaccagcagcagcagcaacagcagcagcaggcggcggcgctccagctggccgcagtgcatccgccggcccaccatctgcacaagaccacctcccgactgagcaactttagtgtggcctctctcctggcggacacgaggcccagaacgccacccaaccaggcggcggatggaccccagaacctgaccagttcggcggccacctcgcccatctcccaggccagcagcacgccgccgcctccgccggccagtgcggccgcccaagttcccgccaacaccttccatcccgccgccgtcgcgcaccacgcccacttgctgcaggccgcccacgcggctgcggcggcacatgcccagcaccaggcgatggccgcccagctgcgccaacagcagcagcaggcggacgcccgggccaactcgccacccgcctccacgagttccacgcccagctccacgccactgggatccgcactgggatcgcagggcaatgtggcctccactcccgccaaaaatgaacgccattcgccgctgggcagccacacggactccgagctggagtacgacgaggagatgctgcaggaccacgaggccgatcacgacgaggaggaggactccattgtggatatcgaggacatgaacgccgacgactcgccgcgctccacgcccgacggcctcgacggcagcggcaagtcgctggaatcgccgcacggtccgccgccgggctctcacatgcaatccacgatactttccccggcggccctggcctccggtcatgtgcccatccgcccgacccccttcagtgcactggccgccgcggcggtggcctggacgggaatgggcggtggagttccgtggccaggaaccagacaaatgccgcccttcggaccgcctggcatgtttccgggagcaggattcggtggaggtaagtgtcgttatccagttctttgtggggtttttgtcagcttgttttcggtttttgtacttcctagaggggaaatgataaaccttatctgttacatgtgcttaactgtcctgtcctaagcgatattttaaactcatttgcaatggaggattcagcatgggcataattaaataatgggaaaataaaaatatatataggagagaatatagaactcaaaaggtttacttcaaaaaaaataaaaacaacctcaactctctttcgaaaatattttcaatttagagccttaacatcaaagtaaatatgagtgtatatatagttacatttcatatatttatttataattaactgtaaacccataaacatgaacttctgaacccgtgaacaatagaaatacgcgaattccgcttgggagcaaattccccattagcagccagcgatgtgtattcaaaaacgatttatttaatggaggaatttcaaaccacccaccccacccctcattgttttatgccccatgtgcggtggcaactttatctacaccattttgtgtcgcattttaattcaattaactgccgcccctcgccttaattggcatcgatggtgactctccgctcctggtcggacgcgagctgcgggtgctccatcatggccacctcgtcgtcatcgtcatcatggctatggaatggaagtgatcgtgactgcagtttgtagtcaaagtgcgtggcaattattgcggggccttaaataaaacaatgaaaactgcctgattgcgctgggcccattatttgatgatgatgatgatgatgatggctgatggctgatgatagtcgcgtcggttctgatttgactcaattggccacgtctgattattcattgcactcgctggccagcggcgtttttcggtgttttccggtctgacagccagccagccccccattaccgttcccgaattggaaaatctaataataagcgcgtaaaaagcggactgtctaaccgaccagccagactaattgaagcgagtctggctgtttaactgggcgatctctatctgcatgcacagttcacactttgcctgcatttcctggacaaaaagcaccgcgggtcgtagggaaaaactggtggaaaatcggggaaaacactcgacaagtcacactttgatgccggactgacatgtgaactttactcggccatcgcgaactctgcgtttccgctccttaaagttgctcaaacacattcgaaaaactcggaaagggcggtgcaaaaacggtgggcaaaaaagtgtaaatttgctttttatatgcagaacagcaactattgttcctgtttttgctgcatatgctcgggtttttcttgccactacaaagcattgttttataaagctgtcggctgtgttttgaaaaaaagggcttcaaatggggtgttgtattaggaaatttgggctttaaagtaggttagttcgagtattaccatattaccgcctcattcaaactattaatacatgaaattccagaactgcatctctaaaagtgctttcataaattccaaaatatttcaaaagggaactgttcaacaaatcgatataaatcaatctcgatgtgggccatcaattcaccgcccttcatcaaccacttgagctatctttcgttccttccctataaagatgccgagatgaataaactattccaaacatttgccgcttattttgtcatttggctgtcaactgctgcatgtgtataaaatacagtcgaacaacttcatttcatttcatttcgtttcgtttcgtatcatttggcagctgtttttttattttgtgttgttttctggccctcagtctcggtttcagtttctggttcctgtgttcagcgtgtctcattagcgcagcaggttgctgtcttctgtggactgatgatcccctgtttttccggagggtttcccttctgacctgcgccgctatcttctgcggcattatgtcaagtgttaggtacttagtgccttcggcaaatgcttaactggtagatacaggttgtatcttttggctaccgtttgtcggctacttcatggactattaaattaagctaccatcgattagagggaacacacacacacacacacatagtcagtcggcttgaagttgtatggttttttgccctgccatttgattagcatcttcgtgttgcaatatggggaattccctttgtgccttcataatttaactaattgcaagcgcagtcgagtcacgtatgctgcacatgccacccatttttgccccctttaacccctcgacggcccctgttactcagccaccacgcattgcagctgcaattcttggcagccattatagaaattaattttcaagctgaacaaacgagcaacaacttgggagtcattgcataaatacatagagccaggcacacacacacatgcacactatgctttatggcaagagagcgaaagagagagggcgagaaaacctggccaaaacggtgggtgtggcatgtcagcaacgcccacccaaaacacgcaattttcaacagcaacggcagcaatttaaacgttgacagacggctgctggttggcgaaaagcgagaagagggttaaggaagacccggtgctgtcgataagtgggcagcgaggggttaagggggccgtttgcatgcgttttaacaccatttgcaaggctccaagccgaaagagtcaaaagctaaaataatatttgcattctgcacgccatctaacgtgcatacgctgtactaaatacacacatgcaacacagcaacgttggcgagggggggtggtgccttcgagggggcgtgtggcggcgcagacattttgatgtatgttttggtaaataaaatttatttgcattaaattaccaggccagacaaagcgaaggtgctggtgctgcgaatggtgatgggttaaacgcggtggcagtggggtcgttaagggggggagtgctaagtgtgtgtgtgtgtgtgtgtgtggtggtgtgtatctgttaggttgagaaaacatttgctaaatatttgtagacaattggtagttcaactaatttgagctgcctgctgttggatgttgctgctgctgtagatgttgctgctgctgcgcttgttgctgttgccgttgctgttgttgctgcgctgcacctgagtaattaaatagcgtttggaagctgtcataagaggtggcctcacccagcccacgggctatccgagcactcttatcttgcccagaggcagcgaacttcattgcaaaacagtccaaatagatactatgtggcacgcaatgtgacaagattgcaacagagtgggcagtgcaacagcactgagcgaaatagttgtaataatactaatcgaagcagtccgtgtaaactcatcgctggcaactggttcttggcacgctgcccactaattaattgacccgtttaaccggtgcgctagttggccaactgagctccctgcgcccaggaccttcggctaatcattcagttagtgggtaaacacctatttggagctaattaaaatcgcacattatgaaatcggcctgaggtcccaaagcgattgccgttttgaccgtaagcgtgtaattgcattagccatccggccagcgatctgtccaatccatccactccatccactgcatccaatcctagtgcactccatattgctcaacggttttcactgcaaaaacgctactggatgtacaagacgtggatgtggatgttgctatggtgctatgcgaaaacgctttaatgaagaattaattgccagcaatttgcaccgcacatcaatcgagccttgtcaccgccggctatataaagcgattgctttggatatttggtattggtattgctgccgctgcgatcggtacgcgtaaatttcacaattgcttgttgcctgtctcatttagcagctgttgttgctgctgctgctgctcgatggtcttatacgatgtcgcggctacaatacaccggagaactcaaattaattgaaaatccattacaaacataggctaaatgtcacaattggcgtttgtggcatgtattttgcgctggcaatggcgacgtattgccccagccgcagcagcaacagcaacagcaacaactcgcagcagcaacaatgcctataaaagagcaaaaaggcgaaaacgagtctcgcactctggtttcagcgtgcgtctccatcttgcccctcgagcctcgagttgttcagcttttccgcaggttttgcaacatgccacagtcagacggtgggcggggcaagggggcgtcgaatccagctcacttgctatggaaaccccattccaacaatttagcgacaaatgagcaattaattttgaaataaatgtaaagcaaaccgaatcgaaacgaaacgaaaagaaggcaagattggagcacgatactgcatacaaataatggcaatgccactgattgcaatggaaactgattaataattaagaaggatttttattaatttttaaaccagagagccggggccaacaaagtttcgcgcataaatggcacataaatattaaagccatgctgggtataaagaaaaagaatcgtaaaagtcgagcgaccaacctgtgacaaaagcgaaaaagggctgtaaaagtttggccgcctcgtttaaatgctaatttggccactaatttacggtcaatacaacaagagcgacaacaaaataccaaacaagacaaaacaaaatcaaaacttcacacggaatgcaagctggccaagaaaacaagccgatttacaaaagtgtatatgtatatttatatttaaatatattttggagtcgcagagtctgtaacaaattttgtgaatgcagacttcattatgaagaccggggcacctggaatcaggcgatttactccgccttgttaggggccatacaaaacgcttttacgacctggccagaaacgatcgaggctcacaaataagtgaaattatatgcatatcggccatatcgataaggccgcagcattaacataactccggcatgtcacactaattacttaatgagccagtcagctcaggtttccccccgcggattattagttctgattccatcgccagttgcatttttatggcccgaagacaggccgtgcgacagttatttgtttactcaaaacataacatcataaaatgaatcgaatgtttttaggatcagcttggaagtccacttcctactcaaatcattgcattgcagcatgatattctgcactgttttttaagtttgtatgcctttcgtttattgttgtttaatgcatcgtttgccatttgcagagcatgaaaagcaattacaaaagcaggcaacttggccacgtttgtcactcggcaatttcaatttgtgcaattatgcgtaaaattaaagcgctgcatatcatttgcatttgtctttattttgattcgactgctgccttcgtttttcagcctgaaaacaaaatgcccaataaattacgcgtgcctggaaaggaagggaagagtagaattcaaagggggattgtggggggggggggacctggagatctgacccggactgactgcatctttaaaatgccatttgcatctttgtggttttggcgcagccccgatggcaagctcattactttcattaacaacactcccggcatgcaactcgcaacttgcaacttgcaacagctgctgctgccacggatcggtcgtctttataaggcctgcacgtttcttttttgctttgtgctgttttttttttttggtctcctacttctcctctggctgcctttgtttgccaaaacaaaatgcccaaattaaaattgttttgccgtggagagaatcgaactgagatatggccgggggaatcgggatttggcggggaggcgctgcagcatgctggaagaagaggaggaggaggaggaggaggggattcactcggggaatgcatttcccgtcgctactgctgctgctttgtctgacaaatagtttagacagcaaatttattggccacttaaaggagtaattaccgtatattgttgccgctgccgcttttagccaaattgacaaggccaaggacagcggcggttgacagcacatttcattcagcaagcgactgcattttgcatgcttaatgctacagtaggtgtcccttaaagcggacaagcaaatctttaagattgaaaacgccttggagtagacagcacagttggcggacaatgtgtaagggacaaataataagaaggagtacactgaggagtattccactttatttccctcaatgagacttctagtgcaacagccaactaatcaagactctttccatctattttccagatgccaacgaaccgccgcggatcaagtgcaacctgcggaagcacaagcccaaccggaagccccgcacccccttcacaacacagcagctgctctcgctggagaagaagttccgggagaagcagtacctgagcatcgccgaacgggcggagttctcctcctcgctgcggctgacggagacgcaggtgaagatctggttccagaaccgaagggccaaggccaagcgtctccaggaggccgagatcgagaagatcaagatggcggcgctgggccgaggagcacctggtgcccagtgggccatggccgggtacttccatccgagcctgatgcacctgggataagtggcggcccagttggtgggccacgatcgccaattgatgcgccaccaacgcccactgggccacagtgcccacgatcatcttcatcctggtaaccaaatagccgctggcggcggtcctcgagcggaaacccccaaaattttgctgtgatgttagcgcattttacgttacgatacttccaaatgttgtttcaaatgcacaccctgtaaataactatataagaagcggagaagaatttgcacccgattcgagcaatcgaaccttgtatatagcgagagcaaacaagcaagcagaaaaatgtttcctaattgtacataaatctagcaagtaaacccaatcaattcaattcaaaaccttcgttcgtttgtttcgcataaccaattgacaaaagaaacgaacggcattcgtttgcacaaaatcaagtcaataagcgtaaattaccgattaactaaattcatatttgattgtattgtattgtattttgcaaagtaagtcagtctagctaatggatcgatcgtgtatttaaaaaatacttctaagcacctaaactaaactaatctaatgctataactatgccgttaaaagtactttacgataataccacagacctatacatatagttcatacacgcattaaatattatgaatacaccatatagcgttaatcctctgtagttgtttaatcgtaaatcataaaatcgaaattgtgagaaactgatacaaaaaaacatgcgaaaagagcagaaggaaaatcatacaaaatcattgaaaaaaatatataattatacaaaaaaaaatatgataaagttctgtttaatctgttggtggtaaaactatttcaacacaatattcatattattttttttttagttcaaacactattttcctagctacaaagtgtctcatttgatgctgattctgagaatgagctctccattatcgacagcctcgtaaaatgtcagggaaacaatattttgttttgattaacacgtaaagtgttatgtgatgattgcataagtgcgattgcctatgttgcaatgccttgccattgcaaaaccattgcaaatcgagaatgtgaaattggtggccgcagcaaattgataaagggaaattaagcgggaataatttatattatattattataaatgcaggaatatttcacaaattccgcattactcatcgtggaattttgacagtcaagagtaatagccaccatttggtggagcatccttatcggctggcaattaatatttaattaatcaggcagtcggttgctggggcagctcaactggcccacatggcgtatgcgtatcgctgagcatttgaatatacatatgcatatgcatactgtgcgcagaggttggactagcaatcgcaattgagtgattatcaaattgtttgcattataatttttattcctgcgcgatttgtcgagtgtcaggccgggttcaaaaacgaatacattttttattcactttatttgttgttgacagttggccgagcgtcagtggtggcaataatgtgtactcactgatcgccgttccttatcgcttggaattaaaacccaattaatttaattacaaatggaaataacacgccgtcgccgcagcagcgagcaacacgtcaaataatttagctattttgatttatttacgaatggcaaacaagtgttggtgcctctcgcagatctgcgcaggtgtgttagtgcgtgtgcgctcaataaataaattaaaatattagtattattatttgccagctttcggctgat

SEQ ID NO: 779 - DNA, 2561 bp, DROSOPHILA
cagtcgcagaacagacgtgatctcaagaggacgtgtctctctctggaaataaatagcccctgaaaagatacaaaacgccgcgtgtgacagtgtgtgtctgtgtttcccaagcgtgtgacgaacgagcgcattaattgaaagataatcaaaacaaattaacagcagaccatgtctcaatgaaccaattaaccggcgcacctaaagcacagtattaacgagccacagttacacaaacgatcgaaaggctttatgttaaagctcagcccagcgagcatgacagttacaggtctgcgccagacgatgaccagtcccacggtgccgccgagcagtaacactcccgcgggtaacctcatcatcaccagcagcagtagcaacagcggcagcaacagcggcagcaacatgagcagcggcaacatgaccagcagcaacctgaccaacctgagtcctagccacccggctggcctgaatgccctggccagtcccacctcgccgtcggcactgctgctggcccatcagcagcatctgctgcagcagcaccagcaacaccagcagcagcagcaacagcagcagcaggcggcggcgctccagctggccgcagtgcatccgccggcccaccatctgcacaagaccacctcccgactgagcaactttagtgtggcctctctcctggcggacacgaggcccagaacgccacccaaccaggcggcggatggaccccagaacctgaccagttcggcggccacctcgcccatctcccaggccagcagcacgccgccgcctccgccggccagtgcggccgcccaagttcccgccaacaccttccatcccgccgccgtcgcgcaccacgcccacttgctgcaggccgcccacgcggctgcggcggcacatgcccagcaccaggcgatggccgcccagctgcgccaacagcagcagcaggcggacgcccgggccaactcgccacccgcctccacgagttccacgcccagctccacgccactgggatccgcactgggatcgcagggcaatgtggcctccactcccgccaaaaatgaacgccattcgccgctgggcagccacacggactccgagctggagtacgacgaggagatgctgcaggaccacgaggccgatcacgacgaggaggaggactccattgtggatatcgaggacatgaacgccgacgactcgccgcgctccacgcccgacggcctcgacggcagcggcaagtcgctggaatcgccgcacggtccgccgccgggctctcacatgcaatccacgatactttccccggcggccctggcctccggtcatgtgcccatccgcccgacccccttcagtgcactggccgccgcggcggtggcctggacgggaatgggcggtggagttccgtggccaggaaccagacaaatgccgcccttcggaccgcctggcatgtttccgggagcaggattcggtggagatgccaacgaaccgccgcggatcaagtgcaacctgcggaagcacaagcccaaccggaagccccgcacccccttcacaacacagcagctgctctcgctggagaagaagttccgggagaagcagtacctgagcatcgccgaacgggcggagttctcctcctcgctgcggctgacggagacgcaggtgaagatctggttccagaaccgaagggccaaggccaagcgtctccaggaggccgagatcgagaagatcaagatggcggcgctgggccgaggagcacctggtgcccagtgggccatggccgggtacttccatccgagcctgatgcacctgggataagtggcggcccagttggtgggccacgatcgccaattgatgcgccaccaacgcccactgggccacagtgcccacgatcatcttcatcctggtaaccaaatagccgctggcggcggtcctcgagcggaaacccccaaaattttgctgtgatgttagcgcattttacgttacgatacttccaaatgttgtttcaaatgcacaccctgtaaataactatataagaagcggagaagaatttgcacccgattcgagcaatcgaaccttgtatatagcgagagcaaacaagcaagcagaaaaatgtttcctaattgtacataaatctagcaagtaaacccaatcaattcaattcaaaaccttcgttcgtttgtttcgcataaccaattgacaaaagaaacgaacggcattcgtttgcacaaaatcaagtcaataagcgtaaattaccgattaactaaattcatatttgattgtattgtattgtattttgcaaagtaagtcagtctagctaatggatcgatcgtgtatttaaaaaatacttctaagcacctaaactaaactaatctaatgctataactatgccgttaaaagtactttacgataataccacagacctatacatatagttcatacacgcattaaatattatgaatacaccatatagcgttaatcctctgtagttgtttaatcgtaaatcataaaatcgaaattgtgagaaactgatacaaaaaaacatgcgaaaagagcagaaggaaaatcatacaaaatcattg

SEQ ID NO: 780 - protein, 465 aa, DROSOPHILA
MSSGNMTSSNLTNLSPSHPAGLNALASPTSPSALLLAHQQHLLQQHQQHQQQQQQQQQAAALQLAAVHPPAHHLHKTTSRLSNFSVASLLADTRPRTPPNQAADGPQNLTSSAATSPISQASSTPPPPPASAAAQVPANTFHPAAVAHHAHLLQAAHAAAAAHAQHQAMAAQLRQQQQQADARANSPPASTSSTPSSTPLGSALGSQGNVASTPAKNERHSPLGSHTDSELEYDEEMLQDHEADHDEEEDSIVDIEDMNADDSPRSTPDGLDGSGKSLESPHGPPPGSHMQSTILSPAALASGHVPIRPTPFSALAAAAVAWTGMGGGVPWPGTRQMPPFGPPGMFPGAGFGGDANEPPRIKCNLRKHKPNRKPRTPFTTQQLLSLEKKFREKQYLSIAERAEFSSSLRLTETQVKIWFQNRRAKAKRLQEAEIEKIKMAALGRGAPGAQWAMAGYFHPSLMHLG

SEQ ID NO: 781 - DNA, 2695 bp, DROSOPHILA
cacatgtttgtgaaaatgtgatttttttggggatttattgaactttttgcaacaggaaagctagctaggcaggaaattcatcaaactccttttaccaaagcggttttgcatacggttgatagatagggttttaagaccccattattatagattgtaagaaacctgaaatcgaaacgagactccattctactgttttcgttgcgtgtgattcatgattaagacagtaaatagttgcaatgttcaaaatgataacgaatactagcttatttgccttttaaactaccaaataaaatattactagggaaaggaaggaaaggtctcaacaaccaatatttcaagaaatttcacattcgaaaaaaattcacgatatgtaagttatttattcttatttaaatttattatttatttataccaaaaaaatagatttgagaacaaagcacaaagctgtggaaaaagtgaagttggcaaaagaaaaaaaaagtttatattttcctggggtgccaaagaagtcacttctgattctatttagcaattaaaaaacaatgtgtgtagatagttttttttggtgcaaaacagcctcgaaacatagacttttttccaatgactgtgttaattacagcaataaaacttactcgccgacgaagatgctttgatttttgataaacctacataacattttctagcttataagtaaattaaattgttaaaaagttttagttaggaatatgagttaggagtcaaagcaactgctaccccgttctttagaaagagttttgaaaaattaaacaatatatatatgaaaccacttcatttttttttttaattatatatatatataaagtaagtagttgctgcaaatgacgtacagctgcaaaactctattttttattgccaaattgtaccactgccatatggcagcactgtaaattacatcagctgagagcaacgagaatgagtccgaaaaggttggtgaaaaggctaagataacaaaagcctgttttggcgctctacctacggtcacactgtagttcagcaatcacgaaattcgtttaaacttgaccacgaaattaagcgataaatgacgatgtggattggccaaaacacccagattcgtttggtgccactaaaggatccgccaaagaccatccgatacagtttcctggcgaccaagttcgggcagatgatgatgggagtgataaacccaatatccggcgattcgaaagaccaagtcgcaattggtgtgcttcacttcgtgattaaggacaatgtgagtacctacaatgaagtccaggagcggtggccaaaatccgaactctggaaggacgatgatgcggtcaagttggtggcggataaactgttcgaaagcgacaaggaaaactcgcaggcgattcccattgccatctatggaaccgacttccagctgtccgtatggcgagctctggtgcatatgaaacgaggggagacctgcacttactcccaactggccgagcggatgggtcgtccaacggcggtcagagcagtggccagtgctgtggccaaaaatgagcttgctatcctcattccgtgccaccgagttgtgtcccaaaacggagcttcgaagtaccactggggcgcagccctcaagcaactgcttctggccgatgaaaagtcaaagaactattaaaaatcgttactcgtatctttattgaaactcaactccgcacaatggtcttactgttggggtggtaaggaatttgaaaatgcagacaggctcgagattgtgcacttcctacttataaactgtacctacaaaataagagcgatcccatctactcccgatgcagcagcacgaaaatggccaaaatagagagaatggcccactgaaaagttgcaaattcgggcttagtggcgaaaaaaaaacacaaacgtccttcaacttaccttaaccttgggatattcgttcatgaagatcgtgatgatgcccacgtaaggcaggaagcccctggcccggcccacaatgtcctttttggtcagccacagctggttgggtgcatacaggccccggtcgtccacgttgttattgtcgcccttggtcaggaacttgacggatccgtcctctctgcagaaaagattgattgggattatatgggaccaaaccaaaccaaaaggaaatcatacagaatacaataaaaaggaatcttggcccgtgactaaatataaaacaacaatgttttaagacaacgaaacacaagcttaacttaatgacgtgtcctaaaactacaaattgtatctaaaataaaaaatgatctattccatacggcatgtgagctattttcaatcccttttagaaaatatgtaattcctttttgccttcactgctgtaggaaaacttttactagccactgtgttccatgcaccttctcataaacgagcttaagggaggtccacaaatttacataacatttcatgtgcacaaggatttcaaatagttaaaaaaatagcattacacaaaagtggcactaatttagttccttcccctggcgattagaaactatgatgctcattccacctaaccgatcagagatgttaaaatgcctacttgaacagcaagcacccagtacgacatcatgccccattcatcttaaagacgctttctgggattggtttccatatccgtagccccaggaaactcacttttcgtgcagcttgatgacgc

SEQ ID NO: 782 - DNA, 695 bp, DROSOPHILA
tggcgctctacctacggtcacactgtagttcagcaatcacgaaattcgtttaaacttgaccacgaaattaagcgataaatgacgatgtggattggccaaaacacccagattcgtttggtgccactaaaggatccgccaaagaccatccgatacagtttcctggcgaccaagttcgggcagatgatgatgggagtgataaacccaatatccggcgattcgaaagaccaagtcgcaattggtgtgcttcacttcgtgattaaggacaatgtgagtacctacaatgaagtccaggagcggtggccaaaatccgaactctggaaggacgatgatgcggtcaagttggtggcggataaactgttcgaaagcgacaaggaaaactcgcaggcgattcccattgccatctatggaaccgacttccagctgtccgtatggcgagctctggtgcatatgaaacgaggggagacctgcacttactcccaactggccgagcggatgggtcgtccaacggcggtcagagcagtggccagtgctgtggccaaaaatgagcttgctatcctcattccgtgccaccgagttgtgtcccaaaacggagcttcgaagtaccactggggcgcagccctcaagcaactgcttctggccgatgaaaagtcaaagaactattaaaaatcgttactcgtatctttattgaaactcaa

SEQ ID NO: 783 - protein, 194 aa, DROSOPHILA
MTMWIGQNTQIRLVPLKDPPKTIRYSFLATKFGQMMMGVINPISGDSKDQVAIGVLHFVIKDNVSTYNEVQERWPKSELWKDDDAVKLVADKLFESDKENSQAIPIAIYGTDFQLSVWRALVHMKRGETCTYSQLAERMGRPTAVRAVASAVAKNELAILIPCHRVVSQNGASKYHWGAALKQLLLADEKSKNY

SEQ ID NO: 784 - DNA, 4441 bp, DROSOPHILA
tgttaacggcactgaattctgttttgaattgcatatgtacaccgaacacgatcgaatatttatatatacagaaacatagatatatttttgtacaactcttggtttatactgcacgatattatgtaaatacatgtgtatgcatttttggatgtgattaaagtctttacactcacacaaaagccatcacctcttactttctcttcgggctgagagatcggaaccaagctgaagaccccacaactctatattctaagagcttaaacactacatatcatggccaaggaacacgggacatgcccagggcttttctgagatacattttacaagatctaaacaactaaccaactgaacctatcgcttttacacaacgaatacgagaacggaaacggaaacagcagcatacaatttccacagacttcctgtatatacacgctatatatatgtagatccgcttgtcgtacgatattgctcatctcttcactcgccaaatatctcgttgtatctctctttttagcgctatgctaaataaatatatgtattgtatatcaaagcagtagtagggaattagggacgaattgatcgattatagccgaattgtaataactattattgccgtattatgcatgtagctacatatatatacatactattatattaaattgtttagatgtgatgctatctgaccggaggatcgtgtgcgtagagaagttttgatttacaacgcaggcatatcccagagataacaaaatccgatttcattccaatagtatatatgtatagataagctaaagcaaaaccaaatgaaatactcttgaaataataaaactgcattttagaaatatgctaaaacaacactgcggtttccatactatatccttatcgccgcaatttgtcgacaatttcaattctcaggcgttcttgtggttttcaaaaccgatactagtgccttcgaagttttgtataaaatgtgcagttctttcggtgaatagtcacagtcgtgaagttcccagacttccagtcacattccccatttagtttgctccgcgatccagcaggtcctccctgacatcccattgaaaatggccgacaagaagaatctcctcctgcttttcgaccatcccaccgagccagtgttcatggacaagggcaagagggtgaccgtgttcgatgtgcccgactccttcctgaccgaccgctaccgacccatcagcaacgaggtgcagagccgcgtcggcgacaaggtggagcagcgcgttccagtccgggagatctccattcccgatctgcggatccccatgtccctgggccgggacgagcagttctcgctgttcctgcccaagcaccgcaggatcgccggccgcctgatcgatatattcatgaacatgcgctccgtggacgacctgcagagcgtggcggtgtacgccagggatcgggtcaacccggtgctcttcaactacgccttgtcggtggcgctgctccatcgtccggacacccagggcctggatctgccatccttctcgcagactttccccgaccgcttcatcgactcgcaggtgatccgcaagatgcgggaggagtcttttgtggtgcagcccggttcccggatgcccatcaccattcccagggactacaccgcctccgatctggatcccgagcaccggctgtggtacttccgcgaggatctgggcatcaaccttcaccactggcattggcatctggtctaccccttcgaggcctccgaccgcagcatagtggccaaggatcgtcgtggcgagctcttctactacatgcaccagcaggtgatcgcccgctacaatgcggagcggttcagcaacaacctggccagggttctgcccttcaacaacctgagggatcccattgccgagggctacttccccaagatggactctctggtagccagccgcgcgtggccaccgcgcttcgagagcaccaggttgagcgatctcaaccgggagtccgaccagctgaatgtggagattggagatctggagcgttggcgtgatcgcatctacgaggccattcaccaaggatttgtcatggatgtgagttgttggtgggttttccattaactaaataacatgccatattccctttcaggagcgtggcaaccgggtgccattggatgaggcgacgggcattgataccctcggcaacatgattgaatcatccattctgtcgcccaaccgagtgctggtaataagtccttacccttagtaaattattctagggattaatcctattgctcccctagtatggtgacctgcacaacaacggacacaccttcatctcgtacgcccacgatccgaccagcaagcacctggagtcctttggcgtgatgggtgatgtgtccacggccatgcgcgacccggtcttctacaagtggcactcgtacatcgaccgcatcttccaggagcacaagtcgcgcctgcccgcctataccgagaaccaactaaactacccgggcgtctcgatcgcgggcatccaggtggacaccaatggaggtcgtcccaataatctgaccaccttctggcagcagtcggacgtggacatgtcccgtggcttcgacttcctgccgcgaggtaatgtcttcgccaggttcacccacctgcagcatctgcccttcacctataccatcagtttgaacaacgatagtggtgcccagcgtttcggctacgtgcgcatcttcatggcgccgaagaacgacgagcgtggccagcccatgctgatgcgagatcagcgctccatgatgatcgagctggacaagttcgtgacttcgctgaacccgggacccaacaccatccgccgccgctccacggagtcgagcgtgaccattccgttcgagcgcaccttccgcaacctggatgccaatcgtccggcggccggcactccggaggagctggagttcaacttctgcggctgcggctggcccaaccacatgctggtgccaaagggtctgcccgagggactgcagtgcgtgctgttcatcatggtgtcgaactatgagaacgacagggtatgttagctggctagtaaatcaaggatatttttgacaattatctccacctccagattgaccagcaattggtgggtcggtgcagcgatgccgcttcctactgtggcgtccgtgaccgtctttacccggatcgccagtccatgggattccccttcgacaggttgccccgcagcggagtcgaccgcctggttaacttcctcacgcccaacatgagcatcgtggacgtgaacatccgccacgagaaccgcaccgtgcagcgcccaaactagacgatccgcacctgattcgctttcccgattcgccctgacccgattccatgacctcgcccacttctagatatacaactcttagcaatctattgcatctttattgagccgcttaataaacaagacatcatggcattccacaatcccacttttgttctcaattattgtggctcggcctccgggcgagaatctctcgctgattaggcttatcagccgcccgggagaagctttaaatgccagctccacggccggagcacctcagttcgagcagatccggtgttgagtgcgaaagtgaaaccgattcccgaggagatgggcctgctgctgcttctggtgctgatagcgggcattggcgtaagcactgtaccgattaaataatctatgggtccacaaagatcccacaaaaagatgtggtctttagataactttaaatcataattttgcgtgtttgaaatatgtttcatttagatgcgtgtcagtttctatatagtttgaggatacttagaagacctagactaaactaagcctgtaatagcaataatattgtaagtgaatttgctgcttttaattgattgtcatttattttagtgcgcaactgcagcagccaacattgacctggaggccaagacgtttgtgaatcaatcgagcgatcgctactacaggttctataatgagattgccgccgaaacgtattcggccaacaacgaagaggacttcgatgcccttttctccaaactaaacaatgtgaagcggattgccgaggagctggtgagcatctcccggcaggctgcgacctacgatctggacaggattcgcagcccgcagacgaagatggccctccaggagctgcgcactgcgggtgacttgttcgtcctgggcgacgactatttctcctccgtacagatgaacttggctgcgctgcaaacactttccacggacaaggacatcgagccgtatcttggtggggccaatatgcccaacgaggacgacagtccgctggcctatttcccagacatccagaagatcgtgcagagcagcaaggatgccgacgagctgaagtactattgggaggcctggcgggataagaaccagctgtgggcctccctcaacttctacaccatagtgcagtcttaccagaggg

SEQ ID NO: 785 - DNA, 2272 bp, DROSOPHILA
aagttcccagacttccagtcacattccccatttagtttgctccgcgatccagcaggtcctccctgacatcccattgaaaatggccgacaagaagaatctcctcctgcttttcgaccatcccaccgagccagtgttcatggacaagggcaagagggtgaccgtgttcgatgtgcccgactccttcctgaccgaccgctaccgacccatcagcaacgaggtgcagagccgcgtcggcgacaaggtggagcagcgcgttccagtccgggagatctccattcccgatctgcggatccccatgtccctgggccgggacgagcagttctcgctgttcctgcccaagcaccgcaggatcgccggccgcctgatcgatatattcatgaacatgcgctccgtggacgacctgcagagcgtggcggtgtacgccagggatcgggtcaacccggtgctcttcaactacgccttgtcggtggcgctgctccatcgtccggacacccagggcctggatctgccatccttctcgcagactttccccgaccgcttcatcgactcgcaggtgatccgcaagatgcgggaggagtcttttgtggtgcagcccggttcccggatgcccatcaccattcccagggactacaccgcctccgatctggatcccgagcaccggctgtggtacttccgcgaggatctgggcatcaaccttcaccactggcattggcatctggtctaccccttcgaggcctccgaccgcagcatagtggccaaggatcgtcgtggcgagctcttctactacatgcaccagcaggtgatcgcccgctacaatgcggagcggttcagcaacaacctggccagggttctgcccttcaacaacctgagggatcccattgccgagggctacttccccaagatggactctctggtagccagccgcgcgtggccaccgcgcttcgagagcaccaggttgagcgatctcaaccgggagtccgaccagctgaatgtggagattggagatctggagcgttggcgtgatcgcatctacgaggccattcaccaaggatttgtcatggatgagcgtggcaaccgggtgccattggatgaggcgacgggcattgataccctcggcaacatgattgaatcatccattctgtcgcccaaccgagtgctgtatggtgacctgcacaacaacggacacaccttcatctcgtacgcccacgatccgaccagcaagcacctggagtcctttggcgtgatgggtgatgtgtccacggccatgcgcgacccggtcttctacaagtggcactcgtacatcgaccgcatcttccaggagcacaagtcgcgcctgcccgcctataccgagaaccaactaaactacccgggcgtctcgatcgcgggcatccaggtggacaccaatggaggtcgtcccaataatctgaccaccttctggcagcagtcggacgtggacatgtcccgtggcttcgacttcctgccgcgaggtaatgtcttcgccaggttcacccacctgcagcatctgcccttcacctataccatcagtttgaacaacgatagtggtgcccagcgtttcggctacgtgcgcatcttcatggcgccgaagaacgacgagcgtggccagcccatgctgatgcgagatcagcgctccatgatgatcgagctggacaagttcgtgacttcgctgaacccgggacccaacaccatccgccgccgctccacggagtcgagcgtgaccattccgttcgagcgcaccttccgcaacctggatgccaatcgtccggcggccggcactccggaggagctggagttcaacttctgcggctgcggctggcccaaccacatgctggtgccaaagggtctgcccgagggactgcagtgcgtgctgttcatcatggtgtcgaactatgagaacgacaggattgaccagcaattggtgggtcggtgcagcgatgccgcttcctactgtggcgtccgtgaccgtctttacccggatcgccagtccatgggattccccttcgacaggttgccccgcagcggagtcgaccgcctggttaacttcctcacgcccaacatgagcatcgtggacgtgaacatccgccacgagaaccgcaccgtgcagcgcccaaactagacgatccgcacctgattcgctttcccgattcgccctgacccgattccatgacctcgcccacttctagatatacaactcttagcaatctattgcatctttattgagccgcttaataaacaagacatcatggcattccac

SEQ ID NO: 786 - protein, 684 aa, DROSOPHILA
MADKKNLLLLFDHPTEPVFMDKGKRVTVFDVPDSFLTDRYRPISNEVQSRVGDKVEQRVPVREISIPDLRIPMSLGRDEQFSLFLPKHRRIAGRLIDIFMNMRSVDDLQSVAVYARDRVNPVLFNYALSVALLHRPDTQGLDLPSFSQTFPDRFIDSQVIRKMREESFVVQPGSRMPITIPRDYTASDLDPEHRLWYFREDLGINLHHWHWHLVYPFEASDRSIVAKDRRGELFYYMHQQVIARYNAERFSNNLARVLPFNNLRDPIAEGYFPKMDSLVASRAWPPRFESTRLSDLNRESDQLNVEIGDLERWRDRIYEAIHQGFVMDERGNRVPLDEATGIDTLGNMIESSILSPNRVLYGDLHNNGHTFISYAHDPTSKHLESFGVMGDVSTAMRDPVFYKWHSYIDRIFQEHKSRLPAYTENQLNYPGVSIAGIQVDTNGGRPNNLTTFWQQSDVDMSRGFDFLPRGNVFARFTHLQHLPFTYTISLNNDSGAQRFGYVRIFMAPKNDERGQPMLMRDQRSMMIELDKFVTSLNPGPNTIRRRSTESSVTIPFERTFRNLDANRPAAGTPEELEFNFCGCGWPNHMLVPKGLPEGLQCVLFIMVSNYENDRIDQQLVGRCSDAASYCGVRDRLYPDRQSMGFPFDRLPRSGVDRLVNFLTPNMSIVDVNIRHENRTVQRPN

SEQ ID NO: 787 - DNA, 3121 bp, DROSOPHILA
ttgatgacgcggtgtacaatgggtatgtccctgccctccaccttgaagacgacgatctcgccgacgcgcaccggctcctccttgtagttagtgaggaagaggaggtcgccgcggtggaaagccggctccatgctgccactgagcacgacaacgatcggcgactcgctgccggtgaccaccatcaggcccttccagatcatcagcgccgaggagacgatcatggcgaagctcagcacctggtacagcgactgcgggagggaaagggcacgaatcaggatgatatatgggtgcattgcccggagaagcggcgctgctcacctgacgcttgttcattctgttgaagtcgcccagcatctcgtcaatctgcaacatgctggctacgcccatggctgcggctgttattgcggtgcttgtggaggaaatagcctttttaaatgcaattgaaaaggtccttaacaaaacttctcggcttcgtccacgaagacagaaaatttccgacacgtatgtttaggccgagttgccagacggtgtgtgacgggtgcgtgatgatctttgtgcaactattgttcggtcacactattgtttcccaaaaactcccgccttttgtgactttttttttttttgggtataaacattatttaattcccggcgttggttcaagttagtcttttattctggtcttcgtgtttaccttataaatgtttcagaagttctaagattaaaggtcactctgtactataaatcaccatttttattcctataacttaccaattgcgcacattagaggcatcttaacctttattaatacatagtaatattatataatatatatcgtagtggcaaaaattcgaattaatagcgttcgtaatagttcttaaatatattcctgagttaacggtaaaaattaaagagtatcccatacgctacagtgctgccacaccaagcaatcgataagcgagctgccaccacaatttgacagtaacgttttccgcaattggtgtgaccgcaagcgaaaacgtgaagtgagcgccatcggtggtgttttctcgcgaaatataatatcaactaagcggagaaagatgggcgacaagttgctggatccgacgcagatcatcaatgggctggctgtgatgctgtcctttttcgtgggctaccgatacgccctgaagcgaggcgatgccaaggactccgtcaccgagggagcggcgaccccgttctcgcaggaatcttcggtgtctagcggttccgaggcttcagtttcggataaggtgagaaggaaagccctcggtaggcattcaatggccccaatccacctagtactctgaacttgttgtagacccaaatgcatcattgaacgcatacacttggggtcacaataatagcagtgccattttttgttgtacggtagaagttttcaaaagtcctactttacatagtttaaagtatgattttttaacataagtatatagcacatacacattataataatataataccaacgctaattttctaaacattgcagggctatggaggcttgaacgacaactttaagatggtcctggtggtgcgcaacgatctcaagatgggcaagggcaaaattgccgcccagtgtggccacggagcggtgggtgcttaccagcgggcggtggtcaggacgcctcgactactgcggtcgtgggagaactgcggttgcgccaagatagccgttcgcgtggagagcgaggcggagctgatggccatcaagaaggaggccgagagacagcaactgaacacgtgtctcatccgcgacgccggtcgcacacaaatagaggccaactccaagactgtgctggccgtgggtccagcggctgccgccgacatcgaccgggttaccggccacctgaaattgctgtaagatccgcacttcggaaactctcacaggccattggcattactaattcactcaagtgcaacccgacaattcacaaagcaatacggcgcaccggtggagcggttgaaagattaaggccaccgggtggaggacgactgtgacatgcaagctaagctaagatttacgttattacattaactgtgaaccgagctattaaacattaaacgattgacagtccggcctggaactgcaaagctccgaagcgtttttgtaggggttcaagtggtaaaatcctagctcaagtaattaagtccctgtagagtatttcctttttccaaaactattgtgttttggtaaatcctttactaacatatatttgaaaaatgaaatgtgtctactcattaagattatatctagcttcccacagtatttggtctatttcttttcagaaaatatcagggtcttttgaaaagtaatggtgacacttgtttgtttctaggcattatttaaagttatgaaaattatattttaaaaacatattttgaattagatttcataaattgtaaagtgtataattaaaaacatattggcatgaaaaggaaatattttttcagagaacatattgtagtatttcaaaatccgttaaaacaatgcattgtaaaaagtgtataaaattgtttcacagcgaagctcaatcctattattaaatcgacgttttattttctaacaactaacaattattccctatcactaaaaagtccaggcataatcattgtctccctgcggcgtctgttgctgctgcagttgctctgattgcattggtggcatcacttggtgctgcaactgctccatttcctgcacttgttggaagtccagttgcggtggttgctggtagtcgagagtcgtgggctcgttggacgaatccaccatgtatatctgcgactgcgatgctgcctgtcccatctgctggtgctgcaaggcgtaatccccgtcgtcgaagacctcctttttgatacgcactcgagaaccatcgtcttcctcgtcactctccgaaatatccagatcatcatcgatgcccattccgttgttcatggtattgacaggcatttccggcgccatttgcatggccattgaagcgtccattcctaagtctgcaccggaagcggcacttgtgctggcttcggcgggattgtaaggcccattatcatcctgctcgtgcgataggaagttggtgaaagcaccctgcaagct

SEQ ID NO: 788 - DNA, 867 bp, DROSOPHILA
tgaccgcaagcgaaaacgtgaagtgagcgccatcggtggtgttttctcgcgaaatataatatcaactaagcggagaaagatgggcgacaagttgctggatccgacgcagatcatcaatgggctggctgtgatgctgtcctttttcgtgggctaccgatacgccctgaagcgaggcgatgccaaggactccgtcaccgagggagcggcgaccccgttctcgcaggaatcttcggtgtctagcggttccgaggcttcagtttcggataagggctatggaggcttgaacgacaactttaagatggtcctggtggtgcgcaacgatctcaagatgggcaagggcaaaattgccgcccagtgtggccacggagcggtgggtgcttaccagcgggcggtggtcaggacgcctcgactactgcggtcgtgggagaactgcggttgcgccaagatagccgttcgcgtggagagcgaggcggagctgatggccatcaagaaggaggccgagagacagcaactgaacacgtgtctcatccgcgacgccggtcgcacacaaatagaggccaactccaagactgtgctggccgtgggtccagcggctgccgccgacatcgaccgggttaccggccacctgaaattgctgtaagatccgcacttcggaaactctcacaggccattggcattactaattcactcaagtgcaacccgacaattcacaaagcaatacggcgcaccggtggagcggttgaaagattaaggccaccgggtggaggacgactgtgacatgcaagctaagctaagatttacgttattacattaactgtgaaccgagctattaaacattaaacgattgacagtccggcctggaactgc

SEQ ID NO: 789 - protein, 186 aa, DROSOPHILA
MGDKLLDPTQIINGLAVMLSFFVGYRYALKRGDAKDSVTEGAATPFSQESSVSSGSEASVSDKGYGGLNDNFKMVLVVRNDLKMGKGKIAAQCGHGAVGAYQRAVVRTPRLLRSWENCGCAKIAVRVESEAELMAIKKEAERQQLNTCLIRDAGRTQIEANSKTVLAVGPAAAADIDRVTGHLKLL

SEQ ID NO: 790 - DNA, 2642 bp, DROSOPHILA
gagttccaggcccggcgccttcaagcgagtggagctgcattccggcaaagtctaagtaatcccacctccgagggcgctctgctcaccaaacaggagaactttattgaaaaccatcggcagtacgacaggcgggacgtcccgagaaacagcaagccaagtgagtaaacagggagttttttatcatttgcttaaatataaacaaataaccttttgttaacatagataatccaaacaaagatgccagtcatcggaaccgaactcataatcgcaaggttaatccgatactttaaaatggatggacacagcgtgcgaaagaagccctcatttgcaagctgtgaagaaaggtaaaattttgtccttctatagaattttccatttaaataatccaccttagcccctctacaaccagcgtagattcatgaaagaccattcaatttgaggaatatcccaagacagtggagattgatgacgtcactaaggaaagaccaagcaggaggccagcagagctaccgatcgaaagcgattcgaaagttcccatacgtaggaatacacctgttgaaaacccacaaatcgaaagcgtggaatccagccgtgagcatgtgaataatccagaggagtatccctatgttgtggagatacccgagcaggaagaaaaaaaaccgcagaagggtagccaatctgcgaaatccaaaatcaaataaagcgaagaaatggagaaaagaactgctctctttttctatgttatccaaattattaatttttgtaagatattaaaattcaaaataaaaacgtaacgttttatgggcagcacttgccaccacagcgcatacagcctaccatcatcagctgttttggtatttttctaccgatttgaaggaggttggcagcacctttcgaatgtttttgttttgcatcggaaattgaagtaatttgcattccataacttcgccagaaataactccctttcaaggctaatgccattccaaatagccttagcaagatgaccatctttaacctgtacatattcgacaagttcggaacactgctccactacgcagaatggaatcgcaccaagaaatcgggcatcacacgcgaggaagtaagatcataattcagaaaagtaacttgtttcaccaaatatgtttgtttttaggaagccaaactcacctacggaatgctcttctccataaagtccttcgtcagtaagatatcgccacacgatcccaaggagggcttcctttactacaagaccaatcgctacgccctgcattatctggaaactccctctggattaaagtgagttaatgataatattcagaaaacccaatttaagtaaaaacaagctcatcatcaattatgagcaaaatgaaaataagatactaaagctgtatcttgcaagcccactctacgctgaatacttatagctcttgaactctgcattcccaggttcgttctcaacacggacacgacggccatcaatgtgaaggagctgctacagcagttgtacgccaaggtgtgggtagagttcgtcgtgcgagatccactgtggacacccggcacggtggtcacctcggagctgttccagtccaagctcgatgagttcgtcaggcagtcacccatcttcggcattcgcaatatataaacaaataaatagcttaagctcaaactactattaggtatgctaggtatgcaaatcccgccttcgaaactctaaggtctatgtcattagctccgaatggcaaattgcgctggcaagtgctccgaaatgcagcgcgcgagatccgggctccggaaatggcatgcacttaaaatgtctgcggggccagcgagaaaaacaggccccatggttgcgcaagtcgtccactgtctactgtccaatggccactgctaacaaagggggacaaatgtcaaagcggttgccgcaactcgaaggttttagtcaactccacaagctgagaaaattactgactgactgtctgctgcaggcgagcagggactacacggataaaaatgatatgattaatactaattgcactaggagtccactgtcatcgaattgcacttgaaaagcaaatcacattgcctgagaaataatattattaacacatatgtataaagctgttaaaactttactgattataattttatggcttattttgcatactgaacctaatatttgtgcaagacgaaagtgacttgaagtcatataacaactatatttttacccgtgtacctgcaatttttgacagacagctaagctcgtcaagggttttcgcaactattcgctgttgccgcggaaaatgaaaatgatttgcagaatgcatccataatcgggggagtcgctttggctctggtcggcggatctccatgaacggcagcatgaacgggcagatatacaaatgtggctgtggcgatactctttcctatgtgcccgatgtctcacttattcaaaacattttgtgcaagtcacaagacgtttgaactaaatatgttttgtatgttttagcgctcgcgtgttttgttgctcgtattgtctttgacgaattttaaaacaggtttcaacattgcaaaagccgctggcgggacaataaaaatggaaccacaaagcggtttcttttctccgctatcgaagaaatcaattt

SEQ ID NO: 791 - DNA, 438 bp, DROSOPHILA
atgaccatctttaacctgtacatattcgacaagttcggaacactgctccactacgcagaatggaatcgcaccaagaaatcgggcatcacacgcgaggaagaagccaaactcacctacggaatgctcttctccataaagtccttcgtcagtaagatatcgccacacgatcccaaggagggcttcctttactacaagaccaatcgctacgccctgcattatctggaaactccctctggattaaagttcgttctcaacacggacacgacggccatcaatgtgaaggagctgctacagcagttgtacgccaaggtgtgggtagagttcgtcgtgcgagatccactgtggacacccggcacggtggtcacctcggagctgttccagtccaagctcgatgagttcgtcaggcagtcacccatcttcggcattcgcaatatataa

SEQ ID NO: 792 - protein, 145 aa, DROSOPHILA
MTIFNLYIFDKFGTLLHYAEWNRTKKSGITREEEAKLTYGMLFSIKSFVSKISPHDPKEGFLYYKTNRYALHYLETPSGLKFVLNTDTTAINVKELLQQLYAKVWVEFVVRDPLWTPGTVVTSELFQSKLDEFVRQSPIFGIRNI

SEQ ID NO: 793 - DNA, 14684 bp, DROSOPHILA
ttggagaactggacaactggagtgtggggcccaaagacccagacttggcttttatactgtagtaattccagcaactagattactaatatttatgatccacaaactatctggggtagttcctgatgtagaccccgttatcgtgacgccttgtggaagctcttcaaataaaaggtgtcaatgaaacccccaatatcaattcaacaatattcattccatcaaataaactaaatatattttacccattataggcaaagagctacatatgtatatctactttagaaatttaacaccatggaaaataatttcgtgttcttgttatacaatatatgtttagagaaaggtagtaaataagagacactagatttcgctgatatttttctttgaataattaatagttttattatttagctcgtgtatactaataatgcatggcttatacaccaattttatataaaacatatcaggaattctgtttatggtaaatatagatgcctacgcaatttttatttacgtcacctctaaaataattacatttactatcagttaagagggtattcacaaattttgtattgcaatttgtattaatcacttgcagattataaaagataacacaattctaagaattcgtgcaggaagcacttttggagtatggacactcataaattaacgcatacttaaactggcggaagccacaagaactaaatgcagtggatttgaacaactaatttttttgagtgcactgccaggacctcgtttaacacatctgttaacatctgtttctacatagagtgatggtgtctcttaactgcatcgcacttaacatcgccaataggatggtgtacttgcttaggtgggttgcgtgtattcgctagaagagtgccttcggttgctatcgatagccaatagctcttcgaatatcatcgataagtatcgccctcagtacatcgatgcccgatgcttttttacatcactagtcactttgttaatcaaaatattagaaaaaactccatttccgcctcgaaagtgcatttcgggatcgcgcagaagtgttattaagtgcgcgactcgttcgttgatcttaaaagcgctagtaggcgatgaaaatcaagtggaaaacgatcgttttttcttcttaaacttttacttacggcagacacgcacacgcacgcagctcaccgacgcactcgcacacacacaaccactcgcacgcggagagaagagcagcaagcggaggaagaagaagcagatcatcaaacttaaaatttgcgaggtgaaaataacgagaggcgaaggttttcccagcaccgaagatcataaatcgcgagtgcgttttcattacctcccattttttggtggccatgccggatttccaccaccccccgcccctgctgaaatcggtgctgccaacttgctggccactaaacaaattttttttttgtgaatgggatatggatgctgttgcgcgcaattttccccacattttccacaaaatgtatttaacgcccactttcgagtgctaaatttagtcggccaagcggaaggacgaagccgcgtccttgataaatcgatgtgtcaaaaggaaatgcaaaaaagcgcgggacacagaggaaatagcggtgaaaagcgtgggcgggcagctgccgcgaggtcttccgccccgcccccatttgtgtttgcgcttttttccatgtccttgcagtcggcttacagttattgttctgtggcacaagtgcaaaactcaacagggggaagccccgcaaatgtaccctgtacatatgtatgagcatgtatatgtatattaattatgaagcgccagctgattccagttcggaattcacatgtttttgccggtttatatatatgtagttagtaccttatatttggagtccttcagtctcaacagttcaggttaaaacaggttaaaataacacaagttatagtaaaagtattcaaatcaatagataatacttattttggattttctaccagcatcctactgacggtcaagatgcgtttacgactcatacaggtcgagaattagaaagagtatagcaaataattatttcatgttcagctgaaatcaaactgccatgagtcaacttaacttccgtagaaatttctatgaaatgaaatggttttacaaaagccgagacttgcacatccgtttgtgtcagaaaaatccagataccatttacaggaatattcagacacagtattcagtttattatttgtgtgtggaaaactataaactatctattttggcatgacctttgcttagtcatccgctggtgaaagttcaagttcaaggtcttgctggttgatattgattggcagtcgtttaatggttgcatacccttgtgtcctcgatccgtagattccttggcaccggctagccgtaagaggaggagaaattgcacccgcccggcacacagcacacagcatgttcagtgaacatgggcggattcctggataagccgaaaaccgccaagcacaatgacgagggtgagggcaacaagctgctcttcggggtcagctcgatgcagggatggcggtcggagatggaggacgcctactacgctcgtgccgggctgggggatgccctgccggactggagcttctttgccgtgttcgacgggcatgccggatgcaaggtgtcggagcactgtgccaagcaccttctggagagcattattagcaccgaggaattcattggaggcgaccacgtgaagggcattcgcaccggcttcctgcgcatcgacgaggttatgcgggaactgccggaattcacccgggagtcggagaaatgcggcggaactaccgccgtgtgcgcctttgtcggcctcacgcaagtgtacatcgccaattgtggtgattcgagggccgtcttgtgccgccagggtgttccggtgttcgccacgcaggatcacaaacccattctgccggaggagaaagagcgcatctataatgcgggtggcagtgttatgataaagcgcgtaaatggtaccctggcagtgtcgagagcccttggggattacgactttaagaacgtcaaggagaagggacagtgcgagcagttggtatcgccggaaccggagatattctgtcagagccgccaggatagcgatgagttcctggtgctcgcttgcgatggaatctgggatgtgatgtccaacgaggacgtgtgcagcttcatccactcgcgaatgcgggtgaccagtaacctagtgagcatcgccaaccaggtcgtggacacctgcctgcacaaggtgagtcttgattaccatgcatatcgtcaaagttttcacatgctgttcatttcttgactacagggtagccgcgacaacatgagcatcatcatcattgccttccccggagctccgaagcccaccgaggaggcgatagaggctgaacatcgtctggaaaagcaaatcgagaagatcacaagaggttgtcttagtcgtctactctgtttataactaatcgtaaactgttgacccatggcgtagtggtctcctccgtcttcgcgtctcttttgaaccgaaatacgtatattttgtaccttgagcgtcacgagtactttatatgggctcctcgatggcctacagtcccgacccaaagtgcttctagagctgtatatgccccactttgtccaaaactagaatcttacaaaacaattcctttccgaagtagttccaaaacgaaaaacaataccaaaacgaaaaccaaaccattgccattactaatgccaagaatgaactcctcgcacacccacctcaagtacagtgaaagctctattggatggataataataggcactgataatctatatgtgtatttctaatacttatttgaaacctttcgaatttacaaattcatatcaacagcaaaaaggctgaagtccgtttttttttttttacaagagtgctatataaatgttgtatactctacataatgtggctcatttatgctcatattcttagtgcttagacatcacgtacatttagttatatattcccttagagagctttcaccgatatttgcctgtataaatatgtaaatggggtgtgtgtgggcgttcgaccaatatcctatcactaatgcatagcaaatacctgtatagcgtgttagtttgtcatatctggtggctgtgcgtgtggctgaccagtgttcgtctgccccgtgtgtgagcctgagttatagtattatttatacatgcctgtgtgcactacagccactgccaaaagcgttccatgtatgcgaaatccagcccatttagctttagtcgtacatatacacctaaataataacaattatcgacgaacctgcccgagctaagtagttaaatgacccgtcaaccaatttgtatatacatttacttgcatatacgtataccccatttgatactaggcgcgatgtgaatcaatcaaacgaaattgcaatacttaacgtacgcaggtattgacactcaaaacaaacacttggaattgatgtatctaagtaggagtagcgaattaaatcttaatttctaagcaaaatcaaataggagagtataatgtcttcagagaagattagttgtagatagaaatgtaaataagctgaatagctgacaaaaactttgagaagcaatgaaaacatatattttattaactagcaaccgctcagatgaactgtagtcgtattacttgaattacgtatttaaagcaatgaataacccttggtggtgtttatccgagacttcagtattcgaggcaccaaagtgaaactcggccaaaaacccgcaggccgaccttgttgatatagacaattactttagaccgaattcgtacgatttacaattagccagttagtgaatagacttagagcatgcattgcccaccactggtcacagtagctaacccatttagaaattatttaggctaagcaataaaccaatgtccagtgtccagacgaattacttagcctagagtagagtagccaaaggagttgaaatgttatagaatgtatacgtaggttaacgaaaccgaattgtaaaccttatgctcaccaactgttgtgcttgttgttaaccgaaggcaaacgattactccacccaaatcgatcagacatattccattcaatctaagcaacttccccgaaatatttgtacttgggtgccctggtaaattggtgatccagttaaaagtgtaaaacacacacatcccacacagccgaacatacacgacttttagagattaatgaactaccattgatgatagtcaaaaatataacttaacgaaagatttaaaaacctaagccaaagtgtttgtctgctgttctattggaatcatttcggctttcatttgcttatttccattttctctattcacacttttgtttctttgctttatttttattatgttcatttcgaaagctaaacattccttagctccacctgatttcgtgagagcaggtttcaactaatgcctaacgtttatctaaagtaatttggcaaaaggaaaattttagccattcgctgttgttgttttccggttgttgatcgcgcctcgtactacaattcccaatttccaatacactattgccaccaaatcagagcgcgaattagccgaatgggccaattgtcaatgcaagaacaagaaacagaaagcaattcaaatttaagatgagtgagcataaggtacgtctatacttttgtagtttgtaacttttcgaagccactttgtcattacgttatcgtttatcttatcggttaaatggtttgattttgttttgcctacacccacccagacccgcctccaataatttcttatctgtgtgttaattgtaaaaagtgatccacacaatccagcagataatcgagaatgcatgtatcccatagccacaatggaaaattgaattgaacaaaaaccgttctatgcaatccttttgctaagaaatcctgtatttgaagttttcagtttgctatgatcagatcaattggattgtcttaaatgtacctaaggcttttttgcattttatttcacaaaaaaattttgctgataccatcaatgcgagattgccaagacttcaaaacatgttaatgactgcgcttttctatagcaatcaagtaaattcccttgtttccaatcgcttgagaggccaacacatacccgttttttgatattttgtatgacagcattcgtatctatatattgcatttacttaaagtagcttaactgtgtaattcatatttctttatggaccatttatgtacataaatatttatttataaacgccattcgagctaacgcagtgtttgctaaaccgcacattactaatgatcgacttctctctgattttgttgcagacgagatagagtctagcaagataaccgactacgtggatctgctgaagtgtctgcagaacagagacgacatcgaaggtcttccacccggaggaggtctacagtccaagtgagtgtttcatgcccgtaaatagcgtccggcgattgctaatcagtggtgtttttttgtttacctttgcagatatcacgttatcgagcgcacattcaagcaagagtttccggatcgaccatgtgaagtacgaaatctgttctataatctgtaactcagttcgctgcgctttcgccaatgctaacacatatattttatcgcttgcatagcaccgtttttggccattatagccgtagcctttgaaattgccttgtttttttctgattcaatcagtagatcgacaccagaggatttggtaatgatagagctatcacagcagttcattcgatcgtcaccattcaccattgttccatgtttagttgggttcccctctcggcccttaatcgtaacctctaatcatggctgcctattctctttctttttttctagctgtatgcatatgatgatatatgaattttgtaatgctaattgttcatttttaaaccaaccaaccaaccaaccaacaaccaaccagcaagagaacaaagataactaaacaccctatgcttcacatactctaaatgtaagcagataattcattatgttgctcgtctagccccaacatcatcatcatcgacccccttccattctgtttcgctatgttttgtttcctttgttgcaagacttggaaggaccgcatgtctgtcactgcatgtctcatccatatcaacccactttcgtttccgcttccgccgcaagtgtgcatcctgcctgaaaatgtcctaacccatcggctgcccatcacggtcaataatccagatatttgttattcttgcagagtccaacgcattaggttgcagtcgaaacacgaaacagaaccagttaaacaaatgcagaaaccagatcagatcagaaccgaacagaacagaaagcagagccacacaacttgaacgaagcaaaaacatacaagaacacacaccaaacagttttctactttgataaacacaaaagaaaaacctactaataatgataataataagagtaacgatacatttatagtttgtacgaagcagtcctaaacacaacaatacgaacagccacgcccacacaactttaagatataggagagatctagaacagagcgtacctgagcagacctcagagactcggaatcggacgaaatcaaaggatggctaaaagccagcaccaggaccacaccgaacagattactccgatcggatccctctgaaggacccatccatctatgtgaacgttgtaaaccctctgtgtgtcctttcgttccgtcacttctcctcatcaatcagctatcagcagtaggaaaagcgccaggaaaaactaatggaaaatgtggtatcaaatgttattgagaacggaggacagttaagaaaccgcgagagtctcgctcaaattttttgtgtaaaagaactttatattttcattaaaacaaaaaccatgtattaactattgattccgaaccgaaagcggacctttgtaagttgtaaaacgtttgttatctaaaacaccttttgttcaccttctttatatgtgtacgagaagatgtgtcgccaagccagaagcagcgaaacttaataatgtaaagtaaaaaaatgttaaaagaaaaccagaaaaaaaaatggtaaaaggaaaccaaactagcaaacaaaacctgtaactatctatgtacggaaacgaaaaagtaatacctaaaccttaagtaagagaagcaaaacaaaagaaatccacaataatgtccgatcttaaagaaacgagaatgaaaactaagaactattaatttataagaaacgagttgatgaagaaaatcttaagagagaaaagcaaaattacgctcgagtttgtagtaaatgttgataaaaaaaaaacacacacacactccgaagcttttaatcagtcaatggaaccatcgttcagctgcacagtgtaccagtcgtatcatctccagaaccgacagctgttatccttggaggcggtcaggatggcgtctcctgcgtagctgtaggcgcagctgaacacctcaccctcatgaccagccagcacttgggagcactgtccggattccgtgagccacaggcgagccgtgttgtccgctgaagctgtgagcagcatgcagccactgggactgaagcacaccttggacacctcatccgagtgtcctgccattagggagagcatctccaactccgaggatccttctagcctccagaccctggccgtgcagtcgctgctgcaggtggccaaaagttggccggctgcatcgaagctgacatcgagcacctcatcactgtgcctggcagccagataaagttcctggtccagctttcgagtgtcccagatccgcgcggtgttgtccagggagccagtagcaatcagagatccgctaaaattccaaacgcagttggataactcagcgctatggcctcgcaactgatgccctagactgcaaggggaacttcgaatagtgatctttcagaactcagatctcaacccacctcttgctcctcacatcccaaatagctgctgaatgatcgaatgagccggtgagcagcatctgaccatcgcgattaaagcgggcggcaatcacttcggctccgtgatgggtcagttgctgaagctcatgagacgtttccacgtcgtagatcctggctgatccgtccagggaagcagtggcaatggatttcccatccaccggatgaaactcagcggccaccagttctgcggtgtgtccatagaaggtgcacagagattggccactggtggcggaccaaacttttgcggtgccatcaaaggatccggtcactatcttgtcgctgaaaataattgaaaaagttgtcaggttatttccagatccaccgctttgtagataaactaaccaatggggaaaattaaatccaaccgaaaagacgacattgtcgtggccactgaggatgtgctccacctgagccgtctgggtgttgatcacatggcaggtgcgatcatagctgccggtgaggcagcgttcgccactccgatcgaaggatacgttggtcagaggcaggatgtgagagttgtggcacttgtgcagatagaacttcttcttcacaggctctcggagtttcttctgcagcttttccagagcctgtttcagagcactaaaggcgttctgtgacctggcgacacttccgctgacagggcgaggtggaggtgacttctccaaatccgcaggtgattgctcctcctccgcttcggctaaggtttgcaataggatcctgtctgccagtggctcaatgttggttctgtacaaaagaagtacttgcataaactgtatccttgcaggatttacttactttgaatctaggtcaagtagatcgaagtgacgcagccgttcattgcccttcgtggttttatagttaactgccagtcctggaaaaagccaagatagtcaatagctacttagcacttggtttaatgatccttcccacctggcggatagtagcgcaggaagatcttggtggcactcattctgaggttgttgtgacttgcaactcaagaattccaacacggcgcattccgctgcatgtcagtttgctgacctgctttaattgagccattgttgattggactggctgccatgccaaaaggtattgtttgatcgattcaccttggcttccttgtgctaggtctgtgtcgaggactcatcgggcggttcaaggatgtagggtaatgtattcggattctatgcaagaatgtgactctatactccctcttgtttgcgttggttcccatttaaaacgaagcttttctaacaaaagcttatcctagccggttttcctactcagccattcatagaaccccattttgtatgtaaagtttttcttacttacttgttgtaaattatattttaaaaaagaaaatctgtttgcttgatagcttgatctttaaatgtataagattctgcctaatcctaataagcaccctacaaaatgcattagtcacgcattttaatactcagtaattgcattattgatttctgttcgaaattctcgtctttcttggtcaagtcgattttaatgacgaaaagcacatgactaattaactttgccagacagcaactactgtgtgaaccctaactaacccttgacctccgattgtccttcggggaacccctttggcatttgacaggagcgaccggctaaatggtctctggccattaaacctaattagcttgttcaagatgggaaacggaagccaaggaccccagaggccaattggctgccgacacctggtcgcatttttagcagatttaccatatgtcccacgtgggcagacacgcacccatccgcaaatccccggccaccatgcaattagattgcttcacctggctcgtttcggcattttcactaatttaatttgttcagtaatcggtgcctcgggttcgagaaaggcagtgaacgggattgtgtgacgaccacaggacgacagtcccatagaatcgagtcggacacccaaggaaccaggcgccttagccagcccacaaaaggccaagtggaggtactactggggatgtgggtgccacctctgcgtggcccaaaatgataagtaatgattagatattatcgcacccaatttcactgcacagtggcaggagaactgaaagcgaacaggcgccaagttaagtggacagggaaaagtgcgaggatatctaaggagcactgagaaaaaccaaaacccggttagtgaatcaaactaatatgccatcagatggtaaaatttgaaattcttaaggttttttctcagtatgttggaaaatcgcgcagaaaagttgtgtgggtcgaaaaaaaagcgataagacggccagagtctttgtcttggtcaataataaaacatttcattgaatgtccattgagtggcgagcatgggagcagtgacaacatgtcgaggattttaagatggaaatggaaatggagccggggcacctgagaggaggtctgccatcccctggaaataatcggatggggcaaaagcaacagctgtgatccgttccagaatattcatctcttcatttggaggcacagtgggtaattgggatgccacaggactcgtggcaagcggaagctttgaggaaatcagagacgagtaaatggcagtacgaatggaaataaaatcaatttaaaagcccataaaacgctttcataaacaaagcaacagtcgggggcaggcgaagagcagcggtcggatttgaatttatgctcaataaatttttgttgatttccggcaggcggcttcactcgcaatcactctgtgtgttgttagccatgaaaatgccggcttgcataaattatagacacacatacgatccttacctttgcccccaacaaaaggagcaaaaaccgattttattgccgcattttatgcccgtttgtttgacagtttgagagccgggttcatcgttaaccatttggaccaaatactgcttgagtggcacaaaaacttggcgataccacatttgctaagccgatagaccagtcgaattagaaggatgagcgatttataaacagattctcggtttgtgtttgactaagcgacattgaattcgatttttcctctcccttcggtttgtcctgcccgcggttgtttggtatttgtttttttttgacgtgtgtggccggttttcaggctttcagctaaaaggagtcgttaggggctctctaattggagagggagactgaatggctggctgggtggctggcaggacatcaaacggttggtaatcgaattgccgtgccatgcggcactaaaatcattttcacagatttcacagcgcagccatcgtcatctgagtggtagttaaatggtatagatttttatgcatatttgtttgctgtgctctcgcatccggttgatgtcctttgatcagcaaaacaaatggagaactcagccattttaattcgaaattgaaggaagaacgagagaaatccatggaataaaggagtactctaaagtaggatatttagacacctttttaactatcgaaacttcaagagagcgagttgccgagcaaataaacaacctacaaacctgagcctgtgcgaatccccatttatgacgtattctgcggacgggccactgaaaagtttacgactttgataaatgaaattttgcttggcctaaaacacaagtttgcctggccatccctaaggtttgaatatatcaaaatccgagttgcccggcagccaggcagtcgactaaagtttatggccaaattgtgtgcaggctggaaaccttaaaccgtttacttcccaattgaaatgcagacgcatcgaaatgttataaatttaataatggccctctctgcaggttcgccatccttcgtttgtttgtgtgggtatatgtgtgctcatgttttgaagttttattgtgggctttattaaacggcagcaggaagtttggcaggcactctgtgcggttaagcggccgcatcaagtatacgcaccataaatcagggtcagcaccggcagaagctcccttttcgggacaaaacagcgtattaaaggcattaagcgcgctcttaaatcgcctacatgaccgttcgtcataacggtaagtggtgcttaaaatgaattatgcattgccctccgcagatattatattaaatcatatgtaccggttaccctcgtccacgtggcccagcaaacgcgtgtgtgttttcaaagactgattgcaggccacattcgttggccgagattttgctgccattaactgctaccaacgccagtgggccggctaaaagatgaatggcatgttaatttgtgcgcattatagtggccatttatctccactgatttctgcggggcttcgcttttggcctcaactcaaactcgatgacattcagctacgaatgtcgcctacgatcgcctgcacttgacatcgaatgacaaagtaataaacaattaattatgcgaaaggccaaacgtgcaataagccatatcttagccctaggcattcaacaagttctcagttcgcatcacagagagaaaatttaggattgtgggacactcataaatgcttgctatttaccttaaaaaaagctatttgcaaaaaaaaataatactctttgtatctcataatcgatataactaattattactttgtttatctctcacttgcagggcaatggaatctcatattttattccattctagagcagcgaaatcaattgcccacattcgcatggcccaaaggtgagcacttttaattatacgattgtgttgccagtccccactattatgtattcaaaatgttatcgttgtaaattataaaatggaatccattaatgcagccagcacacatactagagtgtacatacatagtgtatagtgtgtgtgggtgcagccgcacagcggaatggtgggccatctatgcaaaattcatttgccccaaatagtatgcaatgggaaatgtgcgtgaaatttatgcaaacaaggaacattggccaaaatggttgttggttgtcgctcggctggctcataccgtgtgtgcaaatgacttttgaagccgcttatgtaagtcgcatccactcatgtatgctgcattttcatttggtaaagttttaatatggaagtataaggtaaaatcttgctaagaaatgcaataggttcaccactgacgatcttaatcaatttatgaatatatttacgaaatcattgacgcaatttatcaaaacagggcaagtggcgtaataaattcggataaattattatggctcaaagaaacgaagcacttttggcactcaaagtgcacaaatatgaatttaattaacatcaattggcaacatattttcaatttgcacctgtgccagcgacgagagtggaacataaccgaaaggaaatggtcgagttaattgcatattgcgtatacgccacgttgccgccacgagggccacaagtggcaaatgccaaacgtttttgttattccgtttgccagttgtttggcacgagtttgtgaattcattttttgtttgtttatttgcttgttcctgtgctttgtgcatttggttggtcgtgtttcgccatactgtgtgtgcttatgggtaaagttttctggtttctggctggcaaagttccttcattgccatggcatattgggatttttgtgagttccagcagggcggtggattcaatgaaatccgttcgaccgcaatgaccacaactttcgcccagcaatctcgatctgatgtgactt

SEQ ID NO: 794 - DNA, 1707 bp, DROSOPHILA
aaaactccatttccgcctcgaaagtgcatttcgggatcgcgcagaagtgttattaagtgcgcgactcgttcgttgatcttaaaagcgctagtaggcgatgaaaatcaagtggaaaacgatcgttttttcttcttaaacttttacttacggcagacacgcacacgcacgcagctcaccgacgcactcgcacacacacaaccactcgcacgcggagagaagagcagcaagcggaggaagaagaagcagatcatcaaacttaaaatttgcgaggtgaaaataacgagaggcgaaggttttcccagcaccgaagatcataaatcgcgaattccttggcaccggctagccgtaagaggaggagaaattgcacccgcccggcacacagcacacagcatgttcagtgaacatgggcggattcctggataagccgaaaaccgccaagcacaatgacgagggtgagggcaacaagctgctcttcggggtcagctcgatgcagggatggcggtcggagatggaggacgcctactacgctcgtgccgggctgggggatgccctgccggactggagcttctttgccgtgttcgacgggcatgccggatgcaaggtgtcggagcactgtgccaagcaccttctggagagcattattagcaccgaggaattcattggaggcgaccacgtgaagggcattcgcaccggcttcctgcgcatcgacgaggttatgcgggaactgccggaattcacccgggagtcggagaaatgcggcggaactaccgccgtgtgcgcctttgtcggcctcacgcaagtgtacatcgccaattgtggtgattcgagggccgtcttgtgccgccagggtgttccggtgttcgccacgcaggatcacaaacccattctgccggaggagaaagagcgcatctataatgcgggtggcagtgttatgataaagcgcgtaaatggtaccctggcagtgtcgagagcccttggggattacgactttaagaacgtcaaggagaagggacagtgcgagcagttggtatcgccggaaccggagatattctgtcagagccgccaggatagcgatgagttcctggtgctcgcttgcgatggaatctgggatgtgatgtccaacgaggacgtgtgcagcttcatccactcgcgaatgcgggtgaccagtaacctagtgagcatcgccaaccaggtcgtggacacctgcctgcacaagggtagccgcgacaacatgagcatcatcatcattgccttccccggagctccgaagcccaccgaggaggcgatagaggctgaacatcgtctggaaaagcaaatcgagaagatcacaagagacgagatagagtctagcaagataaccgactacgtggatctgctgaagtgtctgcagaacagagacgacatcgaaggtcttccacccggaggaggtctacagtccaaatatcacgttatcgagcgcacattcaagcaagagtttccggatcgaccatgtgaaagtccaacgcattaggttgcagtcgaaacacgaaacagaaccagttaaacaaatgcagaaaccagatcagatcagaaccgaacagaacagaaagcagagccacacaacttgaacgaagcaaaaacatacaagaacacacaggcaatggaatctcatattttattccattctagagcagcgaaatcaattgcccacattcgcatggcccaaag

SEQ ID NO: 795 - protein, 368 aa, DROSOPHILA
MGGFLDKPKTAKHNDEGEGNKLLFGVSSMQGWRSEMEDAYYARAGLGDALPDWSFFAVFDGHAGCKVSEHCAKHLLESIISTEEFIGGDHVKGIRTGFLRIDEVMRELPEFTRESEKCGGTTAVCAFVGLTQVYIANCGDSRAVLCRQGVPVFATQDHKPILPEEKERIYNAGGSVMIKRVNGTLAVSRALGDYDFKNVKEKGQCEQLVSPEPEIFCQSRQDSDEFLVLACDGIWDVMSNEDVCSFIHSRMRVTSNLVSIANQVVDTCLHKGSRDNMSIIIIAFPGAPKPTEEAIEAEHRLEKQIEKITRDEIESSKITDYVDLLKCLQNRDDIEGLPPGGGLQSKYHVIERTFKQEFPDRPCESPTH

SEQ ID NO: 796 - DNA, 4622 bp, DROSOPHILA
gcacacaagtctatacatacaaatgttgcttgttgcttctcttattttgtagttgtgggtatcccaatttgtgatcttaataaaattttatcaatacaaagattcgtattctgttcatgctaggctatatccttcgggccagcaaaagtatctgctgtttacctggcattgagaattcactgcgcccctttgatatggcaccgtacgatctgttgtcgaaattgtccattgcgctaatcatcgcggagctactgagctactacacacactctcgcgcacacgacacacactctagttgtacatttttcaccagcagttggctaatttttaaggcttttcattgaacaatcaaagacgaacggataataaacaaatcaacaccaaaaaaattctatcgccattttctttcagctctccactagggatgtgctgaattcagctatcggttgagtaaacaactgaaaaataacaagtgcatgctgacttaagctgggtgttacgcgagctctgtgtggccacttttaaaatatcctgatgccactgcatcttgtaaccaaacgtaagaactttttaatcagtagaactaaaaaaattagggctaattatttacttgcaacaatacattaaatatttttaggggtacactttttcagagattagagcagaccttatctatttcaagacaaatagcttgaaaagctgtaaaacaactttgttacatccattatggtgtgatttgcgggaatcggctattaccatttcgaaaattgtttgttacaagttaaaaacataaacttaaagttttggacgtacataaaaatataacattaaaacaaccttgttataaaaaaatacaataccaccaatacttactgtccattttaaatctgttaaaaaattcactgaacgaatacgtctttcgtcataactccatttaaaatatcgtcaggaaatttacacatcatttcgtttttttaacggcacaaacacctcggacttggtggcaacgctgccaacatatgtgtgcactggcatcgataatttttacatccctattttgaaccgcagaattctagaaaattccactcgctggccatagtaattgtccgaattagtttaagctaagactgccggatcaaaagtaaaccaacatcttccatcttttcataaaattgaagacagtttcatacaattctacagtaagaaagcgatggccaagtggggagaaggagatccgcgctggattgtggaggagcggcccgacgccaccaacgtgaacaactggcactggacggaaaagaacgccacgccatggtccaaggaccgcctgcatcagctttttcaggatttcaaaataggcgagtatataagaatttgtagtagtgtagaacatacattttaggtatatcctaacctaaaagtaaacttctcaaaacgcagggcaaagcgacattgagtgtgccgtggactccgtggacaaatgctccggggaggccaccgtgaacaatcgcaagggcaagctcatatttttctacgagtgggagctggtgctcaagtggtctggaaagctcctaaagaacagcaagctgatccacaagggcaagttaaccattcccaatctctccgaggagaacgaactagccgacgtagagatcacggtgacaatcgacgagtccaacgacgagtcggagaccctgaaacagttcatgtacaacgtgggacgagaccgcgtgcggcagcaactggcttcctacatccgagagttgaaggaggagtactccaagaaccttatcctaccaaagaagggcgacgaggccggagcgggaaatactgtggcgaattttaaggatgccaacaatacccgtaatgcagcccaaaatatcgctttaaactcctcggtggcggctcctaggctgaagaactctggcatcggctgtaaactggacgttcgcactctctcgatgaccgaagaatttcactgcagcgccaatgacctttacaacgctctcacaaagccagaaatggtcactgcctttacgagggcacctgccaaagtagatgccgtgcgcggtggagagtaagtttttgtccctggtcgttttattttaccatcacatcaggaccgtttgtgtcgtcatttagtaatcttgttatgaataaccataaatttcgcccctcgcccttgtcttcacttctttatggtaagtaatcttttgtcttttattgtagatttattctttacggaggcaatgtgctcggaaaattcgaagagctcgtccctgaaaaaaaaatacagcagagctggcgtctgaaaaactggacatctggtcactactcaaacgttgtcatagagctggaagaaactgtaagttactaggacaacgaaaactagatatattattatttatttttttaaattgacccgcttagtgatcctgattaacaatatacgatataattttcaaagaatgtagtactccttatcagtcaataaataacgcgtataagaccatattcctacgggcctctaaattcgaaatatttacaaaattttatgtgcacaaagaaaatagtaatatgaaaaaaaaataactttgtgatttgtctatttattatttattggttaagaaaaaaattaaattcgttacaatacgtcggatttaaacttatgaatgtaatgattttggtttagtacatttttgaaatttacattcaggttaaattcctattaatacctaattacattatatgatggaaaccagcaaatttggttaaaaacgatgtaaaagctcgaatctaatctaaaaataaattcctgaagtaagggttctgcgaaataggatgaaacggataaaaaactctgtatgcccgtagagaaatatggtctagtagattcgttgaagaatatttaacaggatgaagtgaacttttccgacgctatatgtattattgatcagtatcagtagccaaatctatctagccttgtctgtccttatgaattttgaaaaaagttttgaatttttttcgtgttattatttgccgttccaatttctatcgaacgtcaaatatatataattaggaaatgtactttatttacctcttactagtaaatttaatggacgatgttcgtttgtcagccgtcttttcggaggcaatgcagcatattcatctttacctatctcatttttaaaatatattattaatactcccagagtgacgaccacacaatttgtacttaatttatttctttatagtcggggaactctattatagcgttcttccttgtttaattttaagttttgcgatccttccttaagcttaattttcctgacttgactataaccaataaggatttttttgtatgcctgtttttttttttttaatttgtaagcgttactcgctatacattcggagaatgatgctttcagtgctatcccaaaataatatttacctcaaatataacgcttcctccttgcagtcatccagcacaatgatgtcgctcaagcagaccgggatacccgcgtccgaatttgatgcgatgaagacaaactggtaccgatattactggcatagcatcaaacagacctttggattcggtacctcaatatctgatgccttataagaggacgcttctagtgcggattgcactgaatgattgagggcttggtgtatggcggattatcgaaggattattatttgtattcaacctagagtactgcgagaatttcatttccaatcataactgtaatttctgtttatccttagaggctttttcaaatcctcttaggtatatcgatcgaactggaaagtccgcggctcgctaaaaaaacacattacttacaaaaaatcgaatacaattcaggcattcgacattgatttcacacattgagaaacaataaacaataatttaaaacaaaatgtttataattttgaattgaatattaataataaatttgttatattattaaggacataaaaagctttaaaagcctgaaatttaaaaagttatatttttatgatttccgattttcataccatttcttactccgaaggggaaagcatgggctaggtggcactgagtataaaaggaggaattttgctccacataatgaaacagttttccattccattttatcaggttcacttgccaagccgatttctttatgtttgtctgtctgtccgtatgaacgccgccaaaatctttaagtgagtgtttccgatcgtgaatgtattcgtaatcagtatcaacagccgaatcaatatagccatgtccattatagtcatatatatctggaatataattatagttcccaagatcccgacgatcatacgaacggacacaaaaaaagactaacggaaaaagccatagcatctctgtttatacctgttactcgttgagctaaagagtataattgattatttaaaaagtatgtatcaagaagaaggtatccgacaatatgaagtatatatatcaatatatgtatatgtgtgtaccagtatcaatagtcgttcgcaaatagtttaaaagcaatcggcttgtcgaatctaaattctttctcctaacatttacagtaggtgcgattataaacatttttttgttgtacttagtatttgtcttctat

SEQ ID NO: 797 - DNA, 1296 bp, DROSOPHILA
gtggcaacgctgccaacatatgtgtgcactggcatcgataatttttacatccctattttgaaccgcagaattctagaaaattccactcgctggccatagtaattgtccgaattagtttaagctaagactgccggatcaaaagtaaaccaacatcttccatcttttcataaaattgaagacagtttcatacaattctacagtaagaaagcgatggccaagtggggagaaggagatccgcgctggattgtggaggagcggcccgacgccaccaacgtgaacaactggcactggacggaaaagaacgccacgccatggtccaaggaccgcctgcatcagctttttcaggatttcaaaataggcgagtatataagaatttgtaggcaaagcgacattgagtgtgccgtggactccgtggacaaatgctccggggaggccaccgtgaacaatcgcaagggcaagctcatatttttctacgagtgggagctggtgctcaagtggtctggaaagctcctaaagaacagcaagctgatccacaagggcaagttaaccattcccaatctctccgaggagaacgaactagccgacgtagagatcacggtgacaatcgacgagtccaacgacgagtcggagaccctgaaacagttcatgtacaacgtgggacgagaccgcgtgcggcagcaactggcttcctacatccgagagttgaaggaggagtactccaagaaccttatcctaccaaagaagggcgacgaggccggagcgggaaatactgtggcgaattttaaggatgccaacaatacccgtaatgcagcccaaaatatcgctttaaactcctcggtggcggctcctaggctgaagaactctggcatcggctgtaaactggacgttcgcactctctcgatgaccgaagaatttcactgcagcgccaatgacctttacaacgctctcacaaagccagaaatggtcactgcctttacgagggcacctgccaaagtagatgccgtgcgcggtggagaatttattctttacggaggcaatgtgctcggaaaattcgaagagctcgtccctgaaaaaaaaatacagcagagctggcgtctgaaaaactggacatctggtcactactcaaacgttgtcatagagctggaagaaacttcatccagcacaatgatgtcgctcaagcagaccgggatacccgcgtccgaatttgatgcgatgaagacaaactggtaccgatattactggcatagcatcaaacagacctttggattcggtacctcaatatctgatgccttataa

SEQ ID NO: 798 - protein, 361 aa, DROSOPHILA
MAKWGEGDPRWIVEERPDATNVNNWHWTEKNATPWSKDRLHQLFQDFKIGEYIRICRQSDIECAVDSVDKCSGEATVNNRKGKLIFFYEWELVLKWSGKLLKNSKLIHKGKLTIPNLSEENELADVEITVTIDESNDESETLKQFMYNVGRDRVRQQLASYIRELKEEYSKNLILPKKGDEAGAGNTVANFKDANNTRNAAQNIALNSSVAAPRLKNSGIGCKLDVRTLSMTEEFHCSANDLYNALTKPEMVTAFTRAPAKVDAVRGGEFILYGGNVLGKFEELVPEKKIQQSWRLKNWTSGHYSNVVIELEETSSSTMMSLKQTGIPASEFDAMKTNWYRYYWHSIKQTFGFGTSISDAL

SEQ ID NO: 799 - DNA, 5176 bp, DROSOPHILA
aaatggtctgcaagcgaaatgcccggtgagcagcgaatctaagcggcggctcgcagccacatacctacaaacccgattccgacaaacagcttccgtgctacgcgcacacaaggttacgtgtgcagacgctgctgcctggcttcgtggggcgattctctcggcttcctgagacacactatgatttcttgggggcgacgagggcgctctagctgccgccaggtgctctgactgctcctccaaacattttaaacggccacaattcgattttcacacacttgttgcactcttcgggccagcgacatgtcaatgtttatgtgagtttcactgcactcgcgtttcgcttcgtgcccgggccagtcgattgggtcgtgtgctgtttctcactttttaagcgcctccgattgtttctctggcactgcttttattttggttttattacactttattatgtgggaaaaaacaaaaattaagtgcgcgtcgccatcttttagcgagtttcagctacctggtaaccctacttgcgcagcgttgccaaacggatcttggtatttggcgttagctatatacatagccaggctcgcaaccatagctctgtcgtcacaactcaattcacatatattttactttccgaaatgtattattttttaaaaataattattgcacgcttataactttagcaacaatgtttgctaaagtaattctaataacaatgactccggtagttttaattttctaatgcgtgataataattaagtgcttgagaattataagattgcagagaacttaacaaaaaatattttgtgagaagctaattacagataacaaatatttttcaatttatatgtgctaatttaacgggtaactttaaagtaattttaagaatgtttttatttttacatttttgacattaaataatagaaatgctattcgatagtcattgacacctgacagccctgaacaccgagcgtgctgccacatcgagataaaattatgccgttagcggcggttaagtcgttttgaaaatttcagtttatgtccttttgcctaccggtgcagacgatctaggagtaggaagttctcagttcatctccacgcggccacacacagtaaattcgcacacactgcaaaccgatcggcacattaaaacaagagcgcggccgacgtggcaacactcgcttgtttttcatttgacattgaaaggtgctcgcgaattccagaaaggacgttggaaaatcggcagccgctcagtcagtacctatcaaaagcaaacacggcgaagttgtggtgcggtgctctggagatttgccggagccagataataggaactacccgacgcctaagcagccggatccgctattataagtgaagtgtcgcgagcggtcgaagcagttcgcctgtgctctcttctccgtgtgctactaatttgcatcgagtgctaaatagtcctcccttgcccttctactccgcatccgcctgctgttcctgcttgggataactgaagtaagatggccggcccacttcctccgctcaaccaggaggcagcgttccagaagctgcaggagtactacgactccaagggcaaggacctgaacatcaaggacctgttcgtgaaggattccaagagattctcaaaatacaggtgggtttttgtgtcgatttcgcctcagagggtggaagttacgtatctagttcccgcatacatacactcattcgtgtatcccccatcggcaatcgtttattcatcgagttgcgctttgcccactttcactttcaccatcggctgtcgagtgtcgccgccactcgatttgtccttgcgtaaggtcacagcaacgacctccgaatcgtacttgctctgaggtcaaatgtttttcgtttgtttatcagcctgcgcctgcacacccagaacgatggcgagatactgctggactactcgaagaaccgtatcaatgacgaggtctgggatctgctcctcaccctggccaaggtgcgccgcgttaacgccgcgcgggacgccatgttctccggccagcacattaacatcacggagaaccgcgccgtcctccacacggccctgcgcaaccgcggcacggatcccgtcctggtggacgacaaggacgtgatgcccgatgtgcgcgccgaactggcccacatgaaggagttcaccaacatggtcatctccggcgtgtggcgcggctgcaccggcaaacagatcaccgacgtggtcaacatcggcatcggtggctccgatctgggcccgctgatggtcaccgaagcgctgaagccctacggcaagggccttcactcccactttgtgtcgaacatcgatggcactcatctggccgaggtcctcaagaaggtcaactacgagaccaccctcttcattgtcgcctcaaaaactttcaccacccaggagaccattacgaacgccacctccgccaagacctggctcctggagcattccaaggaggtaagtacagcgaaaggtcgaacattaaatgaccttcattgatagcgctttaagcaaagataaccaaactaatacaatgaaccatcaatggaccctagtgatttttcttatcattctataagaaccattttgacgtgttcaagctatcaaatcaatttaatgtgcttatcaaatgcagcctatggacttaatcaaaggctaaatcggatttcaaattcgaattaaatgtttccaatatgaaattccacttgccttaaatgtaaaatagataacgcagccaaagcaaatagttacatcacaacattttagtctggcctatatttgcaaactatttttgttttgttttagcctgagtccgtggccaagcattttgtggccctgtcgaccaacaaggaaaaggtcaccgaattcggcattgacagcaccaacatgttcggtttttgggattgggtgggcggtcgctactccctgtggtcggccattggactgtcaatctgtctgtccattggctttgagaactttgagcaactgctggatggagctcacttcatggacaaccatttcaagacgacaccattcgagaagaatgtaagactcaactgagagttaagtaaaatgattatagttaaccattttattggctttcctaggctcctgttatcctggcgttgctaggcgtttggtactccaacttcttcaaggcggaaacacatgccctccttccctacgatcagtacttgcaccggttcgccgcctacttccagcagggcgatatggagagcaacggcaagttcgtcagcaagtcgggcaaacccgtcaagtacagcactggtccgatcgtgtggggcgagcctggcaccaatggccagcacgccttctaccagctcatccaccagggcacccgcctgatcccctgcgatttcatcgctcccgcccagacacacaatcccattgccggcggcaagcaccacaagattctgctatcgaatttccttgcccagacggaggctttaatggccggaaagacggtcgacgaggccaggaccgagctgtccaaggctggcctgtgcggcaacgagctggataacttgttgccccacaaggtgttcgtcggcaaccggcccacaaactcgattgtggtgaagaaggtttcacctttcaccctaggcgcgttgattggtacgtctcactgtttcagctcacgagcacctattaatgtcaattgattttgcagcgctgtacgagcacaagatcttcgttcagggcatcatttgggacatcaactcgttcgaccaatggggtgtggagctgggcaagcagctggccaaggccatcgagccggagctggatcactgcaacgaggtctccacgcacgacagttccacgaacggtctaattaacttcatcaaagccaattggaagtaatcatgtctggctatttgttgcgaattaaaaagaaatgtttacacaaatgctctaattgttagtagtttctgagccgttattcagtagccgccgcttatgtatactcgagctacaagccccctgttattggcacattattcaactgtatttatgaactggatatgtttgtttgcttgcgtatcgatgaaatctcgtgtcggaattagaccaacaattggctctcactattcgttgttgcacgtagtttaaaaccgtaaataaaaatttatgaattcgatgtaaaagactgtgtttggaaaaaaatgctaatttattttctcgcggcgcaacaacaagggaattgcatttaagcttaaattacgggtagactgtctaatccatggatacgtcagagtctgtgtctgcgtcggcgttaccatcgtcggtcgccaggtcgtcgtcggccaccagctcgtcttccaatgggctcttcggactgcctggctgatcctcctccagatcgctccagttcgtttctgcttcgggatcgggctcatctgcaagcaagcgaattaagactcgagccttgtgcgaataaaaccacttgataacttacctggatcttcgtccaggatcagggctttgttatcgttgagatgattgtccgcgttgcgtttcatctggttaattatcaggttgactcgcccggttattctaaaaataaagaaggcattgaaaaggtgttataacaatattgccaatataacaataataggagtacacgcattactaaattttgtcgtggccagatttcgaaaatggatcttttgtgcaatgatggcgctagctgtatggactacttctccagcccccacaacaagaaacccccgagtccaggcagtggcgtgccagcattgggaccaggcggtgccctacccattgccataatacccagcatatccagcttagtcaaccagtgcaacaagccggcctgcgatgacgctgatatgcagtgcatcatcgacctgatcgaaggcacactctgcgaagcggtggccattattgagtcagacccgcgtggtctttttatctacaactttccgaaaaagcaaaagatgtcctccatcagcctgatctcttcagtgttcaccgacaccattgtggccaacggagaggatgatccctcgatcacgaatcattacacgggtggccttggcatttcggcggactccgtatccagtggcttggcgcgcaagatgctgaccatcggggactttgaatactccaatgccattgccgacatta

SEQ ID NO: 800 - DNA, 2466 bp, DROSOPHILA
cggcggttaagtcgttttgaaaatttcagtttatgtccttttgcctaccggtgcagacgatctaggagtaggaagttctcagttcatctccacgcggccacacacagtaaattcgcacacactgcaaaccgatcggcacattaaaacaagagcgcggccgacgtggcaacactcgcttgtttttcatttgacattgaaaggtgctcgcgaattccagaaaggacgttggaaaatcggcagccgctcagtcagtacctatcaaaagcaaacacggcgaagttgtggtgcggtgctctggagatttgccggagccagataataggaactacccgacgcctaagcagccggatccgctattataagtgaagtgtcgcgagcggtcgaagcagttcgcctgtgctctcttctccgtgtgctactaatttgcatcgagtgctaaatagtcctcccttgcccttctactccgcatccgcctgctgttcctgcttgggataactgaagtaagatggccggcccacttcctccgctcaaccaggaggcagcgttccagaagctgcaggagtactacgactccaagggcaaggacctgaacatcaaggacctgttcgtgaaggattccaagagattctcaaaatacagcctgcgcctgcacacccagaacgatggcgagatactgctggactactcgaagaaccgtatcaatgacgaggtctgggatctgctcctcaccctggccaaggtgcgccgcgttaacgccgcgcgggacgccatgttctccggccagcacattaacatcacggagaaccgcgccgtcctccacacggccctgcgcaaccgcggcacggatcccgtcctggtggacgacaaggacgtgatgcccgatgtgcgcgccgaactggcccacatgaaggagttcaccaacatggtcatctccggcgtgtggcgcggctgcaccggcaaacagatcaccgacgtggtcaacatcggcatcggtggctccgatctgggcccgctgatggtcaccgaagcgctgaagccctacggcaagggccttcactcccactttgtgtcgaacatcgatggcactcatctggccgaggtcctcaagaaggtcaactacgagaccaccctcttcattgtcgcctcaaaaactttcaccacccaggagaccattacgaacgccacctccgccaagacctggctcctggagcattccaaggagcctgagtccgtggccaagcattttgtggccctgtcgaccaacaaggaaaaggtcaccgaattcggcattgacagcaccaacatgttcggtttttgggattgggtgggcggtcgctactccctgtggtcggccattggactgtcaatctgtctgtccattggctttgagaactttgagcaactgctggatggagctcacttcatggacaaccatttcaagacgacaccattcgagaagaatgctcctgttatcctggcgttgctaggcgtttggtactccaacttcttcaaggcggaaacacatgccctccttccctacgatcagtacttgcaccggttcgccgcctacttccagcagggcgatatggagagcaacggcaagttcgtcagcaagtcgggcaaacccgtcaagtacagcactggtccgatcgtgtggggcgagcctggcaccaatggccagcacgccttctaccagctcatccaccagggcacccgcctgatcccctgcgatttcatcgctcccgcccagacacacaatcccattgccggcggcaagcaccacaagattctgctatcgaatttccttgcccagacggaggctttaatggccggaaagacggtcgacgaggccaggaccgagctgtccaaggctggcctgtgcggcaacgagctggataacttgttgccccacaaggtgttcgtcggcaaccggcccacaaactcgattgtggtgaagaaggtttcacctttcaccctaggcgcgttgattgcgctgtacgagcacaagatcttcgttcagggcatcatttgggacatcaactcgttcgaccaatggggtgtggagctgggcaagcagctggccaaggccatcgagccggagctggatcactgcaacgaggtctccacgcacgacagttccacgaacggtctaattaacttcatcaaagccaattggaagtaatcatgtctggctatttgttgcgaattaaaaagaaatgtttacacaaatgctctaattgttagtagtttctgagccgttattcagtagccgccgcttatgtatactcgagctacaagccccctgttattggcacattattcaactgtatttatgaactggatatgtttgtttgcttgcgtatcgatgaaatctcgtgtcggaattagaccaacaattggctctcactattcgttgttgcacgtagtttaaaaccgtaaataaaaatttatgaattcgatgtaaaa

SEQ ID NO: 801 - protein, 558 aa, DROSOPHILA
MAGPLPPLNQEAAFQKLQEYYDSKGKDLNIKDLFVKDSKRFSKYSLRLHTQNDGEILLDYSKNRINDEVWDLLLTLAKVRRVNAARDAMFSGQHINITENRAVLHTALRNRGTDPVLVDDKDVMPDVRAELAHMKEFTNMVISGVWRGCTGKQITDVVNIGIGGSDLGPLMVTEALKPYGKGLHSHFVSNIDGTHLAEVLKKVNYETTLFIVASKTFTTQETITNATSAKTWLLEHSKEPESVAKHFVALSTNKEKVTEFGIDSTNMFGFWDWVGGRYSLWSAIGLSICLSIGFENFEQLLDGAHFMDNHFKTTPFEKNAPVILALLGVWYSNFFKAETHALLPYDQYLHRFAAYFQQGDMESNGKFVSKSGKPVKYSTGPIVWGEPGTNGQHAFYQLIHQGTRLIPCDFIAPAQTHNPIAGGKHHKILLSNFLAQTEALMAGKTVDEARTELSKAGLCGNELDNLLPHKVFVGNRPTNSIVVKKVSPFTLGALIALYEHKIFVQGIIWDINSFDQWGVELGKQLAKAIEPELDHCNEVSTHDSSTNGLINFIKANWK

SEQ ID NO: 802 - DNA, 2267 bp, DROSOPHILA
atttattctgttgctccctgtaaataaaacaattttaaaaatttaaagaattctattcaaactttgttttttaaagagttggagaaaagcgaactcttgaatttatacacacattttaaatacacttaagaggcattatttatacaggatattacaaatcgcttcttttccgatttggaaaggccgagattatgtcttatctgttgaaatataattcgtttcacctataaaaggaccagtcttttagtttaaattatcagtcgcttgtcaaatactgaaacaattagattaatttgtggattttatttgtcctcatcctgaccacttattggccacaattggaagctggcttcgacgggacattagtaagcttagtcattttaaaagatttctttgcatctaactatgattctaaatcctcagaaggacgttggtctatacaccctaaatgctaccctgcaagttgctgaagtcgcttcgaaagcagccaatgtggcaatcactgccaggggataaacttaagttagggtattatttataagaaattaaattaatagattttattttatatattttttgtatattgttattcaaactgataatgtaatatacgcttttcaaacgatcattccaaatcagttgtgggcttatcgcaaatgatttcgtagtgtttttattttgattgattcaaagaaggggtttcctctctgattcttagtctcccgcattgacgaggtaaaaaatccctatgcatatgaaatatgcaaatttaaaaatcccccaatccgacaggttggttttgatcggtttggattcctctcgtgtacttttcagccataaaaatcccctttcgagccttatcaggcgctgaacttaagctgattcgcctataaaagctctcggcgttcctggtgcaatcaacagtcgatcactttccattgcaacagcaacatcagagctatagctactcttgcaaaatctaaagtcaaataaaaccaccatgaacttctacaacatcttcgttttcgtcgctctcattctggccatcaccattggacaatcggaagctggttggctaaagaaaattggcaagaaaatcgtaagtccattctatttgaaatttgttaaaccggaaactaactaactccttttcataggaacgtgttggtcagcacactcgcgacgccacaatccagggactgggaatcgctcaacaggccgccaatgttgcagccactgctcgaggttaaccacgatgactatctaataaatatttatacaaaatcttatttattttttttgatctaagtaaataaaacattgggaaaatcaatcttttgtcttctctctaaagatctattcagcgaatagttgtgaatgaaaagtgtattataaatcctatctatagttttaggagcgcacgtgcgaaaaatatatatacaactaataatccactaattaattttgttgtattgtatagattgaaattctaatgataatattttcgactgggaaaatccacaaaaatatgcgttatctccaaaagtagaagatagttcgcctataaaaagatctaagtctaagctgtgagcttcagtccaaaaaataacattagcaaacaaacatttgctgctttttccagtctgtaattatatattacttaatatgaactttagccatatttttttgtttgctttcatcatcctgacaattaacttgcaacactcgcatgccggttggctgacggatatagtaatctaagaccgatctaacttaacttccccttcacagaagaagaaatctgaggagacttttaaatacttaaaaaacgcagcattggaggtcattgacgtcggccaaaaagccgcggattttgctgccattgccaggggacagaaaaagtagatctctaccagatttttcttgatgagctacaattgctgcaaatatttaataaaatcaaaaagtataaaataataagaacctccaaaattctattttaatttaaccagtaaccagcttgtgcgattacatcttgataagcctacaggggaatatattttcaccatttcttattgttgtatatagtgtcttaatttgtttttattaatatctgcttgcttatattttaataatttgacattggcattgagtatctattttcattatgttaatcttcctaatgcattaataataaataagagaaatgagcgggtcgaggatcttcgagacttgatttcaacctcgagcggtggctgcaacattgg

SEQ ID NO: 803 - DNA, 209 bp, DROSOPHILA
atgaacttctacaacatcttcgttttcgtcgctctcattctggccatcaccattggacaatcggaagctggttggctaaagaaaattggcaagaaaatcgaacgtgttggtcagcacactcgcgacgccacaatccagggactgggaatcgctcaacaggccgccaatgttgcagccactgctcgaggttaaccacgatgactatctaa

SEQ ID NO: 804 - protein, 63 aa, DROSOPHILA
MNFYNIFVFVALILAITIGQSEAGWLKKIGKKIERVGQHTRDATIQGLGIAQQAANVAATARG

SEQ ID NO: 805 - DNA, 2261 bp, DROSOPHILA
atcactgtaatatcatttaagacttgtctgccgaatggctccctccaatttgagtagttgagccggcttttgcaaccagttgcggcatttactgacttacttacgcttccctggactcaccaactagatgcttcgaagtctgagaatgtgaatgaggacgagtcctggcggttatgacacaggactcgctggctccttttgtgtctccgtctctgccacttgtagctgtcactcagcggttaattcgagcgattttatttacatttcgcagaggccatggaaccggaaaggagcagcaaggaagcggagtcaaggcccaagatggataaagcgtttttacttgttaaggaaattagtggcatatcctgacagggcgcccatcttcctcgcagcttcgcatcctagatgctctattcctatatccttccgcattgtgtgtgtttttgtgtgtgtgttttgcctcccttgctgatttaattcatttgttgtctttgctgcgcgtctattgtctgcccctcgttgttggttttttatggctgaaattaaagttacattttcgtggtggttgatattatgtgccgatgtgcgcgaaagcctacatcctgggccatccccctctcaaaaatcaagtacagttgcgtgattgtgtcctctttgtaaatctaaattttatttgaaaatattgtttagaagaagttagctattgctttttgcacacatgagagctaagcgaagaacgctccatttttactagcagctgctcaaacagattaccgaagacagtcttcgtctaacaaagaaggggatccactgcagtctttctcttctcgctgcgaaaagttccccgtcgtcgccttatcggcatcgcattcttcgctataaaagccgcctgtgccagaagtccagtcatcagtcgctcagtttccacagcagctaaacagctaaatcgcaatctatatatatatatatatactaaggaattaaacctagaaaattcaccatgaacttctacaagatcttcgttttcgtcgccctcatcctggccatcagcattggacaatcggaagccggttggctgaagaaacttggcaagagaatcgtaagttcagcaacaaaatatattaaatacttgcaaatttactaatttgttttatatttacttgcaaaggagcgcattggccagcacacccgggatgcaaccattcaaggactgggaattgcgcaacaggccgccaatgtggcagccaccgccagaggatgagcctttaatgtccatcaaaggactctaccaggataacgcgcgtttaattatacacacttatttatttaccagccatagaaataaactagcttacatccccgtaatttacatgtgcatatgtgtccatgtttttgggttatccataaccatcactggcttgattacactttcccagggtggctgggcttttccggttttctcacagttttcccggcaattgccgggatcagggcacaagtgtaagggctcccttgggccatcaactcgtgccccgggtccacctcttgttggtggtcattttgggcacaaaacgcgtccaaatgtcaaaacacttgtgaactgcgaactgggaacctttttgtgggcggggtttgctttgggttgaaagttgaaatgggtgagagttgcccatggcccatgtgtgtgctccttgttgtgtttcgggttatgtattttgtgtgttcggctggtaatttgctttgatttacttacatgggagcggaggtcgcgccacgtgaccgcaaagtttacattaaattatcggagctccttgaggaaatgattcgcgggtttcgcgaaagcaaaacacagcgagtgggggtaatgaaattggaatattccatctagcaacacatgagtggttagaaaagtaattacaaataaatgcttaaacaaacccgcgttttagttaggctgacaatattatatgagaaaacgaatgaagtgcgacgtaattctttgaattttttccaaagttcgcttaaaaaaccgcaatcgaatcaattttaaaggcacttccgatgtcgttcgacctaattacacggcatctccatcggattaggccaactcgcctgggaaatcgacagcttgggatgccgaattcgacgcctccggctcaaaagcgctaaaagccagagcacatggtctgaattattgacagattagacctggattgtctgccagtcaatcattatcgtcctgctcggcgcctcgaaagcgc

SEQ ID NO: 806 - DNA, 192 bp, DROSOPHILA
atgaacttctacaagatcttcgttttcgtcgccctcatcctggccatcagcattggacaatcggaagccggttggctgaagaaacttggcaagagaatcgagcgcattggccagcacacccgggatgcaaccattcaaggactgggaattgcgcaacaggccgccaatgtggcagccaccgccagaggatga

SEQ ID NO: 807 - protein, 63 aa, DROSOPHILA
MNFYKIFVFVALILAISIGQSEAGWLKKLGKRIERIGQHTRDATIQGLGIAQQAANVAATARG

SEQ ID NO: 808 - DNA, 2253 bp, DROSOPHILA
catcagtgtaaaattcggaaaacccagcgatctagttatgaaatactttgtggtccttgtcgtcctggccctcattttggccatcagcgtgggtccttcggatgcagtatttattgatattcttgacaaagtggtttgtttcttctttaaacaattgtagtttacaatgaagcttaaacatttgtatttctacaggaaaacgcaatacacaatgctgctcaagtgggaattggctttgctaagccctttgaaaaattgatcaatccgaagtaattctgcactgcaatttaattaatgtatcgtttaacgaaaataaacacaaattttaaaatctgaaaaacaactaagttactaacgcaagacttttagttaagttagttaatatagaccgagatgtatgtacatacataccgctttcgcttacaataaaatgttaaataagttttcagattcgtacgtgctcagtaaacaattattttttattgtcatttaatgcctattgaatttttcaaacttaatttagtgcctttagtaaaatattgtagtgattcccctcgaaaaataccacaaattggatgcgtttatgtaaataaattgcccttgagtgatagagtaaatttgaatttgactgtcttagaaagatagaaagagatcaattcaaaatgccaaaaggatagagttattaaagctctaattcaaattggcccagaaccgtttaaaggatattacaatttgtaatttacatatttggattatagcattgaaatccccgattgttccctagatgtgcagatgtgtgcttggaatcagatcggttaccttcagtgtacttttctctgcaaaaatccccgtgcatgccttatctgtcattttgtttttcaagctggctgttcgcctataaaagctctcgccttttgtatcgcagtcatcagtcgctcagacctcactgcaatatcaatatctttagcttctcctaagaaaaaatcaagaaaatatcaccatgaacttctacaacatcttcgttttcgtcgctctcattctggccatcaccattggacaatcggaagctgggtggctgaagaaaattggcaagaaaatcgtaagttcttccatttgaaatctgttaagacggaaactaactgactaacttcttttcgaaggaacgcgttggtcagcacactcgggatgccacaatccagggactgggaatcgctcaacaagccgccaatgtcgccgcaactgcccgaggttgaccacgatgattatttataattatttatttaaagatctatttattctgttgctccctgtaaataaaacaattttaaaaatttaaagaattctattcaaactttgttttttaaagagttggagaaaagcgaactcttgaatttatacacacattttaaatacacttaagaggcattatttatacaggatattacaaatcgcttcttttccgatttggaaaggccgagattatgtcttatctgttgaaatataattcgtttcacctataaaaggaccagtcttttagtttaaattatcagtcgcttgtcaaatactgaaacaattagattaatttgtggattttatttgtcctcatcctgaccacttattggccacaattggaagctggcttcgacgggacattagtaagcttagtcattttaaaagatttctttgcatctaactatgattctaaatcctcagaaggacgttggtctatacaccctaaatgctaccctgcaagttgctgaagtcgcttcgaaagcagccaatgtggcaatcactgccaggggataaacttaagttagggtattatttataagaaattaaattaatagattttattttatatattttttgtatattgttattcaaactgataatgtaatatacgcttttcaaacgatcattccaaatcagttgtgggcttatcgcaaatgatttcgtagtgtttttattttgattgattcaaagaaggggtttcctctctgattcttagtctcccgcattgacgaggtaaaaaatccctatgcatatgaaatatgcaaatttaaaaatcccccaatccgacaggttggttttgatcggtttggattcctctcgtgtacttttcagccataaaaatcccctttcgagccttatcaggcgctgaacttaagctgattcgcctataaaagctctcggcgttcctggtgcaatcaacagtcgatcactttccattgcaacagcaacatcagagctata

SEQ ID NO: 809 - DNA, 192 bp, DROSOPHILA
atgaacttctacaacatcttcgttttcgtcgctctcattctggccatcaccattggacaatcggaagctgggtggctgaagaaaattggcaagaaaatcgaacgcgttggtcagcacactcgggatgccacaatccagggactgggaatcgctcaacaagccgccaatgtcgccgcaactgcccgaggttga

SEQ ID NO: 810 - protein, 63 aa, DROSOPHILA; identical to SEQ ID NO: 804

SEQ ID NO: 811 - DNA, 2236 bp, DROSOPHILA
ttatcgatgagacacgcgcgaacgttgtgcgatactatcgatacagttgcaggagcaattactcgtcgaaaatacgagggatggctaaatatataaaatttaacattataacataacatccattcaagaaaatttgattatatttctttgaagtgtttcagcgttttaatgttttgcgtgtaaaaatcgatagttctcagcaaagattgtgtataacgaatttatgagttagcatcgataagtttgtatgccactatgggtttatgtttggaaaaactttattataaaatttttttttaataagttaagttgttagcctataaaattaaaaaaattgttgtatgaacaatataaaatgtttctttgaaaatatatatcgataggttcgtttagggttatctaccatgcttcagcggcgagtatcaccacttatgttgcgattaaagccccacagggggcgcaattgttaccacatgtaacgttttttaaaaaaaagtaattacacagattttggattttggaatggatttccataaattaggaatttaatgagattattaacaacataataaaaaatattagttattgccttaaatatatgtgtagataatatttacgcagacatatttaatcttttcaacggacatttttaagttgataatattgataatataatatatgtaaattccagtgccatttgccgtatgagttttaacctacagaattgtagaacttaattactatagaacactattgaatgaaaacttagtaacttgttgaggtttttagtaattccaagaaatatgctcttgaataaaaaacctttttaagtctctttcaatgcaaaaacacgagttctttttttttacatattgtaattaatatgtttaaggtctaattattattgtaaacgtttttcggtgggttgattgcctataaagccacttgtttttcagtctaaatcatcagtgtaaaattcggaaaacccagcgatctagttatgaaatactttgtggtccttgtcgtcctggccctcattttggccatcagcgtgggtccttcggatgcagtatttattgatattcttgacaaagtggtttgtttcttctttaaacaattgtagtttacaatgaagcttaaacatttgtatttctacaggaaaacgcaatacacaatgctgctcaagtgggaattggctttgctaagccctttgaaaaattgatcaatccgaagtaattctgcactgcaatttaattaatgtatcgtttaacgaaaataaacacaaattttaaaatctgaaaaacaactaagttactaacgcaagacttttagttaagttagttaatatagaccgagatgtatgtacatacataccgctttcgcttacaataaaatgttaaataagttttcagattcgtacgtgctcagtaaacaattattttttattgtcatttaatgcctattgaatttttcaaacttaatttagtgcctttagtaaaatattgtagtgattcccctcgaaaaataccacaaattggatgcgtttatgtaaataaattgcccttgagtgatagagtaaatttgaatttgactgtcttagaaagatagaaagagatcaattcaaaatgccaaaaggatagagttattaaagctctaattcaaattggcccagaaccgtttaaaggatattacaatttgtaatttacatatttggattatagcattgaaatccccgattgttccctagatgtgcagatgtgtgcttggaatcagatcggttaccttcagtgtacttttctctgcaaaaatccccgtgcatgccttatctgtcattttgtttttcaagctggctgttcgcctataaaagctctcgccttttgtatcgcagtcatcagtcgctcagacctcactgcaatatcaatatctttagcttctcctaagaaaaaatcaagaaaatatcaccatgaacttctacaacatcttcgttttcgtcgctctcattctggccatcaccattggacaatcggaagctgggtggctgaagaaaattggcaagaaaatcgtaagttcttccatttgaaatctgttaagacggaaactaactgactaacttcttttcgaaggaacgcgttggtcagcacactcgggatgccacaatccagggactgggaatcgctcaacaagccgccaatgtcgccgcaactgcccgaggttgaccacgatgattatttataat

SEQ ID NO: 812 - DNA, 174 bp, DROSOPHILA
atgaaatactttgtggtccttgtcgtcctggccctcattttggccatcagcgtgggtccttcggatgcagtatttattgatattcttgacaaagtggaaaacgcaatacacaatgctgctcaagtgggaattggctttgctaagccctttgaaaaattgatcaatccgaagtaa

SEQ ID NO: 813 - protein, 57 aa, DROSOPHILA
MKYFVVLVVLALILAISVGPSDAVFIDILDKVENAIHNAAQVGIGFAKPFEKLINPK

SEQ ID NO: 814 - DNA, 3725 bp, DROSOPHILA
acgagtgcgatttaatgataacatgttgtgcgacaagctccaccgtcattatctgtcattttcggtaaattctcggaaaccattgatccgtattcgtggaacgtctttcgatgcggtacggccttgccgaggttgtcgagcgtgtagaaagcaatagtatgtgtatctgcaagcgtgcgttcatcataatatgtatcttgcaaattagcagagatggtctaaatatactaagcgaaaataactatattacattcccttacaacagaattgaaggcggtacatatttattttgggaaaagctataatggaagtattataagttgatttgatacaatatgtttcgttattatcagaattcttttcagccggttttactgtagttccattaacgacgaatgtataaagcaaatcagaaatggcacacaatcaaatcggtccaattggaattctaattatcgcaattacgataaaagcgcagcaaacattctgcttcgtgcgtcgataagcagactccaaacaaaggcagcaatcgagataaagaaaacatatgtgcgcaaaggtgttattctgtgagaaatctggcgaattctaattgtgtgtgggtgaatcaattgtgtaaacaaaagaagacaaaaagatacaagatacctaggaaatgctaattggacgatgcgctctctagtttgaaagtgcggtcaaggcgctcagctgtttggcgtttagcaacaccgtcggctactcttcagagtttccagagcatgcttatatacattatatttatattatatataaactaaaatcccgaacttttaaaatatatattaactcttgcattatcttaacaaaatttatacatttacaaataagttgacatgcagtttgttatattaccattttatactctctcttaccacacctggcaaccctgctgcgctctcgcgccgccgctctcgcgccgtcgctctcgctcgctccctctcactcgcacacacgtcatcagctgtggcccactaacaacaagcccgtcgtcaccagatgtattttcgtgttgttggtggtttggctgcattcgatttctcctcaactgcaggctgaaaaaaggcaaataaaaaaggaattcggtgccaaacattccgcgaccacgcaacaaattgcagccaagcagcacgtgccacttgctcccagaataaaaataaaccgggcgaggaaaggcgccgcatttgacattgaacaacattcgcggtgcgaaaataaatctaggaaataaaactaaaacccacacgaacaaacggcgatatcagctgttcggcaagtgcgtgcggcggtgaaaattcattattaactgtgccatcggcgaatagaggcgctttcccattgccctccgcattttccatattcccccgcggcggagagtcgatttttccgggcaacgataactggaaattgcgagcatattacgcatttaccctagtgttgtgtaatcgaagtcccgcggaaatgagcgctacgagtgtccaggaggcgcccaagaaggcggtggccaccaatgccatcaagttcctcttcggcggcctctccggaatgggagccaccatggtggtgcagccgctagacttggtaagatatactggataaactccctggcccaataacttaatctattggaatatgtgatcccaaatccgcaggtcaagacccgcatgcagatttctggagcgggcagtggcaagaaggagtaccgcagctcattgcactgcatccagaccatcgtgagcaaggaaggacctctggccctttaccagggcatcggagctgctctgctgagacaggcaacctacaccacgggaagattgggcatgtacacgtatctgaacgacctgttcagggagaagttccagaggagtcccggcatcacggacagcatggccatgggcacgatcgccggagcctgtggcgcctttattggcacgcccgcggaggtggccctggtgcgcatgacttccgacggcaggttgccggtggccgagcggaggaactacacgaatgtggccaacgccctggccaggatcaccagggaggagggacttacggctctgtggagaggcagtctgcccacagtgggtcgcgccatggtcgtgaacatgacccaactggccagctactcgcagttcaagacctacttccgccacggaccccttcagatggaggagggcatcaagctgcacttctgcgccagcatgctaagcggtctactgaccaccatcacctccatgccgctggacattgccaagacccgtatccagaacatgaagatggtcgatggcaagccggagtaccgcggcaccgccgacgtcctgctgcgcgtggcccgccaggagggagtctttgcgctgtggaagggattcacgccctactactgccgcctgggtccccacaccgtgctgaccttcattattctggagcagcttaaccagggctacaacaagtacgtcctgggctcgaacaagagcactggcctgtaaatgaccaatatcccatatccaacgattaacgaagaatgaaccatgcgtgtatatatacgacgttaagtttaaagaaaacttagggcatttatatgtcggcaattccggtgacaatattacatgataacgattagcttgaatgttgaaacagtttttctagcgccataagtataaagtggattctcaataaagcacaaaatgttaaaaaaaaaaaacctggcttctaaatattatattttcaacttctgctcagtggtatttatagatgtccacctgtacctcgcgtgcgcatgattactcaaccatatctagtcttcaaagtcactcgggttgcccacttcagccatgtgtgtggagtgtgaagtgggtgggtgtgggcccgaccatatgttgttatgccaaattaattatatgccctgtgtctatgtggaagacgcccctccccgccacacagttcaacacagctactgtttgctaattcccctgataaaccttatcattggctcactgccggtgcaaagtataaatccccacgataaactccacggctggagattgcattggttgtgcccaagcccccgcccatcgacagatttgggttttattgataagggggaacattgcgataacctttgatcaagttgtagttcaataaacagtgctgccataaagttagcggccatagatctttggtttcatttcggttttgattgcttttggctttatgacagtcggtaattgggttatttaatttgttttcatttgatgcatttgattattcccgcagtcggccaatggaccaccacagaccacaaaaaacttaatttacatttttttggttgtctttggttggtgaatttttatttattacaaactggccataaaaatcctcgcgcgaatttatttaaagagttttttattacgccataagtttgttaactggagcgttacagttttcctgtggcggcagtggggcttcgcgcggagggggggggggcttgtaagggggttataataagcgagaattacccagagccaagggcaagaatcgcatattaaattcattttattgggtcttagtggcgggggccagagtttcgccgcttaccaaatactccttgggcaataaaatgttttcagcttggccggcgtttaaccgctccaccacaccccacccctttcattgccatccagctggtacaa

SEQ ID NO: 815 - DNA, 1654 bp, DROSOPHILA
ctgtggcccactaacaacaagcccgtcgtcaccagatgtattttcgtgttgttggtggtttggctgcattcgatttctcctcaactgcaggctgaaaaaaggcaaataaaaaaggaattcggtgccaaacattccgcgaccacgcaacaaattgcagccaagcagcacgtgccacttgctcccagaataaaaataaaccgggcgaggaaaggcgccgcatttgacattgaacaacattcgcggtgcgaaaataaatctaggaaataaaactaaaacccacacgaacaaacggcgatatcagctgttcggcaagtgcgtgcggcggtgaaaattcattattaactgtgccatcggcgaatagaggcgctttcccattgccctccgcattttccatattcccccgcggcggagagtcgatttttccgggcaacgataactggaaattgcgagcatattacgcatttaccctagtgttgtgtaatcgaagtcccgcggaaatgagcgctacgagtgtccaggaggcgcccaagaaggcggtggccaccaatgccatcaagttcctcttcggcggcctctccggaatgggagccaccatggtggtgcagccgctagacttggtcaagacccgcatgcagatttctggagcgggcagtggcaagaaggagtaccgcagctcattgcactgcatccagaccatcgtgagcaaggaaggacctctggccctttaccagggcatcggagctgctctgctgagacaggcaacctacaccacgggaagattgggcatgtacacgtatctgaacgacctgttcagggagaagttccagaggagtcccggcatcacggacagcatggccatgggcacgatcgccggagcctgtggcgcctttattggcacgcccgcggaggtggccctggtgcgcatgacttccgacggcaggttgccggtggccgagcggaggaactacacgaatgtggccaacgccctggccaggatcaccagggaggagggacttacggctctgtggagaggcagtctgcccacagtgggtcgcgccatggtcgtgaacatgacccaactggccagctactcgcagttcaagacctacttccgccacggaccccttcagatggaggagggcatcaagctgcacttctgcgccagcatgctaagcggtctactgaccaccatcacctccatgccgctggacattgccaagacccgtatccagaacatgaagatggtcgatggcaagccggagtaccgcggcaccgccgacgtcctgctgcgcgtggcccgccaggagggagtctttgcgctgtggaagggattcacgccctactactgccgcctgggtccccacaccgtgctgaccttcattattctggagcagcttaaccagggctacaacaagtacgtcctgggctcgaacaagagcactggcctgtaaatgaccaatatcccatatccaacgattaacgaagaatgaaccatgcgtgtatatatacgacgttaagtttaaagaaaacttagggcatttatatgtcggcaattccggtgacaatattacatgataacgattagcttgaatgttgaaacagtttttctagcgccataagtataaagtggattctcaataaagcacaaaatgtt

SEQ ID NO: 816 - protein, 317 aa, DROSOPHILA
MSATSVQEAPKKAVATNAIKFLFGGLSGMGATMVVQPLDLVKTRMQISGAGSGKKEYRSSLHCIQTIVSKEGPLALYQGIGAALLRQATYTTGRLGMYTYLNDLFREKFQRSPGITDSMAMGTIAGACGAFIGTPAEVALVRMTSDGRLPVAERRNYTNVANALARITREEGLTALWRGSLPTVGRAMVVNMTQLASYSQFKTYFRHGPLQMEEGIKLHFCASMLSGLLTTITSMPLDIAKTRIQNMKMVDGKPEYRGTADVLLRVARQEGVFALWKGFTPYYCRLGPHTVLTFIILEQLNQGYNKYVLGSNKSTGL

SEQ ID NO: 817 - DNA, 8642 bp, DROSOPHILA
aagatttttcttctacatatttattttattaagattattaacggatagtgaatatttataggtcctacaaatggttcaagctattcaattaaaaacttacaaataaaatattgcattaaatcttaataatttaggtctgaaattaaatataaactaacgtttcctttttatattacaaacaaaaccgaaaaccaaaccaagtcacttctaaacgaaattgcgtatagaatgcgtatagaagcatccgcatctgcatcagcatccgcatccgcatcaataaactgcacttttgcgcatattgtatcaatgataggcggcaatgaactacacagaaatcgtttgtttttaacgacagttggaaatagttaacgagggtcaagcaatggcaacagaagcgcaactattagctaatatcatgtaaaacagacaaacaaataacaaaatgctactagaattgaaaccaaatacatgaaaatctcgaaataaatacgcatttagcagcctaagttgtcatgctgttttattttggtgttatggatgaatttttgcagctatacaaaataaataacaaagatcttcaatttcattaatgatatttgagatcaaaatttggcgccaacatttttggttacccgcgcattttacaacactgccaaacaatggtgaatgacaggaagaagaagcaatcagctgttgccgttttcacctgtgcctctagctgtgtgaaaatttggccaaaaagttcttgtaaatgtgctgaaatctgaatcacggcttgcaacctctgtagaggctatcactctgactatatagacgttcgctcccaaggaggagctcggaaaacaacgccgaaatagagcaaaacctgggctgtggacaaaacaacctacatcgtcggcaacatttttttttgtaaacaaataattcgccttggggaaaaactcggctagcaattaacaaatgccgttcagttgagaaaattgctggaaaaaacgcgacgatggacaataagaaggatatatacaatctgtgggtgcagtacacgacaaaggtaaggttccaattagagaaaatcgagtgataagaagtcggattttgggtggaggagtggcggggggtgctgctccaattgcgggggaggccgcaaatgtttatagcattagtcactgaaaggcaaacagcacttcaagtaatgtaaacagtgtaatgattatataatcccggagaggctcaaactaaatccttccctctccctcgctcttttcgttttaagaatgatgaaacccacttccggcaatttgtggcccgcttcgtggccatttggaggagccaactgcagctagactttcaggcggaaaattgcccgatgtggcacgaggttcagccggatagtggtccccacttgggccgcctcccggatgaactcctgcccgccatcggtaaattcatcattgtagccagagatgtttgcgaaacggaagggaaactggaggagcaggccattgaagaagtagccatactcgtggattgtctggtgatcgtgtgccggcactttgataacatactgtccatcatcaagtatgaatacaagccgaatttgatcgccatactctccagggtgttcaaacaagtatgcaaatatcttatacatattgctgggttttaccacaattaacttatcaatgaattccagcaaatggagctgccgcagagcgtgcccgcaataagccacctgtttagcagtttctcggcattcctggaagtcatgtatgatccatatctgacgtggcgcagcttcgtgcgaggccagtcagctgactacagtcgtctttcatataaaccccactcggttcatgtggaaattgtcccctttatttatggtaagataaaaaggataaagaggcagtgatggagtgtaactaactactgatgagtctgatcccagtttaagtttaagtgacccatcactgccccataacagtttggcccactaacatttcgctttgccttgcagattgctttcaggaggagaagctcatccgatatgcggaaattggcgaaagcctgctaaacatcctgggcgctgtgatttgcggctcacaggtagcgccagaaagcgtctccagtcccttcctgtgtagtcctttctctcttaaaaaccgtttaattattaacctcacttcctgacagcttacctttctgctcactgctttcgctattaatgtacgttagagctctatcattttgtttccttgtcctatttcgtttcatttcgtgtatcgttgtgtggctggatctcctccagctgcagctgaaagtgcagaagtctctaaactcgacctcgaccctgacaaatagaaatactaacgctctaaccacttcttcacttgccccctgctcgggtgatgggctgctagactgtgataacttggtgagtggtggaaccatctgttgtcccgatcattgttgtcccctaaccgttgctcatgcatgccattgcttgtctgtcccatgtcctgcgttgaacccttataatggtgaatttggtctgatcagcgcaatggtatgaaggccatttgccccgccacggtgtccattaccatgagtatcctgcgacaatgggagagtgccaataatctgcgccgcgtagccctgcaatgctatgcgctgatggtcattgtgctgcagaaatctagtccggaagaagtgagtagccagccatttcgtttccacagcaaactaatcacatcttcgttgcacagcgccaaatagacctagttacgttagttcaactgtattgtgatgctctccaagagctcctggccacaaagcacttcgatagcggggatgccaatttcgatataaccagcgatgctgaccaggatgtggctatcgacatggctgcactctcctccaccgtagcggctgttaaattctttgtcacaggcgatgcaggtgttagtgaagccgtttccgattccaatctattggaactgcttaccaatctgccaaagcttataaaagtatgttttcttatctcttacaaattcagtactaatcattgttatactttatagccctggcatatttcccactcgagttccctgtgcagcaccatggaagctttggctattttagcgcgccattcccctcaatccgcgtcccagttgcgacagggtgagcgcatcgagaggctctttaccagcctgcaggaatatggcagtccaacagtcgaactcctggacacttgtttcatgcttggctacgatgaaagtgagcactttttgctgctacccgaagttatgcttcgattgctcaattgggtgccaacgctccaagagcgcgaacaattgcatgtgaccagtcttgtgctcaagggctgcaccgacaactacagaacgtaagaaaattagcttcgattgatataatcaacggatacatcagccttttgaatatttaacagaaaaactgtggcatgtggcagtcatattatcaaagcagtatgtggttgcctcctgacggcggaatctctggccgagaactgtgttcagaatctcattaagttgatagaggaattaagcaagctcagtattgtacccgcggagctcaagtgcatattttcactgttgcggcagggcacgaagtttccgcagttcaagcagcttcagcaggtgaaattctatccccttgtgatatcgtattcttgttaatagttaaatttcttgcagactcttgttgtaattgctttgcagagccttagaggcagcaattcctgcgccgagttcttttccattgagcaaccgacggatggtattcttgtacccgatattcgaaactggactatctccggttcatatggcttcatctttcacattctggtccgattcaatcagctgaaggagcagtcaaacagtcgccgaatgctgcttacactacagacagcaagtggcagtggtttcgaggtctttgtgcagccaaacggaaacgttgtggttgctgcactgacccggcgggaatacctcacttcctctactgcgactaaaacacttatggatggccagtggcattaccttacagtggccataacgcccccaaaacgaccattttcgtatagtcagattaacatctatgtggattttgttcagaaactgagtgccaccctgaaggttcaggcagttaatgaaccattcactgtctgctctatcggcgcagtggtggctccaccacagccaggtgaagtagccaagactggtaatatgccaaggtcttcatcacaggagagcggatccagtggctacaaaggaatgctccccagcttacttgaacggaccctatctgcaaatgtaagaatcaagattttgtgttaatattctattactcacctagtttatcctcttaggtgtcaaactactttaccttaccgatgcgcacacagacggcatttgatccgaatgtaaagaactttcctatcggaatgcaggatacagtgtttggagagcaaacttgtcttaatggacacctgggcggtgtgctactggcggatccaactactagtttgaaaacaattttcgacgcgggcgccaatttcagttccattttctcacaggacaatgacctcttggaactcaactctcgctttgtgttctgttacgctccgggagcaatatggcatggaacctgccaggacctaataccaggcggaaagtatccgggtaggattaatgctcagcactgcaagatcgttaagatccaggagacaatcaatagtatcggaggtatcagtgcaatattacccatgctgcataggctaatcacattggatcagacgacagacatctccattggcagtgtgagcgaggagtccttgtcctgtgcaccgacgccctcggctgaagagttcacagactgggagatgctatcatcgaactcatacaccgaatggaaaatgctgcaacacccgctggccagttttctgtgcctcctgcgctacctcacacatgagcacgaaacaaaccaagaacaactactaagtagtgaatgcctggccattgtgggcacgatgctccaacgctgtccgccgtctttgttcgatgttaatgccctgatggccacccacctgctaatggagtcgctgcaaggacataaagcggaagcaggtggacagctgttggacgctttgtatgctcacattgtcttcgactttgctatttggtcgcgtctgcagtttcaaataaccctgggacacgcccaatacctgagtgccatgattaagaacgacagaaagttcttccgcaagcggtatggcgtccagtttgtgctggacgtggtgcgtcaatattactctacaccggacagcatcagcgatgatgatgcgaaaaccattcgagcaacgctgttcgggatcatcaagttttatttacaaaaagatgttaacataaaggaggtcaattcaatgattacatttctggcttctgtacggcaggatgtcgtacttgtagagttcctggaaatgatgactttctatgtgcgcggcaagaactgcaaggatcagatggttctacttctgcacgagccccagtccgccaatcttttatacaacttcttcgtggacaagagctacagtaatgagattcaggaggctgcaataagggtaaaattaaatatttgattcatctgtatatgtggctaacatacttctatttcaactttagtttattagcggactattggccacatcgcgtgtgcatcagaagtataagcaagtgcttcgattgtacgatcagactacggagcagagcatgttcccaggatttttctctttcattacaccgttgtccctgagctctactatcttgtttcatttggttgacgaaatgctgggactgcagccagactatgcaggtctcatatttctggtctatcatgtgagcagctgtgatctgcccgtaaaactggagatcgccaaacgcctgcttcaaaccaccttcgttaagcagcaatccacagtagcgatggcgaagcaaacgggctggcaggagtccattgcccgtctgctcatccgcaaaccaataaccagttctccgccagacgaggagaagcgtcgcagttttggtattaacctcgacgtgctgttggaagataactcaaacttcctagcgcaggccgatctcattacgttttcggagcaggagataggcctcgcccaattgcagcagcagcaacaagaggagctgagcgacagtggcctaatactcaacgaaatccaggctagtgttacagaggcagccacagttatcgagagtgaaattaaaggtaagttgtcccctaaatccagtgtgaaatattctaatgtattttaattccagaattggctgaatctgtctctggagctgtggttgaaaatgctaacagcctgttttcggtcattcgacaaaccactcatgatctgcaggacacttttgagtccctgacgcaaggtagctcgacggacactgctgatggttcacagacgccttcgattcagcgcgaagaatccttaagctccgacacatcctcgcagtcgcctcatggtcctcccaagaaaagtgactccttagaggtaagtgcccctttagtgaatcgaaaatgtttttccttatttataattttttctacagagcacctccgcctttgactttgtggccgatggcgatgtggacaccgaggaacagttggtttatctagtctcaaacacactattcaacattttctggcgcggtatccccaacgatcatccgcagtgttggcaagagcgtggccaagtgctgggctgcattaatttgctggctctgaacaacgagttgattacttcacatctctcactgcgcctacgcatcttggaaatggccgtacaggcctcgcttttcgatctatccgagcacggcagtcaaacgctagtcaaccaggagaatgcatcacacatcctgcgcatggtttatgaattggtggttctaggctccaacgaagatgagtctaagaagtgttcgacaaaacttttggatggtgtgctagcattgctcgacgccctgatgatcttccaacagggctcctccgacgattggtccgatatgattcggctgtgcttgggtcttctgctcaagtgttcgcatcacccgaatcccggtattgttgccatggcaacggccaagctgcatgctattctccaaagtcgttctacggaagatcccgcggagctgtcgtatcttctatatagcataaacagggctctggataatgccattgaaggtgggttctagaatattattatgaattttccaatgctaaacattttctatttgcttctttagttggcaatccggaggagtactcattcttgatgcctgtgatgaaagctctgttggaaaaatgtcgcgtagccttcaatttggattctactttgcctgatctgccgtcaacttcctctggtcccgtcttcttcaatgatttccaaatgtacagcaccagcaaaaagtggaggaactttattgaacgcatggtaagtaacgtagaaaaatgtggtatcagttttatttggaactcgatttgtttattatttaaatatattcaacattattagcctaaatctagggacaaaacgtattaacatattttaaacaactaagcactatttaaacaagtctttatgctatgcctccttttgatttcgttgagaattcagaatagtttatgattttttggcaagttctgacgcagcccatggagatttctctccatctccctatcgctgaggggactcttgaacagcgtcgtgtcgaagacgcccttagtagtccgcttggatgtggatggacccctaccatcggcgggctgcaatgccagcggtgacaccgggccgtgatttctgacgtaacttggtcttgtcggtctcgagccacgtcctccggttgtgggtgaaaactgttgcctggtcggtggtgcaatggttccatcgtaatagctttgcgagtgggattgatcgatttgaacgctggtattggtgggatcggatgaactgggatttccgggttgctgctttgtgcgataccgagaagagccacgatgtctactgcgatcagtagtgggtgttttcggagtacttgttacaatggttggtatgaatgccgcacgggtcgtactacccctgcccctcattggagtccaaggagccggagtcgtcgacgtcgttgttgtgggcgtgacaaagttgaaaaagctctgcttcctctccacatagtgagaactatttgcatccgtatctgcatttgactcgtgtgactcccccaagtggctatccgcatcataggcctgctggagctcaggaacatcaagcgtatgctttgcggggacaactccaggactgggctttcgctttctcttacgccgcttggaactaccagccgcatgggcatctgaagttatctcattcagatcgggagaggatgccaagatgggtggataggactcctgttcatcgcgattggaggcttcgaaaggaacgggatcgtagatgggcacttcgtagctggatttggggaaatcgaaactaggaaacttgtggtgtggatttaagggcaactcctgcgacggtggtgagtaatcgtcct

SEQ ID NO: 818 - DNA, 5151 bp, DROSOPHILA
atggacaataagaaggatatatacaatctgtgggtgcagtacacgacaaagaatgatgaaacccacttccggcaatttgtggcccgcttcgtggccatttggaggagccaactgcagctagactttcaggcggaaaattgcccgatgtggcacgaggttcagccggatagtggtccccacttgggccgcctcccggatgaactcctgcccgccatcggtaaattcatcattgtagccagagatgtttgcgaaacggaagggaaactggaggagcaggccattgaagaagtagccatactcgtggattgtctggtgatcgtgtgccggcactttgataacatactgtccatcatcaagtatgaatacaagccgaatttgatcgccatactctccagggtgttcaaacaacaaatggagctgccgcagagcgtgcccgcaataagccacctgtttagcagtttctcggcattcctggaagtcatgtatgatccatatctgacgtggcgcagcttcgtgcgaggccagtcagctgactacagtcgtctttcatataaaccccactcggttcatgtggaaattgtcccctttatttatgattgctttcaggaggagaagctcatccgatatgcggaaattggcgaaagcctgctaaacatcctgggcgctcgcaatggtatgaaggccatttgccccgccacggtgtccattaccatgagtatcctgcgacaatgggagagtgccaataatctgcgccgcgtagccctgcaatgctatgcgctgatggtcattgtgctgcagaaatctagtccggaagaacgccaaatagacctagttacgttagttcaactgtattgtgatgctctccaagagctcctggccacaaagcacttcgatagcggggatgccaatttcgatataaccagcgatgctgaccaggatgtggctatcgacatggctgcactctcctccaccgtagcggctgttaaattctttgtcacaggcgatgcaggtgttagtgaagccgtttccgattccaatctattggaactgcttaccaatctgccaaagcttataaaaccctggcatatttcccactcgagttccctgtgcagcaccatggaagctttggctattttagcgcgccattcccctcaatccgcgtcccagttgcgacagggtgagcgcatcgagaggctctttaccagcctgcaggaatatggcagtccaacagtcgaactcctggacacttgtttcatgcttggctacgatgaaagtgagcactttttgctgctacccgaagttatgcttcgattgctcaattgggtgccaacgctccaagagcgcgaacaattgcatgtgaccagtcttgtgctcaagggctgcaccgacaactacagaacaaaaactgtggcatgtggcagtcatattatcaaagcagtatgtggttgcctcctgacggcggaatctctggccgagaactgtgttcagaatctcattaagttgatagaggaattaagcaagctcagtattgtacccgcggagctcaagtgcatattttcactgttgcggcagggcacgaagtttccgcagttcaagcagcttcagcagactcttgttgtaattgctttgcagagccttagaggcagcaattcctgcgccgagttcttttccattgagcaaccgacggatggtattcttgtacccgatattcgaaactggactatctccggttcatatggcttcatctttcacattctggtccgattcaatcagctgaaggagcagtcaaacagtcgccgaatgctgcttacactacagacagcaagtggcagtggtttcgaggtctttgtgcagccaaacggaaacgttgtggttgctgcactgacccggcgggaatacctcacttcctctactgcgactaaaacacttatggatggccagtggcattaccttacagtggccataacgcccccaaaacgaccattttcgtatagtcagattaacatctatgtggattttgttcagaaactgagtgccaccctgaaggttcaggcagttaatgaaccattcactgtctgctctatcggcgcagtggtggctccaccacagccaggtgaagtagccaagactggtaatatgccaaggtcttcatcacaggagagcggatccagtggctacaaaggaatgctccccagcttacttgaacggaccctatctgcaaatgtgtcaaactactttaccttaccgatgcgcacacagacggcatttgatccgaatgtaaagaactttcctatcggaatgcaggatacagtgtttggagagcaaacttgtcttaatggacacctgggcggtgtgctactggcggatccaactactagtttgaaaacaattttcgacgcgggcgccaatttcagttccattttctcacaggacaatgacctcttggaactcaactctcgctttgtgttctgttacgctccgggagcaatatggcatggaacctgccaggacctaataccaggcggaaagtatccgggtaggattaatgctcagcactgcaagatcgttaagatccaggagacaatcaatagtatcggaggtatcagtgcaatattacccatgctgcataggctaatcacattggatcagacgacagacatctccattggcagtgtgagcgaggagtccttgtcctgtgcaccgacgccctcggctgaagagttcacagactgggagatgctatcatcgaactcatacaccgaatggaaaatgctgcaacacccgctggccagttttctgtgcctcctgcgctacctcacacatgagcacgaaacaaaccaagaacaactactaagtagtgaatgcctggccattgtgggcacgatgctccaacgctgtccgccgtctttgttcgatgttaatgccctgatggccacccacctgctaatggagtcgctgcaaggacataaagcggaagcaggtggacagctgttggacgctttgtatgctcacattgtcttcgactttgctatttggtcgcgtctgcagtttcaaataaccctgggacacgcccaatacctgagtgccatgattaagaacgacagaaagttcttccgcaagcggtatggcgtccagtttgtgctggacgtggtgcgtcaatattactctacaccggacagcatcagcgatgatgatgcgaaaaccattcgagcaacgctgttcgggatcatcaagttttatttacaaaaagatgttaacataaaggaggtcaattcaatgattacatttctggcttctgtacggcaggatgtcgtacttgtagagttcctggaaatgatgactttctatgtgcgcggcaagaactgcaaggatcagatggttctacttctgcacgagccccagtccgccaatcttttatacaacttcttcgtggacaagagctacagtaatgagattcaggaggctgcaataaggtttattagcggactattggccacatcgcgtgtgcatcagaagtataagcaagtgcttcgattgtacgatcagactacggagcagagcatgttcccaggatttttctctttcattacaccgttgtccctgagctctactatcttgtttcatttggttgacgaaatgctgggactgcagccagactatgcaggtctcatatttctggtctatcatgtgagcagctgtgatctgcccgtaaaactggagatcgccaaacgcctgcttcaaaccaccttcgttaagcagcaatccacagtagcgatggcgaagcaaacgggctggcaggagtccattgcccgtctgctcatccgcaaaccaataaccagttctccgccagacgaggagaagcgtcgcagttttggtattaacctcgacgtgctgttggaagataactcaaacttcctagcgcaggccgatctcattacgttttcggagcaggagataggcctcgcccaattgcagcagcagcaacaagaggagctgagcgacagtggcctaatactcaacgaaatccaggctagtgttacagaggcagccacagttatcgagagtgaaattaaagaattggctgaatctgtctctggagctgtggttgaaaatgctaacagcctgttttcggtcattcgacaaaccactcatgatctgcaggacacttttgagtccctgacgcaaggtagctcgacggacactgctgatggttcacagacgccttcgattcagcgcgaagaatccttaagctccgacacatcctcgcagtcgcctcatggtcctcccaagaaaagtgactccttagagagcacctccgcctttgactttgtggccgatggcgatgtggacaccgaggaacagttggtttatctagtctcaaacacactattcaacattttctggcgcggtatccccaacgatcatccgcagtgttggcaagagcgtggccaagtgctgggctgcattaatttgctggctctgaacaacgagttgattacttcacatctctcactgcgcctacgcatcttggaaatggccgtacaggcctcgcttttcgatctatccgagcacggcagtcaaacgctagtcaaccaggagaatgcatcacacatcctgcgcatggtttatgaattggtggttctaggctccaacgaagatgagtctaagaagtgttcgacaaaacttttggatggtgtgctagcattgctcgacgccctgatgatcttccaacagggctcctccgacgattggtccgatatgattcggctgtgcttgggtcttctgctcaagtgttcgcatcacccgaatcccggtattgttgccatggcaacggccaagctgcatgctattctccaaagtcgttctacggaagatcccgcggagctgtcgtatcttctatatagcataaacagggctctggataatgccattgaagttggcaatccggaggagtactcattcttgatgcctgtgatgaaagctctgttggaaaaatgtcgcgtagccttcaatttggattctactttgcctgatctgccgtcaacttcctctggtcccgtcttcttcaatgatttccaaatgtacagcaccagcaaaaagtggaggaactttattgaacgcatgcctaaatctagggacaaaacgtattaa

SEQ ID NO: 819 - protein, 1716 aa, DROSOPHILA
MDNKKDIYNLWVQYTTKNDETHFRQFVARFVAIWRSQLQLDFQAENCPMWHEVQPDSGPHLGRLPDELLPAIGKFIIVARDVCETEGKLEEQAIEEVAILVDCLVIVCRHFDNILSIIKYEYKPNLIAILSRVFKQQMELPQSVPAISHLFSSFSAFLEVMYDPYLTWRSFVRGQSADYSRLSYKPHSVHVEIVPFIYDCFQEEKLIRYAEIGESLLNILGARNGMKAICPATVSITMSILRQWESANNLRRVALQCYALMVIVLQKSSPEERQIDLVTLVQLYCDALQELLATKHFDSGDANFDITSDADQDVAIDMAALSSTVAAVKFFVTGDAGVSEAVSDSNLLELLTNLPKLIKPWHISHSSSLCSTMEALAILARHSPQSASQLRQGERIERLFTSLQEYGSPTVELLDTCFMLGYDESEHFLLLPEVMLRLLNWVPTLQEREQLHVTSLVLKGCTDNYRTKTVACGSHIIKAVCGCLLTAESLAENCVQNLIKLIEELSKLSIVPAELKCIFSLLRQGTKFPQFKQLQQTLVVIALQSLRGSNSCAEFFSIEQPTDGILVPDIRNWTISGSYGFIFHILVRFNQLKEQSNSRRMLLTLQTASGSGFEVFVQPNGNVVVAALTRREYLTSSTATKTLMDGQWHYLTVAITPPKRPFSYSQINIYVDFVQKLSATLKVQAVNEPFTVCSIGAVVAPPQPGEVAKTGNMPRSSSQESGSSGYKGMLPSLLERTLSANVSNYFTLPMRTQTAFDPNVKNFPIGMQDTVFGEQTCLNGHLGGVLLADPTTSLKTIFDAGANFSSIFSQDNDLLELNSRFVFCYAPGAIWHGTCQDLIPGGKYPGRINAQHCKIVKIQETINSIGGISAILPMLHRLITLDQTTDISIGSVSEESLSCAPTPSAEEFTDWEMLSSNSYTEWKMLQHPLASFLCLLRYLTHEHETNQEQLLSSECLAIVGTMLQRCPPSLFDVNALMATHLLMESLQGHKAEAGGQLLDALYAHIVFDFAIWSRLQFQITLGHAQYLSAMIKNDRKFFRKRYGVQFVLDVVRQYYSTPDSISDDDAKTIRATLFGIIKFYLQKDVNIKEVNSMITFLASVRQDVVLVEFLEMMTFYVRGKNCKDQMVLLLHEPQSANLLYNFFVDKSYSNEIQEAAIRFISGLLATSRVHQKYKQVLRLYDQTTEQSMFPGFFSFITPLSLSSTILFHLVDEMLGLQPDYAGLIFLVYHVSSCDLPVKLEIAKRLLQTTFVKQQSTVAMAKQTGWQESIARLLIRKPITSSPPDEEKRRSFGINLDVLLEDNSNFLAQADLITFSEQEIGLAQLQQQQQEELSDSGLILNEIQASVTEAATVIESEIKELAESVSGAVVENANSLFSVIRQTTHDLQDTFESLTQGSSTDTADGSQTPSIQREESLSSDTSSQSPHGPPKKSDSLESTSAFDFVADGDVDTEEQLVYLVSNTLFNIFWRGIPNDHPQCWQERGQVLGCINLLALNNELITSHLSLRLRILEMAVQASLFDLSEHGSQTLVNQENASHILRMVYELVVLGSNEDESKKCSTKLLDGVLALLDALMIFQQGSSDDWSDMIRLCLGLLLKCSHHPNPGIVAMATAKLHAILQSRSTEDPAELSYLLYSINRALDNAIEVGNPEEYSFLMPVMKALLEKCRVAFNLDSTLPDLPSTSSGPVFFNDFQMYSTSKKWRNFIERMPKSRDKTY

SEQ ID NO: 820 - DNA, 4317 bp, DROSOPHILA
tagcttttagaaaggtctacctagagggggaatatttaatggaatggctctggatatgccatctccatgcttaaagaaatctatagttcttgtttcgctgtataacgcactgctgttacctgtcaccaacacgattatcaggagaactccatgacattccatacatgtgtttactaatatccacatatagatcgagattcgtgtcagcccgcaccaagccaagtcccgtcattgggacacggtcggacatggcggggcatggggggacatggagggtcacacgttcatacggacaatattgtaaaattacatgagatgtttttacttgagagggtatgtaaacttagcttgcctacggtacaaaatttcttatcgtccaataaggaaacaaattctagtcgattacctcgactatcagatactacgcagctaaatcaaaatatggatggaacattgatagatagcaaaactaaaataaaatatttttttcgaatttgttagatttttggcgtttatcgacgtgtccaaaatctgttttgcctaaccaagttgctaagatactcaatcaaaataggacaatgtttaaaaagtgtggtcgtggcagcatcggacgtctaggttttaagaatctgcgacctatttttcaacttactagcaattatatttaccaaaatcacggacaaacggacaaacagactaacggacatggtcagatcgactcggcaattgattctgatcaagaatataaacactttatagggtcggaaaagttttcttctaacagctacttacttttcaaagcacctagcataccctgtactcttcgagtaacaggtgtttaacagcggcagcaatatcgccttatcagcagaggtaaatacaaagggaacgaggcgtagggattgataagcaggtttgattagacggagattactccaagctcaacgagctaataatcatagaaatgtagtattttttgcacaaccgtgacaagtggacgggcatccgagaaatatgcctaaggaaaccgtaattttggcttactccggtggcctggacactagttgcgtcctcaagtggttgctggacaagcagtatgaggtcatttgcgtcctggccgatgtaggccagaaggaagatttcaccgccgccgagaagaaggctcttaagattggcgcaaaaaaggttgtccaaccagaagtgtggcatatgtagatacatgtcggatgaaattgaaatttcggaattaattaattttcgaatatatacttgtttcgtcctatcgactcaggttatcgtggccgatgtcaagcagtccttcgtcgaggactatatctggccggccgtacaaatgggtctggtgtacgaggagcgctatctactgggcacttctctggccaggccctgcatcagtgtagccctgatggaggtcgcccgcgagtatggagccaagtatctggcccacggagccaccggaaagggaaacgaccaggtgcgcttcgagttgtgcgcctacgccctgaaaccggatctgaaggtacgtacaaaatttttagaggtatccgtactaattgagtggtaagacccgtcgggttggattgcctctcttatcagccccttatcgcacgccaagtcaacaacaaagttgtgcgtacccaagttgtctgactagctacattaacatctttgagtgtaatctataaacaaatcaatgctacaagaagtgccgtgaacgcataaaattttagcttttggtttgtggtttaaaccgtaacgatcgagtaggttccggtttaagaaccggttcgtcgacatgctgatcaaatccatttcaagttacggcttaaatccgttttgcttgttactttgaaatcacaaagattgcactattttttagtttttcttcatttcaaataaagaagtcaagagctttttggtttgccatggtttttgttgcttagcaggcagaatatttcatcacaatgatcgatttatatgaactggtactaaattaatgttcttttgagtgttagtaacgtcaaaaagccccatttcaaccgacaaatagaaaatagaaatttaatatacatatgtgatcaaatttaaagatttgactgtgctataaacgcgaaatcgacttttttccagatcatcgctccctggagggatgtagaattctgctgccagtttcaaggtcgacaggacctcattgcctatgcccagcaacacggaatcgaggtaagcgccaagccagccacaccctggagcaccgatgccaacatcctgcacatcagctacgagtccggaatactcgaagatcccaacacagtggctccggaaaatctctacgagatgacagtcgatcccctgacaagggctccacgggatccggttcacttggtcattcaatttgatcggggactgccctccagtgtggaggatttgcccggcggtcgggtctacactaaacccctggagatgctagatttcctcaataagcttggcggatcatatggcattgggcggattgacatcgtggaaaatcgctttgtgggactgaagtcccggggggtgtacgagacgcctggaggcaccatcctctttgctgcccaccaggacctcgaggtgtttgctttggaccgcgaagtactccgcaccaagcaggttctccgggatcgcatggccgactacgtgtacaatggcttctggttcagtcccgaggcaatttatgcccgtaaatgtatcgagttggccgagcagcgggtctccgggaaggtcaccgtggaactggccccaggctattgccgtgccatcgcccgaaaggcggcgaaggatgtgggagctctttacaacgaacagctcgtatctatggacgtccatggtggctatgtgccgcaggatgccggtggatttatcgccatcaatgcggtccgaatcagggaacatgtccgagcgttcggtgcctacgatgtgccaacgaagaaaaactgaacgaaaaagatagaattaattaaaatgtcatacttttgtttttgtgtttaccttaaaaacgtttatgcatacatatataatacatacacatttataatgaccaaaccaaggcgatagaacacacattgcttgattttgtccagcatacaaatatttgacttacacaaataattttcgtttggcatggaggatagttttggtcctattaataagactatgactaactagttccagatagtagacatcaactttgccaattagtagacaccaaggaaagaatggacaacaataagacatatcgattatcctgacgactcgcacagtctctataacaatacgattaggaacaacatttttgccgcatatgcaaatcatactctttttgtttgttttccctcttttttttcttttgttttcttttcctgggaggaacattatccgtgtataatcctttcacattcccaggtggagtatatctgaccacgaaaaccccttgaagagcactaaggaacggggatcaattctcaccgaataagaatgtgtcttatcttctagatataaacttactttatgttagcgtcgccatatcccaaggaaacggacgacctccaaatcatggcagtaaaatctttagccttggggtctaaaatatcgaacttccttccattataccagttcttgacacatctcgacagtgctcccctctttacttcaaatctgcagatgctttctgtgtaatccttgttagtggggtccgaatagttaagagtcgccgacttggacagtttctgtgtagttcaacctcttaggcaagcagggtaaggggagctggctttaatcatacccaagcataactttggcatcccttactgagcacgttgtccaatgtcaattttgggactccatggcgatctcttctcttgtttatttcccttagaactattccagcattgtcatggtttatggcaaagtttcgatcgaactgaaatggatgttggatcgtaagatgttacaggcacgtcaatcttgtcaagtacctcgcttatcgctactaaaaacacaattactagactccttattaaaagcatagttttgaaaagaggctcttcgggagtctcgctacgaaaattttggcatctaatattttaacattgtggcgttgttctgaaaggtttttctatgctcgattatacactcagagaaaaaaccgttatcaatcggtttgagaattagatatcaaaatctagccaagaatgaatcgagataacccattctcagatttcaaatgactctcattagcccctctccctttctttacgtcgatct

SEQ ID NO: 821 - DNA, 1545 bp, DROSOPHILA
ggcatccgagaaatatgcctaaggaaaccgtaattttggcttactccggtggcctggacactagttgcgtcctcaagtggttgctggacaagcagtatgaggtcatttgcgtcctggccgatgtaggccagaaggaagatttcaccgccgccgagaagaaggctcttaagattggcgcaaaaaaggttatcgtggccgatgtcaagcagtccttcgtcgaggactatatctggccggccgtacaaatgggtctggtgtacgaggagcgctatctactgggcacttctctggccaggccctgcatcagtgtagccctgatggaggtcgcccgcgagtatggagccaagtatctggcccacggagccaccggaaagggaaacgaccaggtgcgcttcgagttgtgcgcctacgccctgaaaccggatctgaagatcatcgctccctggagggatgtagaattctgctgccagtttcaaggtcgacaggacctcattgcctatgcccagcaacacggaatcgaggtaagcgccaagccagccacaccctggagcaccgatgccaacatcctgcacatcagctacgagtccggaatactcgaagatcccaacacagtggctccggaaaatctctacgagatgacagtcgatcccctgacaagggctccacgggatccggttcacttggtcattcaatttgatcggggactgccctccagtgtggaggatttgcccggcggtcgggtctacactaaacccctggagatgctagatttcctcaataagcttggcggatcatatggcattgggcggattgacatcgtggaaaatcgctttgtgggactgaagtcccggggggtgtacgagacgcctggaggcaccatcctctttgctgcccaccaggacctcgaggtgtttgctttggaccgcgaagtactccgcaccaagcaggttctccgggatcgcatggccgactacgtgtacaatggcttctggttcagtcccgaggcaatttatgcccgtaaatgtatcgagttggccgagcagcgggtctccgggaaggtcaccgtggaactggccccaggctattgccgtgccatcgcccgaaaggcggcgaaggatgtgggagctctttacaacgaacagctcgtatctatggacgtccatggtggctatgtgccgcaggatgccggtggatttatcgccatcaatgcggtccgaatcagggaacatgtccgagcgttcggtgcctacgatgtgccaacgaagaaaaacttaaaaacgtttatgcatacatatataatacatacacatttataatgaccaaaccaaggcgatagaacacacattgcttgattttgtccagcatacaaatatttgacttacacaaataattttcgtttggcatggaggatagttttggtcctattaataagactatgactaactagttccagatagtagacatcaactttgccaattagtagacaccaaggaaagaatggacaacaataagacatatcgattatcctgacgactcgcacagtct

SEQ ID NO: 822 - protein, 433 aa, DROSOPHILA
MPKETVILAYSGGLDTSCVLKWLLDKQYEVICVLADVGQKEDFTAAEKKALKIGAKKVIVADVKQSFVEDYIWPAVQMGLVYEERYLLGTSLARPCISVALMEVAREYGAKYLAHGATGKGNDQVRFELCAYALKPDLKIIAPWRDVEFCCQFQGRQDLIAYAQQHGIEVSAKPATPWSTDANILHISYESGILEDPNTVAPENLYEMTVDPLTRAPRDPVHLVIQFDRGLPSSVEDLPGGRVYTKPLEMLDFLNKLGGSYGIGRIDIVENRFVGLKSRGVYETPGGTILFAAHQDLEVFALDREVLRTKQVLRDRMADYVYNGFWFSPEAIYARKCIELAEQRVSGKVTVELAPGYCRAIARKAAKDVGALYNEQLVSMDVHGGYVPQDAGGFIAINAVRIREHVRAFGAYDVPTKKNLKTFMHTYIIHTHL

SEQ ID NO: 823 - DNA, 4184 bp, DROSOPHILA
ttgcaatcgtgcccacacttcggttgcaaaagctttccgcagtgctctccgcatgagtggggcacaaggaagggctggttctcggggttcacctccttgccgcagaagcagttgtactgcgtgggcttatcggccggttggtagtccctgcggcacttggggcagcaccagtgaagggatttctgtcgcttgggcggcacaaattcgcccagatgattgtagtggccctggccgttctgctgctctgccgcctttaccttcatctgcatcatgctgtcgttggcccaccgttggatgcacttcaagtgaaagaagcagtaacagctctcgcaagaccaaatggcctccacccgccgaatgcttccgatgcaaatgagacaggttgccgctcccgagtgtagagtgttttccagaaacgtactggtgcgtgccgcttcctttgagcttcctgcgttgtccgacggtttgtagttcttgtataggagttctgaaaagataaagcacaaaatttgatggttttcaaatgacacgtcacaagcatcggtcgatttacccaaaatgtgattctcatccagttcgccttcatcctcggagctggaggcgtaggtgtccaccagtttttgggcggcagccaaatttttagcttgcgctttattaaacttttccatttttaagccggcgtttttgtctatcaactgggaataaattcctggggtagaaccagggatggctcgttctctgataacagcaattaggggatctagttccgaaaggtacacatttgtgtgagctttcagtttccaattgggaatttcatttaattcaaaaaaaatacatacatacacattaatacctaaattatcaaacatcctctctgcatattttattgcatttaataatttggaccaacattttgaagtttacaattaataggtcaggtatctaatgtggcagccctggtattcgatgttaaacatctgttcgtgagtgcgacaccctggaacagctttcacatcatttgcaacaaaataaaatagagaaaattaaatatatccagacataccgactacgatccgatccaagatgagtttcctaaattacgtgtttggccccaacctctacatggaataccgcggtgtgccggagccgcagcgcaagatgtacgaggcaggtgccgtggaaaagttcggggagcagattctatcgacggtaagtgccctgcgatcccatggggcagaatctggagcatatggtaatgtggaaaatcgacactctccgttgcagctatcggttatgtggtccgtgggctattatacttctccgctgctcgtcacattcctataccgacgcggctacctggtgaccgattccataccgacgctggccaagatcaccaccagcgtgggcctcatcgtcatcctatcgctggtgatgcgcggcctggggcgcaagcaatcgcgctcctactccaacatgattaaggccctcgtccgagcaaagtcctccaaggcaccaggagatgccaacagcgagctgcgtcgcttcgacatcgagttcaacgcttggccggtggactttgatgtgaaagctctaaccgggtgagtgggctacgcctttgaagtgtgccagaataacatcttcgttttcagtgataccaaaaagccggtggttacggctagaaggcgggagcccatccagctggcgacactgccctgtgaggccatcgcctacctggccataaacacctttgggctctccatgatctatccgggttcggtcaaactactccagaaacttatgagtaagaaagatatacatatgtgaagctgtctgaaatgttgttaaattgcaatccgataagcccataagatagacttctacatatactgaacctaaaatattttgcaggacccatgctgatctccggacgcgccaagctcatcgaggatgacaacggcatccgctacaaggttaagaccattgactcgaacgaaatcgatacgttgttcattgacaatcgcccaaacaacgtgggaaatggcaagactctagtcatttgctccgagggcaatgccggtttttatgaagtgggcattatggccaccccagtggccttaaagtattccgttttgggctggaatcatcccggatttgccggcagcacaggcactcctcatccccaccaggacaagaacgccatcgatgccgtggtgcagtttgccatcaacaatcttaggttccccgtagaggatataattttgtatggctggagcattggtggctttagtacactatacgctgcctctgtgtatccggatgtcaagggagtggtactagacgccaccttcgacgatgtgctctacttggccgttcctcgcatgccagctgcactggcgggcattgtcaaggtagccattcgaaactactgtaatttgaacaatgccgaactggccaacgagttcaatggacccatatcctttattcgccgcactgaggatgagatcattgcagagtgagtgataacttttgcatttgggcagaggtctttcctaaaacgtaacccattgatttccattagggacaaccacattgacacaaaccgcggaaatttcttggtcttgtcagtgctcaagcaccggtatcccaacatttttggggcttcccagttgaataaggccaaggggctgctgtctaagcccctggaaccatacagtatccccgtcgccgacgagaagctgtgcatgtcgcgcctgatcacctacgcctctgacgagggcaagtcattccccatgaacattggagcagattactcggaggaggtgcgcaatctgatggctgtgttcttggtgggtttattcggcagtttaaatggtctatatatctaatactgttcacctttcagctgcgcaagcatttacgtgactataactcgacgcactgcacccagctgcccggggagttctttaccatgccgtgggacatacccactgagcagggatttgtgttcacctaagctcattccgcaggtgatccacggccgtatgcttagatttagtaaaatggtttttagtaatttttgccttctgactgcttattaaattattctaactgggaacagccgggtagctggtgtcttctgaactggtgtgaaattatatacaaaataaatgtcacaagctaaactagacgcgtcgtcttgtggttagtttctatttcatggtacagctaaaattggaggggaggggcagttcaacacttagttcctacgagttcttctttgatccaccgaagccggagaagcccatgatggcggccatgtcgtcgggcatgccgccggactcgaagtccgtgtcctcggccttgcgcttccgctcttttcgcttctccttgcggtgttccttgtagcgatcctcctcctccttggcctcccgcaggcggcgctcgagctcgtagtctttctgcttctcctccatcttcttcttgttctgctggaagcgctcctttacctggtcgacggtgctccgctccaccttcatggacatgcccagattgcgctggtgcttcttgccattgatgtggtccagaaagttgatggaatccttgaccacgcagtcgcaaacgttgcagtaatagccaccggattgcgaggtgggtgtgttcttgttgatgacaacgctcttgcccagcttgctgtccaggtccaccttatagtcgcgtcgcttgaggttctcccgctgtacgggttctggtgaaaaacaaaaagacttttattatgtgtgccttccagggaatttagacactgaccttcttccttgggtgccacctggttgagcagccgctccgccgccagcttctcgtactcgttcttgtcccatttccttcggtggtcatcaggtcgcatcgtcatggtggcgctgggatgacaattgcactaaaatctattcggtaaaagtaaggcaatgaaaatttgtaaatatttttgttagcgatgcggcggtttgcgtctgagctaagattttggacagggatgacaacttgatatttttttttaaatgttatcgatggaaccagaaggcggatgtgaaaatgtaaaagcagttgttaattttaatttaaaaaaattgtatttaaagtttaaattaaagcttatttaatagcatataagtccgaatctgtatacacaa

SEQ ID NO: 824 - DNA, 1829 bp, DROSOPHILA
gaacagctttcacatcatttgcaacaaaataaaatagagaaaattaaatatatccagacataccgactacgatccgatccaagatgagtttcctaaattacgtgtttggccccaacctctacatggaataccgcggtgtgccggagccgcagcgcaagatgtacgaggcaggtgccgtggaaaagttcggggagcagattctatcgacgctatcggttatgtggtccgtgggctattatacttctccgctgctcgtcacattcctataccgacgcggctacctggtgaccgattccataccgacgctggccaagatcaccaccagcgtgggcctcatcgtcatcctatcgctggtgatgcgcggcctggggcgcaagcaatcgcgctcctactccaacatgattaaggccctcgtccgagcaaagtcctccaaggcaccaggagatgccaacagcgagctgcgtcgcttcgacatcgagttcaacgcttggccggtggactttgatgtgaaagctctaaccggtgataccaaaaagccggtggttacggctagaaggcgggagcccatccagctggcgacactgccctgtgaggccatcgcctacctggccataaacacctttgggctctccatgatctatccgggttcggtcaaactactccagaaacttatgagacccatgctgatctccggacgcgccaagctcatcgaggatgacaacggcatccgctacaaggttaagaccattgactcgaacgaaatcgatacgttgttcattgacaatcgcccaaacaacgtgggaaatggcaagactctagtcatttgctccgagggcaatgccggtttttatgaagtgggcattatggccaccccagtggccttaaagtattccgttttgggctggaatcatcccggatttgccggcagcacaggcactcctcatccccaccaggacaagaacgccatcgatgccgtggtgcagtttgccatcaacaatcttaggttccccgtagaggatataattttgtatggctggagcattggtggctttagtacactatacgctgcctctgtgtatccggatgtcaagggagtggtactagacgccaccttcgacgatgtgctctacttggccgttcctcgcatgccagctgcactggcgggcattgtcaaggtagccattcgaaactactgtaatttgaacaatgccgaactggccaacgagttcaatggacccatatcctttattcgccgcactgaggatgagatcattgcagaggacaaccacattgacacaaaccgcggaaatttcttggtcttgtcagtgctcaagcaccggtatcccaacatttttggggcttcccagttgaataaggccaaggggctgctgtctaagcccctggaaccatacagtatccccgtcgccgacgagaagctgtgcatgtcgcgcctgatcacctacgcctctgacgagggcaagtcattccccatgaacattggagcagattactcggaggaggtgcgcaatctgatggctgtgttcttgctgcgcaagcatttacgtgactataactcgacgcactgcacccagctgcccggggagttctttaccatgccgtgggacatacccactgagcagggatttgtgttcacctaagctcattccgcaggtgatccacggccgtatgcttagatttagtaaaatggtttttagtaatttttgccttctgactgcttattaaattattctaactgggaacagccgggtagctggtgtcttctgaactggtgtgaaattatatacaaaataaatgtcacaagctaaact

SEQ ID NO: 825 - protein, 524 aa, DROSOPHILA
MSFLNYVFGPNLYMEYRGVPEPQRKMYEAGAVEKFGEQILSTLSVMWSVGYYTSPLLVTFLYRRGYLVTDSIPTLAKITTSVGLIVILSLVMRGLGRKQSRSYSNMIKALVRAKSSKAPGDANSELRRFDIEFNAWPVDFDVKALTGDTKKPVVTARRREPIQLATLPCEAIAYLAINTFGLSMIYPGSVKLLQKLMRPMLISGRAKLIEDDNGIRYKVKTIDSNEIDTLFIDNRPNNVGNGKTLVICSEGNAGFYEVGIMATPVALKYSVLGWNHPGFAGSTGTPHPHQDKNAIDAVVQFAINNLRFPVEDIILYGWSIGGFSTLYAASVYPDVKGVVLDATFDDVLYLAVPRMPAALAGIVKVAIRNYCNLNNAELANEFNGPISFIRRTEDEIIAEDNHIDTNRGNFLVLSVLKHRYPNIFGASQLNKAKGLLSKPLEPYSIPVADEKLCMSRLITYASDEGKSFPMNIGADYSEEVRNLMAVFLLRKHLRDYNSTHCTQLPGEFFTMPWDIPTEQGFVFT

SEQ ID NO: 826 - DNA, 3201 bp, DROSOPHILA
tcccctcgaaactaatgaagtaaaagcgaagtaaaagggagaaagccataaacaaacggcgcgagcacgtgactcagctcgtttttattattgttaccaagttgcgcgacataaatgtataaaaggtcccaaaaaatacttattaattgaaataacgttcttcatttatgtttttatctcttcatgcatcttgtcctcattagcttaaataaattacaatcggaatcaatttaaatatacacttgctatacagaagtttttaaatatctaatacatattacagtgaataaattaacaaaagctatccaaataatcagtgttattatgaaattggtttatgaaattggtttaaaatttgttttgatttaatcagtcataatcttttaaatttattgaaggtcttgacatatgttgattgaactccgattttactgcaatagaccgcacttcctctgcggcggttcattccattgtcgatttgaaactaaaggagttgccagtgggaggtggacgaaagtagtggcgtgggaggggggtggccacagggagtttgcagtcctagtccgactgttgccctctcccttggaagcgattccccctcccccctttttacccctagttgcatttcgttgttctacagaggcaacttgagttttgtttgtgttttgctttgtcttgtatgttgacacatttttctttcgcattttctttttcaactatgtatgcatgtgtgtgcgaaaccggaaattacaaatgcaacaaaatgttctccagagttttgatagcattgtctcagttgcagtctaggaatctcttctaaagacgataattccacgctcgtgactccgtcatggaactcattaaaagaatcacataatattaacttgaaaccgttagaaaaaaaaaataaacaagtagtttgtgaaataagtaatcaaaagttgatttcatttgttctaaccttctgtcatcagtataattttacgtcgagacgtcaacagttcgactcacacagaattataatcacaaaaaaaaaaaaccgacattttcttaaaaattcctaaatggagaacaacaattgcgagggcgagcaaccatcgacatccggtgcattctgtaggtgctccgagtctggcattggtatatctgccgtcctggatctcgctcagtcggagtactccctggacaccacgccggaagctgtgatggcgagtgcatgtcgtctggagaacgagaacgatggtaatgataccgatgaggaggtggagatctgcttcaccagcttgatgcccgatcaccgtaggcgcttgtatatggactgcaagctgtctcttccggcgggcggaagagtgcccatgcgcggcggcgcagaagccatttccgcttccccacatggcagaatcagttctccggaaattcgctatgagcggctgagaaatactgcagtcgaggtgcgcaaatactggagattgcagaagctggacatggcttgtccgctgagcaattgcgacttgatgttcaatcctgagcagctcctaagtcactgcctgatgcaccacgagcacattattacaatggaaatgaagcccaaggagccaaaggttctgaagctgtgtggaaaatccttgcccgaggacaggggcaaaagcaactgtgtgggtctgatgatctacgagagtggcaacaacgcgaccaggaacttaaatctacccaatatctacaaggactgggagtgccaattgcccgtcctgataatgctgtggaagacttcctgggactcgatgcccgtcggaccgcgagtgacccatatctatattctgtggctgtgctgtccccaggcccagacgcctttgttggtatccgtgaatatcggagaaaacactccgggagtgccacgtcggcagatgattcagacctgtcaaggctcggagaccctgaagaattgcgatctgctttcggacagtccgcattttatgcgattcacacatcgcgaaatgaaggagcacactgaagactacacgctggacgtcgacctacagttcaccattctagaggatgagggtagagtggggcccatatcgcctaatcctaatgagggcacctttcgcgaagacgacatcgaaatagaacttgcggaaaaggagaatacctccaaggaggaggtatttattgggaactcagaagggcctcaagcgaactaaacgcagtctatcacaatgatttttggaatgatttttcaaaattatttgcattactttgatactgtacctaaaaattgtttcaagtttttttaaattattttggatcactttgtacttggacgaaataccatatctcataagcaattcaacatatgcaatcttgtaaattttcatcaaaattgtatcagtaaagatcaaattccttattagaactaaaattaaattgttattaattaatgcgatgacaaattagtttgaaagtgccatttacatcgttcaataggtttaaataattaattgtttagtcgataataaaataaaataaataatagtttcgaactgccattaaatcggccctttgagttcaaacttgtatgtatggtatgtgtacatttgaaagtgcatcataatgttgagtgtatttgcaattttctcggtcagactgacagcttaatttaattattcttgaacacaaatgttgtggcaaactcgcccacttaacccgctgtgtgtttgcttggccaaaaagctgttcgctggaaatttttcgcttacgccgcagcgtatgcaacatgtttgccatgtggggcaggggcgtcgtaaaagagggggacaagggctgttcggttttgctgtccaggtcgttggcagccattagcacaaatgtcgtcgcaaaagggggcgtggcgggcagaaggaggagtaactgcatcaacaactttttaaccaacttgccagcccagactaacaagaccgcagaaattgtgaacaggggtgttgtggagaggggccaaggggacttgtggcggcaaactaactaactcgatgcttttgcctggcacttgtaatgtaccgttattgttgcaacagcaccgccgggggtgggcggaggtggttttggctgctttgtccgcgaaatacttttctgtcctttttattcggttgcaaaaaaaaaaaaaaaagaaaatgtaagctcaacttcagctgcagagatttttcg

SEQ ID NO: 827 - DNA, 1201 bp, DROSOPHILA
gttcgactcacacagaattataatcacaaaaaaaaaaaaccgacattttcttaaaaattcctaaatggagaacaacaattgcgagggcgagcaaccatcgacatccggtgcattctgtaggtgctccgagtctggcattggtatatctgccgtcctggatctcgctcagtcggagtactccctggacaccacgccggaagctgtgatggcgagtgcatgtcgtctggagaacgagaacgatggtaatgataccgatgaggaggtggagatctgcttcaccagcttgatgcccgatcaccgtaggcgcttgtatatggactgcaagctgtctcttccggcgggcggaagagtgcccatgcgcggcggcgcagaagccatttccgcttccccacatggcagaatcagttctccggaaattcgctatgagcggctgagaaatactgcagtcgaggtgcgcaaatactggagattgcagaagctggacatggcttgtccgctgagcaattgcgacttgatgttcaatcctgagcagctcctaagtcactgcctgatgcaccacgagcacattattacaatggaaatgaagcccaaggagccaaaggttctgaagctgtgtggaaaatccttgcccgaggacaggggcaaaagcaactgtgtgggtctgatgatctacgagagtggcaacaacgcgaccaggaacttaaatctacccaatatctacaaggactgggagtgccaattgcccgtcctgataatgctgtggaagacttcctgggactcgatgcccgtcggaccgcgagtgacccatatctatattctgtggctgtgctgtccccaggcccagacgcctttgttggtatccgtgaatatcggagaaaacactccgggagtgccacgtcggcagatgattcagacctgtcaaggctcggagaccctgaagaattgcgatctgctttcggacagtccgcattttatgcgattcacacatcgcgaaatgaaggagcacactgaagactacacgctggacgtcgacctacagttcaccattctagaggatgagggtagagtggggcccatatcgcctaatcctaatgagggcacctttcgcgaagacgacatcgaaatagaacttgcggaaaaggagaatacctccaaggaggaggtatttattgggaactcagaagggcctcaagcgaactaa

SEQ ID NO: 828 - protein, 378 aa, DROSOPHILA
MENNNCEGEQPSTSGAFCRCSESGIGISAVLDLAQSEYSLDTTPEAVMASACRLENENDGNDTDEEVEICFTSLMPDHRRRLYMDCKLSLPAGGRVPMRGGAEAISASPHGRISSPEIRYERLRNTAVEVRKYWRLQKLDMACPLSNCDLMFNPEQLLSHCLMHHEHIITMEMKPKEPKVLKLCGKSLPEDRGKSNCVGLMIYESGNNATRNLNLPNIYKDWECQLPVLIMLWKTSWDSMPVGPRVTHIYILWLCCPQAQTPLLVSVNIGENTPGVPRRQMIQTCQGSETLKNCDLLSDSPHFMRFTHREMKEHTEDYTLDVDLQFTILEDEGRVGPISPNPNEGTFREDDIEIELAEKENTSKEEVFIGNSEGPQAN

SEQ ID NO: 829 - DNA, 5363 bp, DROSOPHILA
atagatgatggctcctctgaagtcctgggagcggcaattccagtgattggcgaggcggaagtggaggtggtggatccactaaactacgaggagatgctcaagatctcacagttcgctgccagcagtacggaacccagtgtccataagctggtgacgcttctcccggtgagatccaactccggaatccgaacctacagaccaccagccgcggacgaggagacgcagaggagtgccagtgctccggctcccttggctgcacctgcacctgcacctgcccctttgcctggaaagattagcatacggcgcaagagcaacctcaaccagagccggagattcggacaaccacctgcagaggcggtggtcaagggcggcatccaggtgacggttaagaagtgatcacagagccggcctcaccatgagattataggagaatcgagttctaccacagaacgcaaggatgtagcttaaaccactctatatgttagttataagtagggaatataactttagttaggtcgatcgtgcatatgacgaaatcttgttcgaaaattgtttcgcgcatgggaacaattttggaatgacacttttggttatattggcggaatctgcgactgccagtcctcagtatttaagacaaatcacacatcacattcattgaataagcatcgaatctctagtatacgacttcgaaatttaattatttttttcagttcattactattcttatgttaatgttagctacggatgtaatgtaatgactaagcccgatctttaaataaatgtgaataatttcttacaagctatggctttctttttcgatgaaaaaggtatggataaattcctgcacttcttcagctttaactatatttcaagtattttatatatttctagactattttcaaatctcgcgctcaccataaaccgctatgttggtcttttttgtaggccgcagatacctggtcttattttccgcgcaccttctggtcacacctgagcattgaggatttaggcgttgttgttgtttcgtcggttgtgaattgaatcaaaatagaacaaacaagttgctcaacatactgaaggaatagatataagtacaaagtgataagaggaagtaagcccgctaattatcgagcagcttaacaagtgcaaaatgggctgtgcggagagcaaggacggcgagggggaggcgcaaaacaataggcccaaataccggtcctgcacggacacctgctggctggccatttacattatattctggctgtttttggtaagaaattaaatagatttcgccctatttagagatatatacagccaaagtctgtatcgggaaagtgaaagctgagacattcatctgcgcagcgcgtctgtctgcttcgcagtgtgtgtgagcggtttttgcgggcggaaagcggctacttgttacttgaaaatgtctcattcatgtcgtcatcgctggatagcgattcatgcgcggaattgttaattcctctaatgaatgcgatgatttaacagtcagggttagtccgacattgtataagccaacttaaatcccttgtgaagcgaatcgatacccgttgttctgctgttctgttctgttgtcctgcaggacacgccactcctcgaaagcatttccatgtcaagtatttgcatgggtattatattaataatgccccttgacatgacatgttggtcatggggcgttggccaccatgaacaatgatctatacactttaatttgcctcatttttgtattgcagatagtgattgccatcttttcgttcgtttatggaaatcccctgcgcatcatcaatggctacgattcctttggcaacacctgtggcgttaagtacaatgaaaagttccagggattcccgctgtccggcatgaatacactcgacaagccggagctcttctatttcgatgtcaaggagctgaaaaagtccctcaagatatgcgttaagtcatgtcccgccaaaactatgaccaagggcagcgagctgctggaatactacagccaaacgggcacacagctctgcaaatacgactacaacatgcagcagctgactacggcgggcaacgatgccaaaacgttcaatttcctgggcccatgtcccagttttcccgttcatgagaggtgtgtgttgattacatcacccaaatcaaatgctaatttaattcacacactaatcacttctttccagttcgcctgtcctacatcgctgtgtgcccaagggtacgggcgagaaggttcagaactactacgacatgctcaacaactgggatgtggcccagcagttcgttggcgatatctactccacctggcacatcattgccatggtctgtggattagctttgcgtaagagtagacacatctttcaccaaagtattttctaaaaagcctttttctctagtcatttccattgctctggtaaccatgatgcactggctgtctcgcatcgtctcctggatcatctgtgttttggtcatagtggccagtgtggcgcttactgttgctctgtggtatgcctactacaacatacgcaataagtctggcgttaacacacagtactctatgctggaggagtttgtgcgcaaccaacaggcagtcttaaccctggccgttctggccaccataaccatggtttgttagctcattcaatactttatgggtagttacttagtgtgtctcctttacagataatccttattgtggtcatatacttcttgaagaacaaattggctggcttatctgcgcttttcgaagaagctggccagtgcatgatgaatctcccaggtcttttgatcgctccgctcttggccttccttgtgcttatagccttcttaagcttttgggtcgcagtgatcatttgcctggccactgccagttcacctggacaaagtcccattgctccgttcgacaactcgaaggcccatcaacagcctttgccagcaaatgcattgttcgtttccaatagcaccgacgtcaatgatttaagacgtaagtagtctcatatatctgcgatgtaaatccattctatgcaggtttcccaaagcagacgaatttgaaataatctgaatttttgcattttgttgttattttataacgtgatttggtgaataagtaagtgatatttgctaagggcacggaatttgactcatttgtatatatttctgtgttttctcctcacaactcttcgatctaaattgtatatacaatagatttcttcttaagttactgcacctatgattccagagaattaagcaaatattttccttaaacagcaaatgcccgtgtagaatatgccgatgccggagttcttcgcagcatgttctggatctatgtggtgggtcttatatggacagtggagtttattttcgcatgccagcagtttgcattggccgcagccgtggccttctggtacttccaaaaaccgaccagcacgcccacgttttacgccattggcaaactggttaagtatcatttgggtacggtggccaagggatcctttgtcatcactattttcaagattccccgcctgatactcacttatttgtacgccaagtaagttgaatcatcgtcactttgcatgagtttcccattctttactaattgaacatgacatttcagattaaaaaaaggcgaggacaagggatcggagtgtgccgcctgctgtttgaagtgctgcatttgtggtttctggctgcttgagaagttcattcgcttcttgaatcataatgcctacaccgtggtggctatcgaatccattaacttctgccccgctgctggcattgtaagtctgctatcccataaatgttgaatgtttgaaatttataaatttttatttctttctaggcttggaatgccatggccacgaatgtcctgcaagtggccaccattaacagtgtgggcgacttcattctcttcctgggaaaggttgtggtggccgcgctctctggcctgattggtatcgttttgctcaaggataagcccggtctgaatttctacatggctcccgtcataatcatcatcatattctccttctttattgctcacattatcctctcgctttttgaggtaggtattcctttacaatacgaccaagcttatggctaacctatgactcgttaatagatggtagtggataccttattcctctgtgtctgcgaggataagaccctgaatggtcgctctggtcgttgggcacagagtaacttggccaagctggtaggcgaggaaccgctgcagcctggcgaggagccgcccatcgaagttgttcaaatgatgcccatcaacaagcagccatttagtattacccgactccctcagtccgatcccgaggtagctcccatgtcggcggattagttctaagacgcagctagatgctttcgcttttgtattccaagcgcagaaccccccgaaactcaacgcacatctcattaggatgttaatatttatatacataccattactccgtcgcgacgtacaaagcagaacagtgggactaataataactggtaatcttgtctattgatatattcaaacttaggatgcacagtttgtaaacgtatttataaagtttaatcgtttttgtatcttaatgtaaaatgaggtgtttaaacctttttcacgcgtttaatggttcttgccttctttctttcaatcacatctttcacggcctgcagttgtttctccttgatcttcttggtcagcgccgatttgggtgtctgtttggcggcttcctccttcttctttttggctatcgcagccagtatcttggccgtctccacgggatcatcgtcctcgaatagctcatcgttatccatgccatcgtaggctctaataggtcgcgtggcctcgtgcttgaccttttgctccactcggttcacgtacttatccttggcagccttcttaagtacctgccgctgtttggatggactcacgtagtccggattctcccaaatggttttgccagtgaaggaaccatcgaatatttttacaggattcatcacgtaacgcggcccgacttcggacaaaccgccatcttcggatagaatctggaaatttctgaaccagatgcgtttgtccaggtaggtgaaggtgaaaacgtgatcgacgaagggctggctcttgggatgatggttgggcacggagtaggtctgcacgaacagctccttgagcagcttaaggtgcggcagctcgtcgaatttggagtcaaacgagagcagcggacgtgatccccgcaagcagtttcccgtcatcttcagttcggccattgtatgaatgttttcgatgaggaatttagcggatggaccagtcgatcccgaggtgttggatatccacatgtacagatcccttttccggc

SEQ ID NO: 830 - DNA, 2226 bp, DROSOPHILA
aggatttaggcgttgttgttgtttcgtcggttgtgaattgaatcaaaatagaacaaacaagttgctcaacatactgaaggaatagatataagtacaaagtgataagaggaagtaagcccgctaattatcgagcagcttaacaagtgcaaaatgggctgtgcggagagcaaggacggcgagggggaggcgcaaaacaataggcccaaataccggtcctgcacggacacctgctggctggccatttacattatattctggctgtttttgatagtgattgccatcttttcgttcgtttatggaaatcccctgcgcatcatcaatggctacgattcctttggcaacacctgtggcgttaagtacaatgaaaagttccagggattcccgctgtccggcatgaatacactcgacaagccggagctcttctatttcgatgtcaaggagctgaaaaagtccctcaagatatgcgttaagtcatgtcccgccaaaactatgaccaagggcagcgagctgctggaatactacagccaaacgggcacacagctctgcaaatacgactacaacatgcagcagctgactacggcgggcaacgatgccaaaacgttcaatttcctgggcccatgtcccagttttcccgttcatgagagttcgcctgtcctacatcgctgtgtgcccaagggtacgggcgagaaggttcagaactactacgacatgctcaacaactgggatgtggcccagcagttcgttggcgatatctactccacctggcacatcattgccatggtctgtggattagctttgctcatttccattgctctggtaaccatgatgcactggctgtctcgcatcgtctcctggatcatctgtgttttggtcatagtggccagtgtggcgcttactgttgctctgtggtatgcctactacaacatacgcaataagtctggcgttaacacacagtactctatgctggaggagtttgtgcgcaaccaacaggcagtcttaaccctggccgttctggccaccataaccatgataatccttattgtggtcatatacttcttgaagaacaaattggctggcttatctgcgcttttcgaagaagctggccagtgcatgatgaatctcccaggtcttttgatcgctccgctcttggccttccttgtgcttatagccttcttaagcttttgggtcgcagtgatcatttgcctggccactgccagttcacctggacaaagtcccattgctccgttcgacaactcgaaggcccatcaacagcctttgccagcaaatgcattgttcgtttccaatagcaccgacgtcaatgatttaagaccaaatgcccgtgtagaatatgccgatgccggagttcttcgcagcatgttctggatctatgtggtgggtcttatatggacagtggagtttattttcgcatgccagcagtttgcattggccgcagccgtggccttctggtacttccaaaaaccgaccagcacgcccacgttttacgccattggcaaactggttaagtatcatttgggtacggtggccaagggatcctttgtcatcactattttcaagattccccgcctgatactcacttatttgtacgccaaattaaaaaaaggcgaggacaagggatcggagtgtgccgcctgctgtttgaagtgctgcatttgtggtttctggctgcttgagaagttcattcgcttcttgaatcataatgcctacaccgtggtggctatcgaatccattaacttctgccccgctgctggcattgcttggaatgccatggccacgaatgtcctgcaagtggccaccattaacagtgtgggcgacttcattctcttcctgggaaaggttgtggtggccgcgctctctggcctgattggtatcgttttgctcaaggataagcccggtctgaatttctacatggctcccgtcataatcatcatcatattctccttctttattgctcacattatcctctcgctttttgagatggtagtggataccttattcctctgtgtctgcgaggataagaccctgaatggtcgctctggtcgttgggcacagagtaacttggccaagctggtaggcgaggaaccgctgcagcctggcgaggagccgcccatcgaagttgttcaaatgatgcccatcaacaagcagccatttagtattacccgactccctcagtccgatcccgaggtagctcccatgtcggcggattag

SEQ ID NO: 831 - protein, 691 aa, DROSOPHILA
MGCAESKDGEGEAQNNRPKYRSCTDTCWLAIYIIFWLFLIVIAIFSFVYGNPLRIINGYDSFGNTCGVKYNEKFQGFPLSGMNTLDKPELFYFDVKELKKSLKICVKSCPAKTMTKGSELLEYYSQTGTQLCKYDYNMQQLTTAGNDAKTFNFLGPCPSFPVHESSPVLHRCVPKGTGEKVQNYYDMLNNWDVAQQFVGDIYSTWHIIAMVCGLALLISIALVTMMHWLSRIVSWIICVLVIVASVALTVALWYAYYNIRNKSGVNTQYSMLEEFVRNQQAVLTLAVLATITMIILIVVIYFLKNKLAGLSALFEEAGQCMMNLPGLLIAPLLAFLVLIAFLSFWVAVIICLATASSPGQSPIAPFDNSKAHQQPLPANALFVSNSTDVNDLRPNARVEYADAGVLRSMFWIYVVGLIWTVEFIFACQQFALAAAVAFWYFQKPTSTPTFYAIGKLVKYHLGTVAKGSFVITIFKIPRLILTYLYAKLKKGEDKGSECAACCLKCCICGFWLLEKFIRFLNHNAYTVVAIESINFCPAAGIAWNAMATNVLQVATINSVGDFILFLGKVVVAALSGLIGIVLLKDKPGLNFYMAPVIIIIIFSFFIAHIILSLFEMVVDTLFLCVCEDKTLNGRSGRWAQSNLAKLVGEEPLQPGEEPPIEVVQMMPINKQPFSITRLPQSDPEVAPMSAD

SEQ ID NO: 832 - DNA, 4032 bp, DROSOPHILA
agtccgtaattttaaatcaaaaactagaaaaatgtaggtaaaatattttttaacggtttcttttattttcgttaagctaaataaacttttaaattttcataatctataaattaatttgaaattacaattagcatgacgtatagcatccgataattagcctctagctgctgacaagggattttcaatcatcttcatcttcaagtccgggttcaggacatagtcgacatctgctctcatttacgccgtaattcatgcaaagttctcccacgcactcgcaacatccgtcatgaaaccacctgtagctggtggctccggttttcaggcaggtctgtcgacacttattccaggatgtgcactgatccagatacaaaacggtgcaatttagaccagatcctggttttccattcgttgaaaacgagaccacgctccaattgtatgtgtatccatcgtttggagatgaggacatggccctgaacaaggctggcattccttcgaattcctcggtgtgcgatttctttcgcatttgtgccatgttagcgaggcctaactctccaaaggatagcaaaatgtagatagtcagaagtgttttcatattgatttggaatatgcaactgaagtgttggcgcacttacaaacggtttttaaataagaatatagtacaggtagtaggtggtataatgtttcaggtagaaaatcactcaccagctgccactaagggctttatctatttttataactattacctaaatgcccgcaatggccctttttgctgacttattattggaaattaatactttaatccatgcaacgcagttgggatctttaacattccgagctgttagaaattactttatgaaatatggatttttaaatgtattttatgcggttatagtgtaagaaccagttcaatcaaaggaaccacagcgtacacagccatcgaaacagtttagacgtatatcgatcagttcacatctctatcttgtctgtatacggctgtgtgtcaaagcggcaaaagcgagaaaagtcgaagtgcaaataattttaacggagcggaaaaaatatagataaatcagaaccatgtcggactatagatcgcaatcgcgcagtggcgggggacgtggcggtcaggagtactcgaacgacgacgatccgccgatgtcgcgtctcttcatcatttgcaacaaggcgcacaccgaggaggatttccgtgaagccttctcgccatacggcgaaatcgaggatatctgggtggtgaaggacaagcacacccaggagaacaagggaatcgcgtacgtcaagttctccaagacatccgatgctgccaaggcacaggaggagatgaacggcaagaccattggcaagatggatcgcacccttaaagtcctggtggcagccaagtaagattagcttcgagagtactggcccaaaaccatggtctaactcttatcctcctcttccagtcgcaatcagggctcaaataagtctgagaacgagcaggagaagtacgtgagactcttcatagtgatccccaaaacagccaccgaggaggatattcgcgaggaattctcgcagtggggcgatgtggaatctgtcacaattgtcaaggagaagaacaatggcaatcccaagggcttcggatatgtccgctttaccaagtgcgtggcgaatgtagcattgctaattgtcctagccataactaatctaatctcaatgcacaggttttactatgcagctgtggctttcgaaaactgctccgccaagtataaagctgtctttgccgagccaaagggttctacacgcacacagcgtgaccagtacggccgtccctccgaggacaatcccttgtatagcagctcgggacgtggcaattccaatttcaatggaggcggtagcagcagcggtggcggcggcagcaacagctacaacaacgactggaatgtatcgcagaacaacgacatggcggccttcctgcgcatgcagaatgtgccagtggcccagccatcctgtctggaggttaacgtgagcaactgcgtcaaccaggatcagctctggcgtctcttcgacataattcccggcttggattactgccaaatcatgcgcgaacgtaagtgaccaacccagtgtgggtttcaaaccccttttgaactacttatatctccgttgtagatggaccgcgcaccaatgaggccttagtggtgtacgacaacccagaagccgccatttatgccaagtaaacaaagccctaaaactcattttcatgcaggctttaaaacactattcttctttagggacaaacttcatggcctggagtacccaatgggcgaacgcatcattgtcaaagtcaatggaatgagctcagctcgcatggacacatccttcatagacagtacgcgagttaaacctatcaagggctacaggccgcgccatcacctgtagccatttattaaacgcttttgcttggtttatttcttagcacatttttggcttaaaatgcatgatatttcctatttctagacttaatgtggttttttattttagagcgaaccaaaaaggatgccatctgcaatgttcccttgcccccaactcagccactggcatcgccggacgaccaggtggcccaacgactgttcattgtgctctcagcggtaggtatcactgtaccgtgtccaattaccattagctataaacgttgtttctttcccatctactcagaacttgccgcattcgatattgaagaacatattctcttgctggtcgggactgatcgacgtctaccttctgcccaacaagaactgtggctacgtcaagtatgcggaggttgagagtgctcaattggccattcgtaccctaaacggagccgaaatttgcggcaccaaaatcaaggtttgtaccgtgtactcatgttctgttgctgacaagcaagcaattctaatcaattttaaatttttatcttactttaggtcatggaggctgaggagcgaagtggctccgacggcgatgatggcggtcgcaagcgattgagacggaactgagtgtaagtagctagttgagtatgcataaattccgtatctattaatgtagccataattgaactgagtgtgtgccgtggtacgaggtaagtagctgtgcaaattccaaaccgaaaaccttttagcgatttaagacaatgtgcgcctgctgcacttgccctgtgcaccggttggccatcgatgtccacgatacccatgccgcccactgagcgcgaacataataagccaaaccatttttatctttctatctccacagacccactgacaaccaagaacttacagagaacgcaatgtacgaaaacgtaactaacttgagcatacagtccgataaaaacagttgaactgaccaccaaccaccaaacaacgcaacaaccaaccaataaccaaacaagaaccaccaccacaacaacactctccgtacggaatgccacatgaaccagaaccacggggactggagaacgcagactggaaacggaaactgcgaacgaagaccatacccgggtgaacaaaccaaacaggccaacgaaatcaccacacccgttgactactctctaccaattgactaactcaagtgggtctcgtacagagcactcgtagaaagacccataacccatacgacctttaaacggagccaacgaaaccgcaatgctcttgctatatacacaatatatgcatagtgtcgtatatatgtgtactcataccgcttaggggacttttgaatctacccgtgatacagaaacgaactctctgtgtaacttgaactcttacaaacttattccgacgagattcagccaagcaataaattcaaacgcaatgaatttcttaagagtatcaactctgtctcgtaaattcacgctaagccacagcgtgaaaaattattcttttcatatattagatttaaataaacgatattctactgtataaggccaacaataaatacacttaaatggaataatgttttttttttctttggaagcgaaatgggaaacaaattaattctcgc

SEQ ID NO: 833 - DNA, 1274 bp, DROSOPHILA
tcaaagcggcaaaagcgagaaaagtcgaagtgcaaataattttaacggagcggaaaaaatatagataaatcagaaccatgtcggactatagatcgcaatcgcgcagtggcgggggacgtggcggtcaggagtactcgaacgacgacgatccgccgatgtcgcgtctcttcatcatttgcaacaaggcgcacaccgaggaggatttccgtgaagccttctcgccatacggcgaaatcgaggatatctgggtggtgaaggacaagcacacccaggagaacaagggaatcgcgtacgtcaagttctccaagacatccgatgctgccaaggcacaggaggagatgaacggcaagaccattggcaagatggatcgcacccttaaagtcctggtggcagccaatcgcaatcagggctcaaataagtctgagaacgagcaggagaagtacgtgagactcttcatagtgatccccaaaacagccaccgaggaggatattcgcgaggaattctcgcagtggggcgatgtggaatctgtcacaattgtcaaggagaagaacaatggcaatcccaagggcttcggatatgtccgctttaccaagtgcgtggcgaataacaacgacatggcggccttcctgcgcatgcagaatgtgccagtggcccagccatcctgtctggaggttaacgtgagcaactgcgtcaaccaggatcagctctggcgtctcttcgacataattcccggcttggattactgccaaatcatgcgcgaacatggaccgcgcaccaatgaggccttagtggtgtacgacaacccagaagccgccatttatgccaaggacaaacttcatggcctggagtacccaatgggcgaacgcatcattgtcaaagtcaatggaatgagctcagctcgcatggacacatccttcatagacaagcgaaccaaaaaggatgccatctgcaatgttcccttgcccccaactcagccactggcatcgccggacgaccaggtggcccaacgactgttcattgtgctctcagcgaacttgccgcattcgatattgaagaacatattctcttgctggtcgggactgatcgacgtctaccttctgcccaacaagaactgtggctacgtcaagtatgcggaggttgagagtgctcaattggccattcgtaccctaaacggagccgaaatttgcggcaccaaaatcaaggtcatggaggctgaggagcgaagtggctccgacggcgatgatggcggtcgcaagcgattgagacggaactga

SEQ ID NO: 834 - protein, 398 aa, DROSOPHILA
MSDYRSQSRSGGGRGGQEYSNDDDPPMSRLFIICNKAHTEEDFREAFSPYGEIEDIWVVKDKHTQENKGIAYVKFSKTSDAAKAQEEMNGKTIGKMDRTLKVLVAANRNQGSNKSENEQEKYVRLFIVIPKTATEEDIREEFSQWGDVESVTIVKEKNNGNPKGFGYVRFTKCVANNNDMAAFLRMQNVPVAQPSCLEVNVSNCVNQDQLWRLFDIIPGLDYCQIMREHGPRTNEALVVYDNPEAAIYAKDKLHGLEYPMGERIIVKVNGMSSARMDTSFIDKRTKKDAICNVPLPPTQPLASPDDQVAQRLFIVLSANLPHSILKNIFSCWSGLIDVYLLPNKNCGYVKYAEVESAQLAIRTLNGAEICGTKIKVMEAEERSGSDGDDGGRKRLRRN

SEQ ID NO: 835 - DNA, 4562 bp, DROSOPHILA
tgtggcaggttattaaaccattattcctctattttagtggcttgctagcgaggctctgcacaacaatcccaaggtggaagccagtccatgtggcaccaagttcagtttcaagccagtctacaagatcaaggatggcaaaacgctgatgcgtctgctcaagcaacatgatttaaagggcctgggcggcattttgctggacgatgtccaggaatctctaccacactgcgaaaaggtgctgaagaaccgatcagccgaaatactttttgttgttagacccattgacaaaaagaagattttattttacaatgacaggactgctaatttttcggtgggttataaacacactcttctaaaatcccagcctaatcaattgtaccgtctcaggtggacgacgagttccagaagctatggcgctcggctacggtcgatgcaatggacgacgccaagattgacgagtacctcgagaagcagggcattcgctccatgcaggaccatggcctcaagaaagcaattcccaagcgcaagaaggcggccaacaagaagcggcagttcaagaagcccagagacaacgaacatttggccgacgttctggaggtctacgaggataacacactaacgctgaagggtgtgaacccaacgtagaatagagacattagattatacaaataaaaaccactctcaatggaattaagtacactcgaaactggatgttataaatttgtttaaccactgccaatctaattaagaatccgctgtggccgaaatctcattcctcaagatttatagtaccagattgctgttctgcctgtggcattgaacttaaaaatatgacgaccggcacagggaaagataattaaaaagcaaaactatgtaatcttttcctgacattccccattgctttccacacctgatggctggtggtgtgcgtgtacgagggccagaatcgatgctggtgggcagttaaattggcaacagagggaagccgtagctttagtctgcactgaacagcagccaagttcagttggaatcgatttggaataacctatattttggtacggcggttgtgcgggcttatcaggaaaattatctatatattggactctacaaatctaaaaaaagattgtgttgctatttgtaatctattaagattataacaagagatccgatattcagtatagacaaaaatatagctcatacgactcgtaaatcagtcatattgcaaactatcgttcgtcctctaacttgttcaatttaaaagatagggtattcataagtggacttgcatgaaatccgattctttgtttacttggcttgactctttggcacggacaatgagctctctactcggcggcaaaaacttgttttgaaatactcaatttgtttaattatcattcccgaagcattcgccagttggttttgagagtttctgtgctgaggttgacgaaatgaagtcgacgcggactgcacttggagtggccctgctcctggccctggtgtctcaactggcggcccacagctcggagtgagtaaatcaaacctcgtatgctatatagattaggtcactgactttctctttgacttgattcccgcatccagtgacttggtttacggctacgagtgccgcagtggctactgccagaaggtagagctcagcgaggagaactacgtcaaggccatcagtctgcccgtgtgccggctcttctgcggcagctccatcggcaccttgtggcccaaaccgacgggcactgtgcgtctggacacgttgatgcgccaagtggacatctccttcattgatttcaatttcaatggaattgcccgccagcagaagctatggcgagcggttgaagaccgtttcatgaacatgctcgaagcccagattccggatcgcaaggttctggcacgaggtggctaccgtatgtctgtgaacatcaatactccggatgagccgacaccggccagactcaccctggatacggatgagagctatacgctggacattgatacggatgcctcgggtcatgtgctggccaacataaccgcgtccaacttctttggagcccgtcatggcctggagacactagcccagttgattgtctacgatgacatccgccgcgaggttcaggtgactgccaatgccaccatcaacgatgctcccgtgtacaaatggcgtggattgctcctggacacctcccgtaactactactctgtgaagtccatcaagaggacgttgggtaaggcaatggttcaggaaagaggcaggggagggttatgttttccgttgactctatgagtatccttttttcctccttagagggcatggccttggtcaaactgaacaccttccactggcacatcacggactcgcacagcttcccattggaggtgaagaagcgtccggagctgcacaagctgggagcctattcccaacggcaggtgtacacccgtcgggacgtggccgaggttgtggagtacggccgcgtgcgaggcatccgtgttatgccagagttcgatgcccctgcccatgtgggtgagggctggcagcacaagaacatgaccgcctgcttcaatgcccagccatggaagtcgttctgcgttgagccaccgtgtggccaactcgatcccactgtgaacgaaatgtacgatgtgctggaggacatttacggcaccatgttcgatcagttcaacccggatatcttccacatgggcggcgatgaagtgtcaaccagctgctggaacagcagccagcccatccagcagtggatgaagaaacagggttggggcctggagaccgccgactttatgcgcttgtggggacacttccagacggaggctcttggtcgcgtggacaaggtggccaatggtacgcacacgcccatcattctgtggactagtggactcactgaggagcccttcattgacgagtatctgaacccagagcgttacatcattcagatctggaccactggtgtagatccgaaggtaaagaagattctggagcggggctacaagatcattgtgtccaactacgatgccctgtacttggattgcggcggagctggctgggtgaccgatggaaacaactggtgctccccctacattggctggcagaaggtgtacgacaatagtttgaaatccattgccggcgactacgagcatcatgtattgggcgcggagggagccatttggtcagagcagatcgacgagcacacactggacaaccgcttctggcccagggccagtgccctggccgaacgactttggtcaaatcctgccgaaggttggcgccaggcggagtcacgtctgctgctccaccgccagcgactggtggacaatggtctgggcgcagaggccatgcagccgcagtggtgcctgcaaaacgagcacgagtgtcccattgacgcgtacgatgcacaagtttgaccagctattaaaccatttctcttaacggtcgctatccttgtagatgtagtcggggcagcgggcggcttgggttgatcgtcctgttgcttctcacaacgctctctgcctgaaaataaagtacagctcaaaggtggccttacgcaagtgacttgtcgtttattttgttaaatataaatgagattattggccctgctctgcgcccttttccgattcaaagcggcagaatgtcggaaatagtgagggaaatccgtacagactcgacgattttttcgaatatgaacagtagcagagttggacattttacgcttcaatgtgtggggtgaggatttgcgagtgatggtgtcctcggcctcaagcataaactccttggactcctgattatgtacgtaatgagtctagatactaaaagctgcgttcccttgtgcaataatttgaatggaagctttactcattccactcttcctcgttgcgtccaaacttgtagaccaaactggcgaacaggatgaagacgttttgcatcagcagagccacgccaaaccagccatccttcttttctgaaaaacgataagtgggtgcaattcagctaaggaatccttaaatatctgtttatttctcaccattgttgatgaagtcgtcgatcatcacccagatggcggcaatgatggaggcaaaacccattaggaagcccacaagcagccagatcttcgctatcctggcgccggactccgatgagttctcatcagaaatctgcgcacaaacaaaagaagtgagtcacttgttaagcccaatgataagtgtgtgttacatgttctcccttcactgcgttcaccatgcagaagctgatggtcccgaagatgccgatgaagacgtgtcctgtggtaatctggtgcttgccgtcgatggacatggcatcgattagaacccaccatcctgcgaaaaactaaggagaaaaagttgcactgtcaggcgggcggctctttgtttgcgggtgttagcctaccagaagtccggctattatggaggtgttcctgttcctggacgcatcccccgtgaaatgcaacgcaatattgtccaacacgcccattgtttaggttttaaaacgtaattaaatttattccactcttaaatcttcttgttttgac

SEQ ID NO: 836 - DNA, 1998 bp, DROSOPHILA
ctgaacagcagccaagttcagttggaatcgatttggaataacctatattttgcattcgccagttggttttgagagtttctgtgctgaggttgacgaaatgaagtcgacgcggactgcacttggagtggccctgctcctggccctggtgtctcaactggcggcccacagctcggatgacttggtttacggctacgagtgccgcagtggctactgccagaaggtagagctcagcgaggagaactacgtcaaggccatcagtctgcccgtgtgccggctcttctgcggcagctccatcggcaccttgtggcccaaaccgacgggcactgtgcgtctggacacgttgatgcgccaagtggacatctccttcattgatttcaatttcaatggaattgcccgccagcagaagctatggcgagcggttgaagaccgtttcatgaacatgctcgaagcccagattccggatcgcaaggttctggcacgaggtggctaccgtatgtctgtgaacatcaatactccggatgagccgacaccggccagactcaccctggatacggatgagagctatacgctggacattgatacggatgcctcgggtcatgtgctggccaacataaccgcgtccaacttctttggagcccgtcatggcctggagacactagcccagttgattgtctacgatgacatccgccgcgaggttcaggtgactgccaatgccaccatcaacgatgctcccgtgtacaaatggcgtggattgctcctggacacctcccgtaactactactctgtgaagtccatcaagaggacgttggagggcatggccttggtcaaactgaacaccttccactggcacatcacggactcgcacagcttcccattggaggtgaagaagcgtccggagctgcacaagctgggagcctattcccaacggcaggtgtacacccgtcgggacgtggccgaggttgtggagtacggccgcgtgcgaggcatccgtgttatgccagagttcgatgcccctgcccatgtgggtgagggctggcagcacaagaacatgaccgcctgcttcaatgcccagccatggaagtcgttctgcgttgagccaccgtgtggccaactcgatcccactgtgaacgaaatgtacgatgtgctggaggacatttacggcaccatgttcgatcagttcaacccggatatcttccacatgggcggcgatgaagtgtcaaccagctgctggaacagcagccagcccatccagcagtggatgaagaaacagggttggggcctggagaccgccgactttatgcgcttgtggggacacttccagacggaggctcttggtcgcgtggacaaggtggccaatggtacgcacacgcccatcattctgtggactagtggactcactgaggagcccttcattgacgagtatctgaacccagagcgttacatcattcagatctggaccactggtgtagatccgaaggtaaagaagattctggagcggggctacaagatcattgtgtccaactacgatgccctgtacttggattgcggcggagctggctgggtgaccgatggaaacaactggtgctccccctacattggctggcagaaggtgtacgacaatagtttgaaatccattgccggcgactacgagcatcatgtattgggcgcggagggagccatttggtcagagcagatcgacgagcacacactggacaaccgcttctggcccagggccagtgccctggccgaacgactttggtcaaatcctgccgaaggttggcgccaggcggagtcacgtctgctgctccaccgccagcgactggtggacaatggtctgggcgcagaggccatgcagccgcagtggtgcctgcaaaacgagcacgagtgtcccattgacgcatgtagtcggggcagcgggcggcttgggttgatcgtcctgttgcttctcacaacgctctctgcctgaaaataaagtacagctcaaaggtggccttacgc

SEQ ID NO: 837 - protein, 622 aa, DROSOPHILA
MKSTRTALGVALLLALVSQLAAHSSDDLVYGYECRSGYCQKVELSEENYVKAISLPVCRLFCGSSIGTLWPKPTGTVRLDTLMRQVDISFIDFNFNGIARQQKLWRAVEDRFMNMLEAQIPDRKVLARGGYRMSVNINTPDEPTPARLTLDTDESYTLDIDTDASGHVLANITASNFFGARHGLETLAQLIVYDDIRREVQVTANATINDAPVYKWRGLLLDTSRNYYSVKSIKRTLEGMALVKLNTFHWHITDSHSFPLEVKKRPELHKLGAYSQRQVYTRRDVAEVVEYGRVRGIRVMPEFDAPAHVGEGWQHKNMTACFNAQPWKSFCVEPPCGQLDPTVNEMYDVLEDIYGTMFDQFNPDIFHMGGDEVSTSCWNSSQPIQQWMKKQGWGLETADFMRLWGHFQTEALGRVDKVANGTHTPIILWTSGLTEEPFIDEYLNPERYIIQIWTTGVDPKVKKILERGYKIIVSNYDALYLDCGGAGWVTDGNNWCSPYIGWQKVYDNSLKSIAGDYEHHVLGAEGAIWSEQIDEHTLDNRFWPRASALAERLWSNPAEGWRQAESRLLLHRQRLVDNGLGAEAMQPQWCLQNEHECPIDACSRGSGRLGLIVLLLLTTLSA

SEQ ID NO: 838 - DNA, 2530 bp, DROSOPHILA
ggtgcaattcagctaaggaatccttaaatatctgtttatttctcaccattgttgatgaagtcgtcgatcatcacccagatggcggcaatgatggaggcaaaacccattaggaagcccacaagcagccagatcttcgctatcctggcgccggactccgatgagttctcatcagaaatctgcgcacaaacaaaagaagtgagtcacttgttaagcccaatgataagtgtgtgttacatgttctcccttcactgcgttcaccatgcagaagctgatggtcccgaagatgccgatgaagacgtgtcctgtggtaatctggtgcttgccgtcgatggacatggcatcgattagaacccaccatcctgcgaaaaactaaggagaaaaagttgcactgtcaggcgggcggctctttgtttgcgggtgttagcctaccagaagtccggctattatggaggtgttcctgttcctggacgcatcccccgtgaaatgcaacgcaatattgtccaacacgcccattgtttaggttttaaaacgtaattaaatttattccactcttaaatcttcttgttttgacgcacagggttgtctgtctgcaggtgaatacagggtttcttcactcgctgtagcaaccctgtttcagtatttagtgtgttcacacctgaactgcagcagtaacatatactttttgtgtaacacaaattaactccgttataaaaagaaagttgctgttaattaaatattttgtgcaataatttgtgcaaacatttaaatgtttaactttaaaattactgcttatgcagtttgttgttgttttttagtacgttaaaggcacgacgtctttttcagaaagtccaatacggtcacacacaacttcacgtttaacaaaatttaattgatttccttattatttaacaaccgatcgcagcgacacgagtgggtgcgtgttgtcagttatagtaagagattgcaaaggaatcctaaccagaatgctagtcataaactcatgcagagctgcctccagattggcgctacgcagcctcaatttgcgatcgccgatcgcaacgcgtactttctcgacgggattggccctgaaaacgaaagatgtgtgagtatcttctccaccccacgagcactacaatggtagctccacaccgccagagcagcgtaaacattgaccaatctcgctattgcagtgttaacataaccttcgtgcgtgccaatggggacaagattaagacgtccggaaaagtgggtgactccctgctggacgtggtggtcaacaacaatgtggatctggatggtttcggggcctgtgagggcacgctgacctgctccacctgccacctgatcttcaagaccagcgatttcgagaaactgcccgacaaacccggtgatgaggagctggacatgctggatttggcgtacgaactgacggacacctcgcggctgggctgccagatcaccctgtccaaggatatggagggcctggaggtacatgtgccctccaccatcaatgacgcacgtgccgcgtagatagacaccaccactgttatcaattgttacaaatttgagtgctaattcgctttagttcaacctagatgtagtcaatatttttgaacgaaatcgtatgtattgtcccagggacacaaacctcaggcggctataatggatgcgcgcattaatccgattccagttgcggattagcgtccgctgttgtttttaaagtgtttaagctcaaagggattagatcaatatgtaaataagtgtgttgcaataaatttacatgtattttcgtacttctcttggttttattgaaactgtggaggaaagcatccagcgtagatatcatttttaaccaataattcatttgcctttttaattctattggcaaaactagccgattttaaatcggtcattcttgttttttaaatatctcagctaaaaagtgtttttctgcgtgtattcatgatctcgaagttgtgctcggcaaataaacaggcacacgcaaagattttcctcggcatcatagttctaataaaagtgtgtagtatacttttgaacacaggtttatgatcattagttagcaaattcaagatgatcgtattttatattcctatttgcctcgcttgtatgacaatgcgaaccatattattctttattctattcattcgttttgccaaacttgttttgtttataccaaaacttccagtcacggccaacacaagggctgttatcaaagccccccacacaaacatttcatcacactgataaagtttgcattagctttgtttgcgtttccttatcagtcgttcccaagctccgataatcagaggtactattagaacgcattaaaacacttgtcgcttaataaaagtaaactttttattatttcgcagctatcaaataaagtaataaataaataatttaatatatacatttgctatattaacttattgtaaacgattttctgcctttccatgtttgccgcttcattacttcgtttgtgtttattttctcgatattattaacttgc

SEQ ID NO: 839 - DNA, 477 bp, DROSOPHILA
atgcagagctgcctccagattggcgctacgcagcctcaatttgcgatcgccgatcgcaacgcgtactttctcgacgggattggccctgaaaacgaaagatgtgtgagtatcttctccaccccacgagcactacaatgtgttaacataaccttcgtgcgtgccaatggggacaagattaagacgtccggaaaagtgggtgactccctgctggacgtggtggtcaacaacaatgtggatctggatggtttcggggcctgtgagggcacgctgacctgctccacctgccacctgatcttcaagaccagcgatttcgagaaactgcccgacaaacccggtgatgaggagctggacatgctggatttggcgtacgaactgacggacacctcgcggctgggctgccagatcaccctgtccaaggatatggagggcctggaggtacatgtgccctccaccatcaatgacgcacgtgccgcgtag

SEQ ID NO: 840 - protein, 158 aa, DROSOPHILA
MQSCLQIGATQPQFAIADRNAYFLDGIGPENERCVSIFSTPRALQCVNITFVRANGDKIKTSGKVGDSLLDVVVNNNVDLDGFGACEGTLTCSTCHLIFKTSDFEKLPDKPGDEELDMLDLAYELTDTSRLGCQITLSKDMEGLEVHVPSTINDARAA

SEQ ID NO: 841 - DNA, 17763 bp, DROSOPHILA
tcacacgtttcagcaagcagataaataataccaccaagctcgatagaagttcatataattttttcacggtgcatttttgcaatcccctttccgcaaagagcttgcagctcgaagtcagactccttatgatgtcgcatcaaatcattagatatcgggtcttcgtagggttgtcgctgtcgttttcgttgtcactcggattgtgctttctcctcctttctcctttctccgttcttagttcccctttctccgtctcgttgtcgctttccttgtcattcgcgagcgtgcgagaaataaatacgaatatgtaaatagtttgcccaaatgcacagtggacccaagctgttatttttttattccgaaatttaactaatatataatatttctcgaaaacaatgtaccaactgccaacattaaataaatgcgagaaagactaactactacagtataggtgcactatgtcaaagaagtgatattcattgacattggctaaaattaaatgttttgaaattcaattatgttccaagtataattgagtatgcttaggattttgtcccaccatcctaaccaatgttttgatgccttaaaccgaaaaaggggtgggcattcgaatataagtggaaagggtgtgctcaggccttttgttttaggctttgggcctggccgcagattgttgcaactactattgttgtttatggccggcgagtgcagctcctggtgtttctctacagccgctccctccgcaccacaccattttcagactctgttcccccacccgcgactgggcccccgcttttcccaccggaagtatgcgtgcctcgcgagcagggaacgcgttgctgcctcccaaaaattgttggcagcacagagatctgctctctggcttttccccgctctctgtcactgtctggatttccctctcattctccctctgtctcgctgtctctctgcctgtcagctgtgggcaggccattttccgagtggcttttcttggccagtgcccgccagtgtctgttgcgttggcaaagtgaacgtgcgcgtcttttttcctgctcctgctgctccaaaatccgcagtttctccgcctgaactgatctcgaagaaaagcacggacaaaaaaaaaacctgaaaccggggaaaagccgtattccgatttcttttccgtaaacgcaaacccatcgaagttttttttttaccagtgagcgatcgaaaaatgtgaggttgaggtgcacagagtcacccagagtcatataagcttcgaccatgtcggacacgtgacccgcgcttatgccgcgcgatgaaaccgataacacgagctgactaagccgattaggccgatagcaacgatagcgtcgatagcccaaatcaaacgacgagtgtgagaattaaattcgcgcaactagtgtgcaaacaaacaccgagcgttttctatattttcacaacacccacgaaagatcattgactgcaatgcgggatcataacatatagtaggaagccacatgcccacagaatcagaaattatatttatatatacacgtatatatagtattgtaggggctgtgtgcaggccaccgcttgatcataattaactcttacaaagtaaataaaccaactgcgaattcgggggccatgtgttgcccccgaaaccgaaaaccaaaaaccgaaaacaaacaggcgatccacaaatttttacaattaacattcgacacgattgtccaaaaaccaaaatggaaaccgaaaaaaccaaaatacaaattttatttttcattttatttttatattttatgtgagtttgttgtcgtcttatcattcgcacataattgggcatgaaacataaagtttgagtaacttttagagtaacttttgctttaattttgttaagtatttactttcttgcatcaaactgattgaagccggaaattgaatgggtttgaatagcttgatcgtttgtgtctaaatttaatacgaatttattgtatcggataacgtctaaatttaatcaaaaagttgttaaactttttatacagtctagtttctcatcgtttacaattccaatgttaaagtccgttttaatactttaacggaagacaaattaaagtaaagtaaagtaaagtttttttttttaaatataaaaaatatgaaggcagccgtttagatataaatattcaaaaattcgatggaaaagttctgccagttttactgatctccctgtaggcattttgtaaaaataaaaaaataagaattattgaaatcatggatttttgataaccttaatcggtcgcatataggaatttggtgttgggaaagcgtaagacagggattttcattgtctttctactgacaaccacattaagacccatcacctgcacataaatgtattacaagttttgaaacattttcccaaatcgaacttctttggccacctcaaccatattgactctgaaaacattgaaataaaatcagtttcatttcggattttgatgccagtggacttcaaagtgtgctggccgcttttgatcgggggaatatatgtttttgttagcattctccactggttgcattcgaaagtgaactcaaatcgagccgatcggctgttgttcaattttacgagtaccatatcccggcggaaaatattcttccaccgtattttatttttgtttctttgtttttggacgagggaaaatcccaattagtcacctttctaaattcttggaatgtcgtatctcgctttcatactttgtccacattataataatgagcacgcgctgtggggaaaaacagatgagaagtcaccgattttgggtagtccctgaattttatctccgatccctccattatcttgcagcatttctggcatatttcacaacgccgagcaacgaaatagtttcgttgaaatgtcaagtgcaggcaggaagcccaaacaggtcgatggggagatatctgttgtgtgttttataaacaaatcggagatcggcctgaactctgctggattacgaaatagattaacgatgctctcgccttgggctatatcccccgatccgattcgatctgatacgatccggggcgaattcttagactgccgctggtcagccttcgcctttgactttgctggccacgtgtgcgtatacgcaattttcacggtgtgtgcgtggacttttcttttttgagtacacagaagaaaatatagttctagtctagtgctaaatgcagaaacaatattttacaagaacgttttcttctaattagatattaaactattaatctaatatggttgctatgtgtccactaatattttacacatgattttattgatatttaataaacaaactttcaatttggtcaaaactaattttcttttgtgtactcaaattaatttttcgcttttagctttttgctatcgctgttgttttgattttattatcggctgctcggcgggaaagtttgtttataaacattgcaattttaaaatttacagttcatttggaaacagttgttctccagtttttggtcttccatttttcccctacgtcagtcagcataagtttattaacatatgtgaaggagggggtgatgccacattttatttatattctcgaatagttttttatttgttttgtttctttgcgcaatttgcaatggtatttaagcataaaaaaattattttaataccgagaaaagtgctagcacttgatttcctatatagtctagtttccttcgtgttgttttagactaaaatacacaatataataatattaaacgtgagccaaaaataaatatgttagtaaagaatgaggaggtaaaaatgttcgtttttcattcagaaaaaaagttatcttttcacaatgattgatcaatgggcatgtgtacaacaatgaggaaagcacatgtgatttcataaaatagtgtttccgctaataaacttaaaaattcgttatgctaaatttcaagcaggcgagagatcttgaaaagtcccataatgcatgcagtgagctttgtgaaaatatagaagtgaaagcgcgaaaaattgtgaaatcaaaattgttcatctcattgtcagcagtaaccattaaaaaaaagaccaagctcagataaatcacaaaaaagtgccaatgtaaaacagcgggttgagaataccagagagcggaggaacggacccgaagatgcccagctctgcgacagtcacatccactacaacgaacacgccgcaacccgaagaattggaaagccatccgcgccacctgcagcacctgcaccaccctcatcaccggaactaccagcaaccgcgcttccggttccggttcgagtcccgattaaccgatgcgtcgataatgggcctgccgcgcaaaagaaagcacagccaggattcggtagctcaatcgatcggtagccacacgatactctgatattttgacactgatactatcgatacgcaacgcgaaccaatcgataacaaacgataaaagcaagaagggaggctagagagaatcatcgccgatcttgccagctttcgctgacgacaaaccatgttagatatatttcgtggattgaaaaaccttgtaaaggtcagtcacgttaaaacagattcgatagtattccgcctgcattactcaataactgtgatgattctgatgtcattctcgctaattataaccacgcgccagtacgttggcaatccgatcgattgtgtgcacaccaaagatattccagaggatgtgctcaacacttactgctggatccagtccacctacacgctcaagagcctcttcctgaagaagcagggcgtgtcggttccatatccgggcatcggcaactccgacggtgatccggcggacaagaagcactacaagtactaccagtgggtctgcttctgcctcttctttcaggtataagaaggttgtgtctccggaccacttgaaacattaattaatttcaaaatatcgacaccgatagtcgttgtcgaatcattggtaccaagctaacaaattttcatccacgataaatttgtatttaatttactttccaataactatcactttgatataaacgtgtaaatgggaatagctcaaactgacagtattaagtcacttctgcatcatttaaagcatcacagttgaaagcgttttcaagaaattaaagtgtcaagcgaataagggaatctattggccaacggtaattaagcatctctgttttttaacgcaatattaattaaaattcgacgccatagctcatcctcttaaaaggctacgcctgcgcagcgattaagccagaaaaagtctactgagaaatcagccatttatcagtggttcgttatgtttgggggcgttgaatgatttgatggattaagtaattaagcgatttctcgccgactgagcgcaccattgggatctatacatacttttcaatatccaaatatttgttccacttatttccgattttcttttttttattttgttttgcggttttggccttttgtgagccaaatgaaattgtttaagtatttcgtgcgtgttttgttattgttgctgctgaatgggctggccttgtatcgctgcgagtatcccaaagatagttcgatctatgacgtaggggatgtcaggcagagacggggatactgggcgaaaaagagagggggatagagagagaaagcgacaatctaaagatattataataagaagatgcgtaacggccgtgtatgcactactggctgaatgataccttattgtggccaaaataaataacttcaaagcggagacagatatttttttttttgtgttttttgtattgggttacacaagctcatatcataattttgggagtggcaccatcccttacacattattatacccgttactcgtagattgaaagggtatactagatttgttgaaaagtatgtaacaggcagaagtaagcgtttccgactatataaagtatatatattcttgatcaggatcaatatccgagtcaatccagccgtctgtccgtatgaacaccgagatctcaggatctataaaagctagaagggtgagactcagcatttagaaagtagagacaaagacatagcacaagtttgttgaccaatgttgccatgcccacaaaccgcacaaaacttccacgtccatgttttgaaccatttttcgatatttttttaaaattttattagtcttctaaattctatcgatttgccaaaacatttttgccacgcccactcgtatgccctaaagccgacaaaccggtcacgcccacactttaaaacaacattttaattttttctcatattattccccaatatctatcgatatcccagaaaaatgatgaaatttcgcactcgcattcacactagctgagtaacgggtatctgaaagtcgggaaactcgactatagcattattttttttgcattaacttacagtagacattatctatgagaatcccaaaaattttggtcgtggcaccgccccttaaatttaattaattcattttcgtatagggatttctctaatttcgtatgctctttctacatacatttcatatcataatcatacatatgattacatattaaataattttacaaataataaccacaaaaatattgaaacaattcagcaacagccttgtttaaccttgttttagctaagattactccaaatttgaaaaagtagggttaggtcctaaaaactaaaatttctccataaatattgcattcaaattaagaaaaatttaattacctacaacacagtatacatattatggtgaaactatgtgaaactcagtttataaacaaataaataaaaataaataaataaataaatataagtttttgtttaaacacctaaaagcgctatttacaacactcaattacagggacaaacataagaaattcaacagttcacaattacaaacacatagtataaaacagcacttttcgatcttattacatcccgtttatttggataagaacttttctttgtcccttttttattaacttaaaaccgattgtgtttcttgctaacaagcgcatgtaagcacgacactccgaaaagctgttttaaacagctgatatattgtattagccgtacgggacttttttaatatttctgttatgttacacttaagcccaatattatactatgtgtgcgtagtagatagatttttgggaccgaaatcaattttgatctaagaaacgaatttacaaatttggggttttggccaatttcgttatttgattttttgaggcacgacgtgcggtcataagcacctacgaatcgaagtctactagacaatgtccactctaatttttcacacgttgcaagctgaattattgaattattctaatatagtcatttttgaaatttattttgctagattcggctactactatttctgtgctatattcaaataattatagcgttaaggcaatgcaaaacaagaatttttacatggttcaaaaataatatagatttaaagtccaagaacttttaaaatgacgggcatattttgtcaaattttcaatgcatgagcatacgtgtgtacacatacagtagtcggctgttactgtatgcgtagaagagagctgctggctgtaaagctctccactctctggttcttgaacaagatgcgttacgcatctcataatctcataccctttattttaggaaaactttaacatcggaacgttttcctagcagaaggacctttacataatcaaatatcttaagaaaaacaccatatatgcacatatatgtacatacgaacattttgaaacgctagggaaagaaacttaatgaaactataaacgatactatcattgcgatagacatttcgctctagtcaatagatttgcaatcagtaggcgatgaaatctatgcattctatgcattcatagggcttcagcgaaccagtttccattcggaatcgacatcgaaaataagtgtacttgtgttctaagcatttatcataaagctgagcaatatgaaaattttcaagaaattacgcaatcgtatggttccttactgcatgtcggtgagattgaatcccaggaatagccggcatcgcgtgcagaatgcgtcagcaccacaaccttacaactctgttcaggatgaggctactcctggagaaatatttccgagaattgttgaagtttttgttaatggtgagtatactgctgaggctgaccctaacccggaagtagaagttgtgaccgaggtggaccctctggcagaagttgaagattgggccaaggctgaccctaatacagaggttgaagttttggccgaagctgaccctaatacagagtttgaagtttttgctgaggcttaccctaagattgaggatgagattgtagttatggaggaggctgactttaagacttatactaaggatgatgatatggctgatgctgaccctatgaccgaggttgaagtgatggccgtagctgaccctaatacggaagttgaagttttggtcgaagctaaccgtaaggcagagtttgaagttttcgctgaagctgaccctaaggttgaggatgagattgaagttatggagcaggctgagaatactgagaatgatgatatggcaagttagaagtgatggccgtgactgaccctaaggctgaggctgaagttttggctagggctgaccttaagacggatgttgaggatcaagtcatggcagagggtctggttgagtccctaacttccgtttttaaatgaaatgctgcttttgaaacatatgaagataacgaatttattgctttgaagtagcagacacttcaaaatcttcagacccaaagcgcaccattatcctagaaacacaccaaacgtaattactaaaatgttctacaagtccgcttgataataattccttgccacgtgatatattctcagactgttatcgttaattgctcacatcgcttaaaggagattgattgtatcattgatgccattgtcccccttccacattttccaccccacataatggagcaaatcggagacgttgccgcccatatggcgtatatgaatacatatatattgaatcgcatatgtatttataaagaggctatgcttacacaataagtcttaccactaacaatgtacaaatattaaatgtgtatttttatcacacttggtcgggcggggaaatcgggggagcttttctcggttagtgtcacagagcgattatagagacgttctagtcacccaaattcctataaatacatttatcatggtattctccctgcttaatgacgcgaggacgcgtttctataatttacactttcccccaatatgccttgcacgatttattaataacagaaaacaaaacgagacatgggaaataatgctggctttcgtggatcattgattttcgagagcaatgggctgggatatttacatacgaaaaaaaaaactctgttcaagttttgtaagtgcaaattgtattcagaattcagaatttaaaaaaaataaaagttggcatttagtaaccggacttatgtgatcttttggttaacagcacctgaccgacccaatcaccattaaatctctgttattatagactaactacgtacaatatatagagctggttgatagatcgtcataaactcggacaatgccgcaataaaaactaaaagacctgcacccatcaatttcctttcaatcgatccggtctttccctccgatatgtcaagaattggcctttcttctccaacgccactatttagcctctcgtccgactttccccgctatttctttcatatttctgcgcccggcatgtctagatatttattgaaaaggcgcagacaaacataaaagtgaaataatatttctggccagatgccagaggattgctgaaacaaaaagccatggctatgccagtgggaatcgggaaagggtatcgggaactggtactctggaattgggaactggaaaccggcatcttggggaatatggccaaaggttcttggggtgggagctgtttatatttgacttatgtgcgtgtatttttggcctcccctcgggtttcgaagatttaaggcaggggcgtcgcttgggggagtggcaggtcggatcagatgcgatcagagacttcgtaagtgattcctttgcgacacagtgggtcatgcttgggaagtatacgaactatgtttcgattttgaagctagagctttcaaatttgtatttatggattttaagctatttattgtaaaactgttgatcagtcaatagccagttgtcgtatactctgagttaaatgaatacttcttttggaaaaccctataaatatctttctatatatttttattattgaaattctactgaagagaagttatgaagtttggcatttgataagaccacccgtattcctaacaaagttttttaaaatttgtgtttatggttgccttggataattcagttgcccaactctcttctcagccttaagtagcaatacagtactcttatttaaatactagtgtaaattgttatttgcaatcacaacattttaaaatataattagattccgtaataccggtggacaccgataccgaaaatactaatctttactccctatccataactttttattgactaagttatttgctgcaaaatattgtattttagcttaacataattaagccctctactgttttaagcatattccgaatcagtgtgcatggagcccgcagacccaaagaattcttcggagacgattcttttctcttttagcctttcgctttgattgttgcttctgttgcagttgcatttacgcgatgcttttgcgatttgaacgcttgccaaattgctttccacacacgcacagaggaaagtggaaaagagggttggaaaagggtggtggggaggccacccttcttttctcttccttattcgtgttatcgtcggggaaatgcaattggcgattgtatacacaaaagggcagactgagatgatggaggccaaagcaaatcaaacgcatcatttgacttccggcagggcgtggcaacatacctctccctgataataacagatcagtccacagcaatagcagcgattggcttttaaaaagtcctcctgcaaatttattggttcgaaaagtgatgttatgcagggaaaagcagacaagtaatatatggtctgtcctatttgtagaaactttttttacttacttgtagtttgtggccattacccatagattaagttagtatgtatagtggaaggtagaagtatatatataagtatatattttcttgatctgtccatgtctgtccgtatgaaagtcgtgtactagtcaatgtacatgtataaaatttttagcttaacatatccatctctctcgcgcggcaattggttgaagaaacgggtatctagtagtcgtgactatagcgttctccctttttatttgtttaattaatggggatagtcagtatattgaatttgacagagcatttaatagccaactttagtaagattctaaaatcaccaaaattagctgaaacaataaaattaaaattactattatttatttgaatattattacgtatgtgatccaaatacattgaccactactgtccatgacgactgccgtcatcagccgatataatgcggaacagatgttgcctggaccaattgcagccaaatgccaacgacaatggcaaatagcttggaactgcaggccccgaaaagaaagaagtgaaaggccaacaaatccaaacggaatcgaatgatcgccgagatgcacaagcaacagcgcgtgtggggaaatattttagagtggaaaatcgctggccaagaattgaggaaccgccgccagtcgggcgcccactaaacaaactgaactttcacctctcaaaacgtaagacatagggattaccacctgccagggactcagactcaagatcacgatgatggggcgacattgtcatgtgccaaagcaaacacaccatatacaatttgcacaacttgcccaatccccagctgtctgtggattgtccgaatccgctgctaatttacgatacaagttattattaatttgtcatcgggtcggcattaaaatcccccggcaaaagaaaataccgacaacttataatgagcaggcgggtatttgggactttaacatatcctgtacgataatgttttcaattcaagacatttacataaagcactcaattaggagaaataaatgatatataaaagggaatatattaataatttcatatatatatatatataaatatacattaggtttttacttacaggtgcctaaaagggggcactgaaataaggacgtcgtctttcggatgttaaacatactttttcatacttttagcctacgagtagtaatgtttttagcatccagatagactatgtctatagactataatgactataaatgaccgtattgccgtttttattcgtgttccgggtcaagatttttcattaagcgaatacaccccacgattggccaattaatgggtacaattaagcaagaattcgtgtctgcctgtctgtcttttggatcgcccgatattgtggtaggtaaaccgtgcggatagacgtcccctaatggctcacggctaattgacaagggccaacaaaaataaatgaaatggaatggaatggtatggaattagcaacgacaattatgtagctggggaaggtcagtctttaatgtctatggctgtatgacattaatgctatttggcattgttctcggctggaatcgggggtccacagtctagaatctagagtctagaatctagagaacagctggcaaatgtcacttgtcagggtattttttcgcttttacgacagttccaatgcgacattacgcccacacggaacacacctttgcagatctctataaatacatatactacatccccaccaatctctgctctttattcgctttttgcaggcaatcttattttatacaccaagatggctgtggaaatcttgggagggtggcaagattcatgcgctcatcatggacttagacataggcatttgttccgaagccgagaaaaaacaaaaaaagaaattacttttagattatttgtgggaaaatttaaggtaagtacggcccatccagctctctgactagccaaatgtacttaaaggagtccttttaacaataagtttttgttttgaatattcaaatttatcctcccaatattgaagtaattgaatttccagttaaatgaaaattaccagtaatagaaaaagtgcagataattttccagttaaaaccttaattacccgatatattattttcaataaacacaaccaatgtaaagcatcgagttcaaaagaataagcctatctattaaatgaacccttcacaatttataatggaattcaggcagtacagtgcactcgaactcacctttgtagaggatttccaaaacaaacatttccgggtaactcgagtagtcgcactaattaacaaagaattatccggaaatcaactgtgagtcacgagccagagttcttcagagacaaaggatactccgccaaaggtttttggcatccatacatatattgtatatttatttacatctgaatcacagctaatggctaaatttctggcgatttcgtttgcagatatcacaattggtgggcgtacagatattacgtgtgtgagctgctcgcccttataaatgtgataggtgagtactagtgcacggcaaacaaaaaaaaaaaaaacctaaatataataataatacccaaccgatgggtcctgagatcgtcatgtgccataaggggccaatcgaactcagttcgcatcatttattgctgcaagtatatttctttgaccttggctcatcgtgtgtttgaaccaaacagatcaaattgatataataatggaagaatgctatggtcgagagtcttgacggggaattactcggtactcatattgggatatattactataagaaaaaccacaaaggtttacgtatgattgattacccacccagttcaagcgacaaattaatatactagttaagtaagaaaatcttgcgatgaaacagaacacagtcgggtgtttttctcggtgcacatgccaatctgtcgacttctccaggtgccagtgggatcggtaaacaaagtttcggggttagcaaaacggtttctcgcgacgggactcataaattcggcattcattaacattcccgttcgattttacgccgaaaaatcaatgacgaatttttatcgactgaccgccccgcatcaaaataaacaaatgcttcccgattttctggtcccctcgtggggcgcgcgcgcctagattcgaactctgacaaaataatgaactgtcagaagacatgggaaataaacaataatattgcgagtaaaacacgtttataaaatggctgacatcgcttcaagaagtgcgaggggcgattcgttggaaaatttgggcctaaatggctagaaatttgaaatgggttaattaggcggcaggtaataggataaatgtaaatgtgaatggaaatggggggggggcattttcattgactgaatggtggggcaccgcgaaaatgcagttaagtgcacacccagaaatacaatacacacgcataatacaatacaaattttatttattatcttaaaattatatgggataaaaaatttgtgtgatcgaaattccatttaagcggtgaaaatttagctttaactgagtcttaaaacaatcattttcttatatcatacatacatccccaattgagtacgtcgagaccctcaactatagccttcttgcctggataatgtacattcggtcgggatgtagaaatatgtgtcagtggaatcaggctttttcctctgtatatgaaaaatcccatcaatctagcccacttagttgccaaatgaatttaaaagtaaattaggagttgttcagcaaaggccatcttcattcaataagcagacttcttttgagaattcattggttattctttcaaaagtttattatgcatataattatgattacagtgcttgcgcagaaagtgatcgttaaaaaatttttagtgccccaggggcagcatatcccaatggtcattcctttattgttctctcgataaaaccaatgaaatgcgcatcagttcgccataaaaattaacgtaccttggagcattgtttgttcattgacctccatctccatcccaattagccgcgattgatggatttcgattccgaatccgattccgattccgcatctgcatccaatgtcggtctatctgccataattaatgggctgtgcggcggtgcgggtgaattgtaattgaggagaaaatcaattcattcccgccccgttggccttaaatcgatcggtcaagcgaatccgaatgcatcggatcgggaaaagtccgtaccgatacgtaacgccgaattttccaaagagcacctatgcacccatgcacaaattgggggttaatggaaaatgaaaggtgggaaatcggtggcaaagaacccatcaatccctgtgtccggtccgataaacagatattcaagtaggacagatgaataggcagataaaccgaacgaacgaaaagtgtatctctgtatctctttggtgctgatttgtatcttttttgtggttcctttgcaggtcaaatgtttcttatgaatcgatttttcgatggcgaatttataacatttggcctgaaagtgatagattatatggagaccgatcaggaagatcgcatggatccgatgatttacatatttcccagaatgaccaaatgtacattttttaaatatggttccagtggggaggtgagtaacgaatgcagcactcgacaaacccaagactcaataataatttaatctttctaggtggagaaacacgacgccatttgcattttaccattaaacgttgttaatgagaagatttacattttcctttggttttggtttatattattaacgtttctcacattattaacgctaatatacagggtggttattatattctctcctcgaatgagggtctacttatttcgtatgcgatttaggtgagtttcatagacattgcgggtcctcactggcggtgatatgagaactaaaaaagggaaaatgtaaagcttattaaaaagttgctttcgagctaaggatttgcgtttctatgagatgtgacttatgtatgacttatgtatgtgggttccacaaaaatccctatactcgtataggtaggtgcctagaagtatgtagccaaaacaatttttttttcactacatacttcgtagagccctatgtgaaatttaagccttagatttttccgtgacaccgcccaggtttcttgtcaatatctgtttccctatcaagctagtgattcccattagcttacataatgatttgaacaaacttacttaatgccatttctttaattgcaggttagtgcgtcgtgacgctattgaaataatcgttcgtcgttcaaagatgggcgattggtttttgttgtatttactaggtgaaaacatagatacagttatatttcgtgatgttgtacaggacttagcgaatcgtttaggacataaccaacaccacagggtgcctggcttaaaaggtgaaatacaggatgcatgatattgggagtattagaaacaatacaaaatgcaatttgtcgtctccatttaaaaaccatcgaattcaataacaaaaatgtcgaaagcaagaaaaagattaagaaaggacaattacaaccacaaaggaatctagagatcttcgcagcagccgcttcattaaaacttacaactcaacacaccgctaaaaaatctttaaaaaaaaaacgtatctcaaaaatacaaccaaaaaaactatcgtcagctcgcagtcagtcataaatcagcattatcaaccttggagactaagtctatcgatagtcggtacaaacacatccaaagccacaggacatagaatacaacatagaaaaatggaagcggaatgaaagcatggagaaatatggaaaaataggaaagcattaacagccacgcaacgaaaggaattactaaaaattcaataccaatcaattaatgtaacgtaaatgagaaaatggatatcaaataatcaagagatcgagaatggaagtcctgggacttccggacaggacacccaagccggtggcaagtagcgcctgccgtcggccaggggtcacaaggtcacaagtcacaagggatcgcttaggaaattagcgatcagcgacccatagaagtgttgccccaaggacaagatcaaagtgtgaggagaacagcaaatggacagcaccggcaacggaaacaacagacagatacgcacacacacagacgacgccacacatacgcttacagcgacatcactcatacgccccgtagaacacatcgcactttgcttgtcatgcagcgttaactaaaccaaacatcaacaaagtcgagacgacgcccgcggaaaattgcatttctgtattaaccccaagagtatagaagaggaagaatcgaaaatcagcatcactttcaccgagaaaaagcgaagtaccatacaaacgagatgctaaaacaacgcaacaagacggggaaagaaaagcctccccgctttgaaaatgcagcaaatgaaagtcaaggaaatcgcagtggaagtggcagaggagagtaacagtttaattaaattaaattcaattcaattaaattaaattacttattaaaatgatatcttgaagtgttcatgtattcgaaagtaggttaactaagtcaaacatacaagtaattctacatatatgtataatatatatattatatatatacatatat

SEQ ID NO: 842 - DNA, 3153 bp, DROSOPHILA
gccagtgtctgttgcgttggcaaagtgaacgtgcgcgtcttttttcctgctcctgctgctccaaaatccgcagtttctccgcctgaactgatctcgaagaaaagcacggacaaaaaaaaaacctgaaaccggggaaaagccgtattccgatttcttttccgtaaacgcaaacccatcgaagttttttttttaccagtgagcgatcgaaaaatgtgaggttgaggtgcacagagtcacccagagtcatataagcttcgaccatgtcggacacgtgacccgcgcttatgccgcgcgatgaaaccgataacacgagctgactaagccgattaggccgatagcaacgatagcgtcgatagcccaaatcaaacgacgagttaaccattaaaaaaaagaccaagctcagataaatcacaaaaaagtgccaatgtaaaacagcgggttgagaataccagagagcggaggaacggacccgaagatgcccagctctgcgacagtcacatccactacaacgaacacgccgcaacccgaagaattggaaagccatccgcgccacctgcagcacctgcaccaccctcatcaccggaactaccagcaaccgcgcttccggttccggttcgagtcccgattaaccgatgcgtcgataatgggcctgccgcgcaaaagaaagcacagccaggattcggtagctcaatcgatcggtagccacacgatactctgatattttgacactgatactatcgatacgcaacgcgaaccaatcgataacaaacgataaaagcaagaagggaggctagagagaatcatcgccgatcttgccagctttcgctgacgacaaaccatgttagatatatttcgtggattgaaaaaccttgtaaaggtcagtcacgttaaaacagattcgatagtattccgcctgcattactcaataactgtgatgattctgatgtcattctcgctaattataaccacgcgccagtacgttggcaatccgatcgattgtgtgcacaccaaagatattccagaggatgtgctcaacacttactgctggatccagtccacctacacgctcaagagcctcttcctgaagaagcagggcgtgtcggttccatatccgggcatcggcaactccgacggtgatccggcggacaagaagcactacaagtactaccagtgggtctgcttctgcctcttctttcaggcaatcttattttatacaccaagatggctgtggaaatcttgggagggtggcaagattcatgcgctcatcatggacttagacataggcatttgttccgaagccgagaaaaaacaaaaaaagaaattacttttagattatttgtgggaaaatttaagatatcacaattggtgggcgtacagatattacgtgtgtgagctgctcgcccttataaatgtgataggtcaaatgtttcttatgaatcgatttttcgatggcgaatttataacatttggcctgaaagtgatagattatatggagaccgatcaggaagatcgcatggatccgatgatttacatatttcccagaatgaccaaatgtacattttttaaatatggttccagtggggaggtggagaaacacgacgccatttgcattttaccattaaacgttgttaatgagaagatttacattttcctttggttttggtttatattattaacgtttctcacattattaacgctaatatacagggtggttattatattctctcctcgaatgagggtctacttatttcgtatgcgatttaggttagtgcgtcgtgacgctattgaaataatcgttcgtcgttcaaagatgggcgattggtttttgttgtatttactaggtgaaaacatagatacagttatatttcgtgatgttgtacaggacttagcgaatcgtttaggacataaccaacaccacagggtgcctggcttaaaaggtgaaatacaggatgcatgatattgggagtattagaaacaatacaaaatgcaatttgtcgtctccatttaaaaaccatcgaattcaataacaaaaatgtcgaaagcaagaaaaagattaagaaaggacaattacaaccacaaaggaatctagagatcttcgcagcagccgcttcattaaaacttacaactcaacacaccgctaaaaaatctttaaaaaaaaaacgtatctcaaaaatacaaccaaaaaaactatcgtcagctcgcagtcagtcataaatcagcattatcaaccttggagactaagtctatcgatagtcggtacaaacacatccaaagccacaggacatagaatacaacatagaaaaatggaagcggaatgaaagcatggagaaatatggaaaaataggaaagcattaacagccacgcaacgaaaggaattactaaaaattcaataccaatcaattaatgtaacgtaaatgagaaaatggatatcaaataatcaagagatcgagaatggaagtcctgggacttccggacaggacacccaagccggtggcaagtagcgcctgccgtcggccaggggtcacaaggtcacaagtcacaagggatcgcttaggaaattagcgatcagcgacccatagaagtgttgccccaaggacaagatcaaagtgtgaggagaacagcaaatggacagcaccggcaacggaaacaacagacagatacgcacacacacagacgacgccacacatacgcttacagcgacatcactcatacgccccgtagaacacatcgcactttgcttgtcatgcagcgttaactaaaccaaacatcaacaaagtcgagacgacgcccgcggaaaattgcatttctgtattaaccccaagagtatagaagaggaagaatcgaaaatcagcatcactttcaccgagaaaaagcgaagtaccatacaaacgagatgctaaaacaacgcaacaagacggggaaagaaaagcctccccgctttgaaaatgcagcaaatgaaagtcaaggaaatcgcagtggaagtggcagaggagagtaacagtttaattaaattaaattcaattcaattaaattaaattacttattaaaatgatatcttgaagtgttcatgtattcgaaagtaggttaactaagtcaaacatacaagtaattctacatatatgtataatatatatattatatatatacatatat

SEQ ID NO: 843 - protein, 372 aa, DROSOPHILA
MLDIFRGLKNLVKVSHVKTDSIVFRLHYSITVMILMSFSLIITTRQYVGNPIDCVHTKDIPEDVLNTYCWIQSTYTLKSLFLKKQGVSVPYPGIGNSDGDPADKKHYKYYQWVCFCLFFQAILFYTPRWLWKSWEGGKIHALIMDLDIGICSEAEKKQKKKLLLDYLWENLRYHNWWAYRYYVCELLALINVIGQMFLMNRFFDGEFITFGLKVIDYMETDQEDRMDPMIYIFPRMTKCTFFKYGSSGEVEKHDAICILPLNVVNEKIYIFLWFWFILLTFLTLLTLIYRVVIIFSPRMRVYLFRMRFRLVRRDAIEIIVRRSKMGDWFLLYLLGENIDTVIFRDVVQDLANRLGHNQHHRVPGLKGEIQDA

SEQ ID NO: 844 - DNA, 2514 bp, DROSOPHILA
tacttctcaaaaaaaggagagccaatgtgtgcacaccatgaaattgctgattattttctcaacggagatgccaactagttcgatagattgagagaacgaaatatcgttattcattttttaatcataaattgaaaattaaaaaagattacatagttatggttaataaatataagtttttaacttaaataatataaaacaaaattatcatgaccgggaagtaacagttaatgaaacagtgtgtgcacacatcattaggcaataccaatccatctggcaaccccaccacactcattgttgttgttctgattctcttgtcattattttgcaatcaatcgctgaactttttgcactgagaaattgtagaaaataagccatgcagcgacagattattaacattctgggacagacgacgcgtcgcctggctagcggccagcaaattcgcatgctgtcagtttctgcgccgcgacaggagatcttcaaagtccagagcgccgaggactttgacaagaaagtaaagaacagccagcagcccgtgattgtggacttcttcgcaacgtaatttttatattttcaatttgaggacatggcaaattaatgtttatattgtaatccaccagctggtgcaatccctgcaagctgctaaccccgcgcatcgagagtattgtgggcgaacaggccggttccatcaagctggccaaggtggacatagatgagcacagcgaactggctctggactacgatgtggccgccgtgcccgtgctagtggtgctgcagaacggcaaggaggtgcagcgcatggtgggactccaggacgaggacaaaatccgggcctgggttgccgccgccgtcaaacaggccaagtaataattgagaaatcccaaaaaaaaagtggaggttgacctcctcgcaaataaagctgagctttaggttaattcggactttcgaaataaatgtttatttacccgttgaaacgaaaagtactacgattacacactaaaaactaaatggaaaaccagcccggcgtgccgggtcgcttcttgttcctgtccagaaatctgcggaaaccggctttcgattcatccagcgacttttcctccttggcctgcttctcagccttttcggaaaagaagtcggggaagacaaaggactcctccctgggctggaatacacaaatatcattggaaatatccattgaatcaggggcttgtagtgggccataccaatgttacataagccagcttcacgtcgtcttttttggtgatgtagccgtaggtctgatccttcttggtctcgcccatggcaatccgagtacgcacatccaccaccggcagcttgtagatcttctccagatagttacgcacatcgtacttggtcatttccatggacaccgaaaaagtgaccacattgggtggctgttcctccgtgggtcggattagcttcatccagaagttgggaaggaaaacgcgaagctgcggattgccgcgctgatagatgggataccacctcgtggacatgatctagccaggatctaagattctaattcaagaatacaaaaattaaattaattgttgtgcgtttatgaaatgcactaaaaaaggccaaaggtttcgggcggacacaggcgtagcaagggggtcgcataagattgttaactaaaacttaacgtatatattaatttaagttattacgctgtaactataaaatattccacacttttaccacttttaaaaaataatatcactaaatctagattcctctcaaagaactgttacctacacccgtgtaaaagcacgtgggttgtccaacacttgttttaaacagctgattgtcaaccacaacaatttttaaattcggtccggctgaaatctctggtaaaggccgtttaaaatggcaaaaataaagaaaaaggaggcgaaagctaaacctttgactcgcaaggagcagagaaaacagaagtcggagttcaaaaaacagaataaacgactttatttcgccggcaaaactaacggaacacagcgcgtggcggcggcggcagaggcgttggcagcgcagtcgcagctgggcaaaaacaagaagaagaaacggagcaagaagcccaaaataataaatccagatgaaatacccaaggagcaacttttgtccggtgaaatagacagcgacgatgacgagtccatagattcggatttcagcgatgcggaggtggatgctctgctgcccgcaagggaaaagatggaagtctatgaacctctgggaaaaaaggtcaagaaaacgacaggaggcgccatccaaagacaggatgaagaggcggtcaggcggaaggaactgcgccagcaaaaggaactggagagcaagtccaagaagcagcgaatcaagcaacttcgcatagagaacgaggaggatgatcgcgagatcaacaagctggaaaagaagctgaagctcaacaaatccaaggacaaaaaccgcttggtgcggaagatgttcaatgatggcctggactacctgcttgactttgtc

SEQ ID NO: 845 - DNA, 453 bp, DROSOPHILA
atgtccacgaggtggtatcccatctatcagcgcggcaatccgcagcttcgcgttttccttcccaacttctggatgaagctaatccgacccacggaggaacagccacccaatgtggtcactttttcggtgtccatggaaatgaccaagtacgatgtgcgtaactatctggagaagatctacaagctgccggtggtggatgtgcgtactcggattgccatgggcgagaccaagaaggatcagacctacggctacatcaccaaaaaagacgacgtgaagctggcttatgtaacattgcccagggaggagtcctttgtcttccccgacttcttttccgaaaaggctgagaagcaggccaaggaggaaaagtcgctggatgaatcgaaagccggtttccgcagatttctggacaggaacaagaagcgacccggcacgccgggctggttttccatttag

SEQ ID NO: 846 - protein, 150 aa, DROSOPHILA
MSTRWYPIYQRGNPQLRVFLPNFWMKLIRPTEEQPPNVVTFSVSMEMTKYDVRNYLEKIYKLPVVDVRTRIAMGETKKDQTYGYITKKDDVKLAYVTLPREESFVFPDFFSEKAEKQAKEEKSLDESKAGFRRFLDRNKKRPGTPGWFSI

SEQ ID NO: 847 - DNA, 4311 bp, DROSOPHILA
gcaggcatgaaatgtgtttgacgaggatccaatccgctgggatcacagattgggtgagaatccttctctagagaaatccttcgaccttcgtcaatcaggcagcaattttcgaatggagaaaaggagaaaacaagtgccgcattcgccgctagacaaaaagcggaattgaaaattagttttggccaaggactacccccgaatcgagccgacttttaatgacttcctcccaaaaaacgcagctctcgattataaatgtctgtgggaaaagagatacaccgtatagccgaatgtgtaatactctagaaaaatataagtataaatactcttagttgtaatgttattaaatccattataatagggttgtatctcctgaaagttatttaaagtccttttaggttcttacaaaattttacaatatgctttacaaaaagtttgttgttcaatttgcattgcatatgcatcgaattaagtttttgcaaatgtcaattattttgttatttattaaagagattgttctgcattcgtctcaactctttcggccgaaaagagtatccccaaaaacgccagagaccataaaatcgcggctcattcgcagcgctaaaagggaatttcagttttgatttacgtggcgaattaattttgtgggttgctgttcgcttcttggccctctcggcctgcccttttggccctctttcagcagacagacattagaaaccgttggccgcaaaaaacaaagagcaaaatcgggcaggaagcgaaattgagctcgactaattcgcatttaagtaatttgcaaattcgcgcgaacggcagttaattaagaaatgcaagcattcccatgggaaatatgtatatatccaaaatgtgtgggtttgaatttgcgtgatatataatcatgcatataatcaatagaaaatatgtttatatacttactatgttttattattcaaattttgatggcttacattcttgaagctacataaatagaagataacttgccatgttattgatattgaaatataatccgtttccatcctttcaggatcatcccagcttgagaggaactccgctggccatgctggccgcccagtgcaacaagctatccaacaaatccccacccccgctggccgacgccgctgtgggcaagggcttccatccgtggaagaagagtcccaattcgccggcagccggatccagtggctcctccggcggtggtggcggcggcggtggcagtagcgccggccagcactcgccctgcgccatctcagcggccagctcgtccagctcgagcggatcaagcggaggacagtcctccaggagcctctcatccagcgccagcaccatggttaacatcacagctaggtaagcagacaggcggcgcacagcgatccagcagggattgcccaagtgaacggtggttggatgggggattctggtggtttgggatgttaagagtttaatatattccatttactagacatccatccaccacctgaccacttttgtgggggggtgatcccttggagcgctgtgcgcggacagccatagcagctggccctatacgactcgcgagtaatttcagcatctatccttacagtcgccccctggcctcctcctgtgcggcggtgggcgggggctccaccggctcctcctcctccgcctctggatcacagtcatcctcgacggcatctgcggtggcagcggcctacggcggtgatttgtactttccgaacacatccacctcgaacatggacaaccatcacatgcatcagggtctcctgggtaaagtggaggcgggtgcggctgcctttggcggtgtctattcgcgtcatccgtacgattggcccttcaatgcggttacccacaaggaggcggccagcgtgaattccggctggtgggacatgcacagtgccgccggatcctggctggatatgggtggtgcgggcatgcactcaacaatggccaattatgcgagtgagaactatagctccgcattgagtcattcgctgttgggatcgggacaacatttgctgcaggacacctacaagagcatgttgcccggccagggagttggcgttggtgtgggcgttggcatgggtggcttctccctgcctcacagttcaccatcggcggcagcagcagctgcggccacagcggcagcggcggcgggtggctccccccagggtggttcaccatcgacaccatcacccagatcccagaggcgttatgccggacgggccacatgcgattgcccgaattgccaggaggcggaacgcctgggtcccgctggcgttcatctgcgcaaaaagaacatccattcgtgtcacatacctggctgtggcaaggtgtatggaaagacgtcacatctgaaggctcacctgcggtggcacaccggcgagcgtccctttgtgtgcaactggctgttctgcggcaagcgtttcacacgctccgacgagctgcaacggcatttgaggacgcacaccggcgagaagcgctttgcatgccccgtgtgcaataagcgctttatgcgcagcgaccatttggccaagcacgtgaagacgcacaatggcacggccaatcaccaggccaatggccacaatggtgggctgaagaagggctcctcggagtcgtgtagcgactcggaggaggccgccaaccagtcgggcgagtccaacgggctgggcggcgtgggcagtggcccacagacgggcggggccggtggcggcgggggtggctctagttcgggcaatggtgctggtacgttagcggtatcgggatcggtgaccaccggagcgggagctggatccggtacgggtagctccaattccaattccaattccggtggctcaagcggttccgttagcggttccgtatccggttctggcagccatcccggcaccccgacctcgctgcacgcgcacagcgccaatggcacgtccagcagcctgctgggcggcggtctgcacctggccacgccgcaccagatggtcgccgcgggcggttcgccggtgatgcttcaccagcagcagcagcagcagcaacatcagcagcaacagcagcaacagcagcagcagcagcatcaacagcagcaacagcagcaacatcaacagcagcagcagcaacatcagcagcagcagcagcaacaccaccagcaacagcagcagcatcatcaccagcaatttggccagcagcagcatccccatgcccatcacctgcaccaccatgcccaccacgcgcaccacctggccaccggcggctcacccggtctggatcccagctccctcgtggatataaagccaccgatggtttgaggatcgctgggacccttcctgttcaccaactaaaacagcgcaagggttccacaccatagatactacgtaccacgtattacgtatataaataaatttatataaaatcgatatcattttgatttgaagctatcttgcggttgtacatatagccagcagatgtctgtaaatagatttgagaaagaaacgcccgctctatgtgtctattgcgctaatcccagcactaaactaaaactgaaagtaaaatattacaaaatataaatataaatataaatatattgcttatagcctatttgtagactaagccattttctagactatctagttatcaacactgaatgatgaaggagagcgatatttttttttttgtattttttttactagctctatggatatgtaatttttttcataggttctaagcattatatacgacattaaccaagagacaagcttcgagcaccacaaaaacaaaatccctataaaaacaagcgataagaaccattatgcaattctaaacgaagacacctaaaacaaaaaaaaaaaaaaaaaaataatattgatataatattgatatatggatattgaacggggggaacatcataaatatatttctagtccaattatgaagtgtgagcgaaccaaaattgtaaagagaaaacaaaaatggtggagaaaacgcagggggggagggaaatttaaactctagcccttgtaaattagcatatgtccctcatttatttttgctaaccccatcgaaacgaggatatcttagacgctagtgctttaatcgatcccaactaaaactaaaacaaatgatggaagaaaaaccggcggagagcccaagctaaaccttaactaaatctgtttttgttgttttatttgaactaggcttagagcagatacttagatacttagcaccacacaacaaaaacaaaaaaaaaaaataaaataaaataaaaaaataaaaaatgaagcacggatgcaaaatggatttggccagtcc

SEQ ID NO: 848 - DNA, 2076 bp, DROSOPHILA
atgttattgatattgaaatataatccgtttccatcctttcaggatcatcccagcttgagaggaactccgctggccatgctggccgcccagtgcaacaagctatccaacaaatccccacccccgctggccgacgccgctgtgggcaagggcttccatccgtggaagaagagtcccaattcgccggcagccggatccagtggctcctccggcggtggtggcggcggcggtggcagtagcgccggccagcactcgccctgcgccatctcagcggccagctcgtccagctcgagcggatcaagcggaggacagtcctccaggagcctctcatccagcgccagcaccatggttaacatcacagctagtcgccccctggcctcctcctgtgcggcggtgggcgggggctccaccggctcctcctcctccgcctctggatcacagtcatcctcgacggcatctgcggtggcagcggcctacggcggtgatttgtactttccgaacacatccacctcgaacatggacaaccatcacatgcatcagggtctcctgggtaaagtggaggcgggtgcggctgcctttggcggtgtctattcgcgtcatccgtacgattggcccttcaatgcggttacccacaaggaggcggccagcgtgaattccggctggtgggacatgcacagtgccgccggatcctggctggatatgggtggtgcgggcatgcactcaacaatggccaattatgcgagtgagaactatagctccgcattgagtcattcgctgttgggatcgggacaacatttgctgcaggacacctacaagagcatgttgcccggccagggagttggcgttggtgtgggcgttggcatgggtggcttctccctgcctcacagttcaccatcggcggcagcagcagctgcggccacagcggcagcggcggcgggtggctccccccagggtggttcaccatcgacaccatcacccagatcccagaggcgttatgccggacgggccacatgcgattgcccgaattgccaggaggcggaacgcctgggtcccgctggcgttcatctgcgcaaaaagaacatccattcgtgtcacatacctggctgtggcaaggtgtatggaaagacgtcacatctgaaggctcacctgcggtggcacaccggcgagcgtccctttgtgtgcaactggctgttctgcggcaagcgtttcacacgctccgacgagctgcaacggcatttgaggacgcacaccggcgagaagcgctttgcatgccccgtgtgcaataagcgctttatgcgcagcgaccatttggccaagcacgtgaagacgcacaatggcacggccaatcaccaggccaatggccacaatggtgggctgaagaagggctcctcggagtcgtgtagcgactcggaggaggccgccaaccagtcgggcgagtccaacgggctgggcggcgtgggcagtggcccacagacgggcggggccggtggcggcgggggtggctctagttcgggcaatggtgctggtacgttagcggtatcgggatcggtgaccaccggagcgggagctggatccggtacgggtagctccaattccaattccaattccggtggctcaagcggttccgttagcggttccgtatccggttctggcagccatcccggcaccccgacctcgctgcacgcgcacagcgccaatggcacgtccagcagcctgctgggcggcggtctgcacctggccacgccgcaccagatggtcgccgcgggcggttcgccggtgatgcttcaccagcagcagcagcagcagcaacatcagcagcaacagcagcaacagcagcagcagcagcatcaacagcagcaacagcagcaacatcaacagcagcagcagcaacatcagcagcagcagcagcaacaccaccagcaacagcagcagcatcatcaccagcaatttggccagcagcagcatccccatgcccatcacctgcaccaccatgcccaccacgcgcaccacctggccaccggcggctcacccggtctggatcccagctccctcgtggatataaagccaccgatggtttga

SEQ ID NO: 849 - protein, 666 aa, DROSOPHILA
MLAAQCNKLSNKSPPPLADAAVGKGFHPWKKSPNSPAAGSSGSSGGGGGGGGSSAGQHSPCAISAASSSSSSGSSGGQSSRSLSSSASTMVNITASRPLASSCAAVGGGSTGSSSSASGSQSSSTASAVAAAYGGDLYFPNTSTSNMDNHHMHQGLLGKVEAGAAAFGGVYSRHPYDWPFNAVTHKEAASVNSGWWDMHSAAGSWLDMGGAGMHSTMANYASENYSSALSHSLLGSGQHLLQDTYKSMLPGQGVGVGVGVGMGGFSLPHSSPSAAAAAAATAAAAAGGSPQGGSPSTPSPRSQRRYAGRATCDCPNCQEAERLGPAGVHLRKKNIHSCHIPGCGKVYGKTSHLKAHLRWHTGERPFVCNWLFCGKRFTRSDELQRHLRTHTGEKRFACPVCNKRFMRSDHLAKHVKTHNGTANHQANGHNGGLKKGSSESCSDSEEAANQSGESNGLGGVGSGPQTGGAGGGGGGSSSGNGAGTLAVSGSVTTGAGAGSGTGSSNSNSNSGGSSGSVSGSVSGSGSHPGTPTSLHAHSANGTSSSLLGGGLHLATPHQMVAAGGSPVMLHQQQQQQQHQQQQQQQQQQQHQQQQQQQHQQQQQQHQQQQQQHHQQQQQHHHQQFGQQQHPHAHHLHHHAHHAHHLATGGSPGLDPSSLVDIKPPMV

SEQ ID NO: 850 - DNA, 2718 bp, DROSOPHILA
taatagctggcttctttgatattaatatttataattggttacgagtgtgaaaaagatattgtcaaaaagcttgcagtccaaataaacgttacggtaaacaattattatataaattaaaaaacctacattgtgcagttattgatatatgtttttatctattttttaaatgtaccacaagtgattcagtttagccaaagaaaacatataattgtgatacatttgattactttttctactttggccttctattgcaattctttcgtcgccagcccccgcacaatatgttattacatcacttggtcgccggttgagtcactttcctgcccaattcgacttcgaccatgattgagcacttaccaatgccacaattatagctgtaaagctgagagcagaaagcttcaacctgaaagctcaaaggtgatcatgcatcttttttgggtcatttaccatggggaggatacatgtacatatacatatgtatttctctatttttaccgattgtgcgcgtttgtgtcaagtgcaatgctgttcatcgatcaagcagcgatttattgggttacttacatgacttgagtgtgccccacaaccgcaagcctcaatccccggatcttcaagccgatgatccgcggtgggttgctcgcttaagtcttttgtttgtaacgactttggttgctttgtccgctattccccgtccgtttcccattcataacaatagcgaaatgggtgtgactcgtgggtgcaaatctttttgggtaaatctagcgatcggcggagaaggaggcatgcaaatgaattacgatcgaagtgatttttgtaagcaaccgagttaaaaagtgaaagaaaggccggcggggagacaatgggccaacgaaaatttcgtctataaatacaaatgcatcggcggttcaattattattcaaagcacgcactccacagaaggaggacacagtctcgcttctttcgctctgcaatttgccaaccaacctcaaacgctcgccaaatggctttcaaggtaagccaaggctgatgtaatttgcaccttggcaacagactatactgttttcttaccattccagctcgttgctctggtttcctgctgcctggcagccgtgtccgctggacttatccctgtggagcagcacgaccagcatccccagctgtaccaggcccaccagccccagcatgtgatctaccaaaagcagcacgagatccatcctcacggccatgaggtctatcccgatgacccacatcccaagtacaacttcgcctacgatgtgcaggatgcgctctccggagactcgaagagccaggtggagtctagggatggggatgtggtgcagggagagtactctctggatgatgctgatggcttccgtcgtactgtaaaatacaccgccgattccgtcaatggatttaatgccgttgtgcaccgcgagcccctggcccatgtgcaccacaaggtggtggctgcagctcctgttcagtaccaccacgctcctgccgccgccgctgccgtcatcaagagctacgcctccccttcccaggcttatgtcgctcccacctacgcagcccctgcctacaccgcccccgcctacgccacccaccaggctgagcagccgcaggagcgggagcaccagcagcaccactatgccagctacgagtcccctgcccacgcccaggccgcccacgaaggacatgagtactaccaccaccagtaaggagtttccagccacagatcacatgacaagcgaaagtattattgtgcatcccattatgagaactcatttagctcattaacctagttctgttgattagtcgtaacctgtttgtaaatattctcaataaaactttcatatatctatgtaatatgatttgttatgacttttcaggatctataatatgcattattttgggataattagtttaagaaatatatcattctttccgaaaagaaacgtaaatttataagattacagtagttcttttaaaagaaattttgtaaactatgttacttaaagattcaactttttttaacaaagtcaaactgttttttgcttgacttgaaaaatgcacttaaaaatagactaaatattggcttttagccaagtcggatttctttggtacctaaacaaagtttctcaaaaaaaccttcgagactttgccactggaatgtcaaggacagatcactgccaaaagctcgaattaatgattcgcattatttcatatcaaaacgccttaagctgacctgatgaggaatgtattcatacggaatcgtgttctcttgggattacattcagcaatatccatctgaagccagcttgccgatccatgtgagtctgcaaacgccttataaatgaaaagtgcgtacaaaaagaacaattgacattaattttatgaagtgtgagatttacattttaagcacttggctagtatttcccgattggtcatgattagcgtggtaatttagcgcgaatatttgtccgtgctcgattttcgcacttcaatggagaggggtaaatcgagaccggtttttagacttgccaaaatatccggtagcaacaatcgcactttttgcaattttaatgtcgcacacaaattgaatctcaaattacttgggacatatttgctggtatcaagtccgacaacaactacttatacgactatacaggctctgccgctgactcggacccgaaatatgtgtgtccaattgcggccaac

SEQ ID NO: 851 - DNA, 654 bp, DROSOPHILA
atggctttcaagctcgttgctctggtttcctgctgcctggcagccgtgtccgctggacttatccctgtggagcagcacgaccagcatccccagctgtaccaggcccaccagccccagcatgtgatctaccaaaagcagcacgagatccatcctcacggccatgaggtctatcccgatgacccacatcccaagtacaacttcgcctacgatgtgcaggatgcgctctccggagactcgaagagccaggtggagtctagggatggggatgtggtgcagggagagtactctctggatgatgctgatggcttccgtcgtactgtaaaatacaccgccgattccgtcaatggatttaatgccgttgtgcaccgcgagcccctggcccatgtgcaccacaaggtggtggctgcagctcctgttcagtaccaccacgctcctgccgccgccgctgccgtcatcaagagctacgcctccccttcccaggcttatgtcgctcccacctacgcagcccctgcctacaccgcccccgcctacgccacccaccaggctgagcagccgcaggagcgggagcaccagcagcaccactatgccagctacgagtcccctgcccacgcccaggccgcccacgaaggacatgagtactaccaccaccagtaa

SEQ ID NO: 852 - protein, 217 aa, DROSOPHILA
MAFKLVALVSCCLAAVSAGLIPVEQHDQHPQLYQAHQPQHVIYQKQHEIHPHGHEVYPDDPHPKYNFAYDVQDALSGDSKSQVESRDGDVVQGEYSLDDADGFRRTVKYTADSVNGFNAVVHREPLAHVHHKVVAAAPVQYHHAPAAAAAVIKSYASPSQAYVAPTYAAPAYTAPAYATHQAEQPQEREHQQHHYASYESPAHAQAAHEGHEYYHHQ

SEQ ID NO: 853 - DNA, 3140 bp, DROSOPHILA
ctgccattcgatccagcaccacccaccgacgcccgcttaagtatgctacacacatttttttggtaacccttaccaaggcccaaagcacccctttactttacccctccgccgccgatgtgtatgtggcacacaaactcataaattgtataaattgttcggctattatttctcgtggctgtcaacgcaatattgcaggcaaattgtcctggacaatgacgacaacatgttggcggggaaatgggcaagcaggggttataggtcggcttggaaatacatttttctatgtgtttttatgagccccgaatgtgagatggaggcacatcaaaatggagattacctctagttttccgacaacctgttttattaacaagttttcacctctcgtatcgtaccttctaacgtgtatgatttaggtacgattggtccagctgtgaatctgctgcttatgttcagtgattctatcaatataatctatcattttcagacgacaatttcggttgcagaccgccaaccccttaatccctaaccatatatggattttttatataaccatttttatggaattttctgctcgtttgtgtcagatttttacccatttttcgcaattgactttgcagccttgacttacgccaaatgacataattagccatgggcggggggcgtggcaggtagtcgttttagggctagggttattatatagcacgtaaccctagcgctggccatgcgccataaaagatgcaatttcgcgcgaattctaaccccagcaaatcctttttcgtcctgcactttaatgcccgtttttttttccaccgaaaatacccgggtttcctccctttttatgccgtttttattattatttgcgaaaacggttagaaagtcaattgttttatgggattacggaaaagcagcaggcggggcattccagtaggtgctgcctcaaaagtcagctgcccaaacatttggggcctacaacgctacgcccagatccccagtcgttctccgagcaccgactcgacaagacccaaaatatattcgagctcaaaagtttacaatttcgaacaaagtcaaggcttcacaaaattttcatataaaattcaccgttgaaaataacttttcgttccgctcttttttcgttccttttctgtttaaatatacaatatatattaggtaaaaaataacatactacacgtacaacttttcaaattcaacaaaaatatatattccatacagattaaacggcgtacggacccactgagttacaatgcaacgttccattttcaagagtagctgttccaggacactgatcctgcttaactccctgaaatccatgcaccacaagagcctgcacgtggagcaactgttggaggcagctccagcgcccaaaaaccgctgcctggatctgttgggtcgcttgatccatggccgattgagtctcttgggcggtcgtcctgtcccgcccagattcttaccgctattggcgggtgatcgaagcctgtactttaatgcggacgaggacgaagagtttcgtaagcgtttggccatgcagctgaaggagttgcgagagaccctgcaagaaaaacaggaacttcgcgagggacaagagcaggactttcaggagctggagcaacaggacgaggaggaggatcagccgtatgtgcccagatctcgggagatctccatggaggatctcactgacgaggagctaagtgacgtgcgggggctgcggatgagtgccagccaggatgatggcaagtctggtaatttcgagcagccagaaaccagtgaattggaaagcgaggagacggcggatgctaaggatccccgggagtccgggcagccgcgagagcctcaagatgcccacgatgccatcgaacacgttcgcgagggtgaaatcgaaggagtttactggacgggcgagggcaaacggattgtcactcaaacgccacagcgtaagacgggtcattcgggattcatcgatggccatggcgaagagattccccaggaggactccaagcaagaggtggctccctatcaccctgagcctcgggcccaggcgcaggccacctccaaggtgataaggaagggccgcaagcccaagtcgtcaaccaaaaccaacacgcccagcgattccgacgaataactaaattgccagtaaatgaaaccaaaaccctcgagctgggatcgctaaaataaatacaaaaggctaaagacaaaacgctctatgccgtgtttccctttcccagtaaccatctgaggtttctgcgggttgcattcagttgagtcatctgcagccagcactacctggccactgcttagcaaattttatgcaatgaccaggagtcaaggacgatttacctgggcggacaacacacgcttcccacacgcggcggtgggcactctcactcttttttgcgtcctctaaaatccttttttacagccctatcctttttttggcttttggtggaattctgggaaaattttacataaagatcgtagaacaccgagcatgttttttttttttaatataatttttcaaatagattcaaatgttgctagccattggtggctcgtttaatggtttaatcaacatggacaagagccaagtccatattctcccctgtctgtggctgttccttctgtacctgctccattgacccaagatgataaatgatgtttgccaatctagctgacccaaggccggaaattaaatttgttcgaaaatttgccacttttccccgtctgtttcttatttgttgtttgtttccccctcagagtcacgcccgaaaaaaatctggagaaaggactgtgggaacaaaatggggaggagatatggagaattaatatcgggctttgggaatcttgtagaacaaaaacatatacatataacaaaataatgttcttgatgttctatttttaactagaagaatcttgggattaaaatacaagtttttattgacttttgatacaagacttgtttcataaatataatagcaaatgagtgctcgccggttttcaatttataaacgtatttgaacgtaggtatccgagataattctgttggtcaattaagttgttaatgtctctggactgtagtatctccaaaaccggttattagtcagatgggagctcctagagaatgg

SEQ ID NO: 854 - DNA, 1077 bp, DROSOPHILA
cgagcaccgactcgacaagacccaaaatatattcgagctcaaaagtttacaatttcgaacaaagtcaaggcttcacaaaattttcatataaaattcaccgttgaaaataacttttcgttccgctcttttttcgttccttttctgtttaaatatacaatatatattagattaaacggcgtacggacccactgagttacaatgcaacgttccattttcaagagtagctgttccaggacactgatcctgcttaactccctgaaatccatgcaccacaagagcctgcacgtggagcaactgttggaggcagctccagcgcccaaaaaccgctgcctggatctgttgggtcgcttgatccatggccgattgagtctcttgggcggtcgtcctgtcccgcccagattcttaccgctattggcgggtgatcgaagcctgtactttaatgcggacgaggacgaagagtttcgtaagcgtttggccatgcagctgaaggagttgcgagagaccctgcaagaaaaacaggaacttcgcgagggacaagagcaggactttcaggagctggagcaacaggacgaggaggaggatcagccgtatgtgcccagatctcgggagatctccatggaggatctcactgacgaggagctaagtgacgtgcgggggctgcggatgagtgccagccaggatgatggcaagtctggtaatttcgagcagccagaaaccagtgaattggaaagcgaggagacggcggatgctaaggatccccgggagtccgggcagccgcgagagcctcaagatgcccacgatgccatcgaacacgttcgcgagggtgaaatcgaaggagtttactggacgggcgagggcaaacggattgtcactcaaacgccacagcgtaagacgggtcattcgggattcatcgatggccatggcgaagagattccccaggaggactccaagcaagaggtggctccctatcaccctgagcctcgggcccaggcgcaggccacctccaaggtgataaggaagggccgcaagcccaagtcgtcaaccaaaaccaacacgcccagcgattccgacgaataa

SEQ ID NO: 855 - protein, 292 aa, DROSOPHILA
MQRSIFKSSCSRTLILLNSLKSMHHKSLHVEQLLEAAPAPKNRCLDLLGRLIHGRLSLLGGRPVPPRFLPLLAGDRSLYFNADEDEEFRKRLAMQLKELRETLQEKQELREGQEQDFQELEQQDEEEDQPYVPRSREISMEDLTDEELSDVRGLRMSASQDDGKSGNFEQPETSELESEETADAKDPRESGQPREPQDAHDAIEHVREGEIEGVYWTGEGKRIVTQTPQRKTGHSGFIDGHGEEIPQEDSKQEVAPYHPEPRAQAQATSKVIRKGRKPKSSTKTNTPSDSDE

SEQ ID NO: 856 - DNA, 9315 bp, DROSOPHILA
ggatgcgtttttcagcattattaattgcattttaatgctatttatatcggagcaagggtatatcattaggccactctcgtcgtcttggggttacttaatgaccctcggtcgaaagatcttttcagctttttggcttttcagccacgaaactgtgaaagagaaatgcctctgagacagaaagagatgcggagaaagcatggcagcaagtagcaacatcgacatcgtaccaaaatcaaaccaactgcaacaattcgccaacatacaagagcaacaacaaccacgggaacaggtgaacctactcgcatacccacctggatattttccatttgtctgcttttttcatctgagtgtatgcaaatccgctgggtgattactttcgattgctgtactgctgaaaggttgcagcctgctgattaagttgctgtccgagatttgttcacgctgcttgatttgcgtttgaataatcatgtacattttataggtttcagctcgtcgagatattgagttcatttatggctatttaagagttttcactatttaaactgatgtggccataaactttgagtatgtattctcctctaatacaaaataaaatttgaaatattttaagaaaatttatattctaatttcaatatattttgtttatttaattaatatttagaaaataataaaataaaggagcaacattaattttgttttatttttattattattatttttataccttatgaaattgagtaaaattttgtttttaatattcctgtaagtaacggtctattatacattaatttgactcatttcttctacatcattttacacaaatgtggccaggcctgtttattaagtatgccttacaacactgcctgcatcagctgattgatcccgcactttcaacactctttgcgccaaaaatcgaactgcgtgtaattgtgtgcgtttgcgacttcgaatgtttttggtttcttattattattaacaaaaaaacaagtgacccagaaatatgagtgaatcgcttgcagaaactgcagctgcagcggaaaatgaagagcaggccgacgactcgatggaaaagctggtcttcgacgaggaagacgagcagatggtctccggcgaagatttactgggtggcaagagtttgataatgtcggatgacagcgaagcggaagatggctcccaggaaaagcccctatcacccaaggacaggcgccgaaggatgatggacagtgaccaggaggaagatgcaatggatcagggaaacggtgattccataaaaaacagcgaggatgtggaggaggagatggtttccaggccgaaaaagaaggtatccgccatcatagattcggataatgatgatgagcagcaggcggaaaaaaagacgcagaaggaggaggggaagcaacccgtcaaaagcaagaagaagagatcccaggtcaaccaggaggatcaggagaaacctgtcaaatctaataagacaaagaaggcggtaaagaataagacccaagcaaacaaggcggaggacgaccaggataacccttccaaggaggataaaccaaaaaaagtggtcaaaaataagaaacaaacgaataaagatggtaaaccccaaacaaacgaagagtacgaccaccaccaacagcatgagaaacctgcaaagacacaaaagtcaaaaaagttggccaagaagcagaagcaacaagaggatgataaggaggacaatggcactgaacaggagaagaagaaaccttcaccaaaatcaaaggcaaagaagtccgacaaatctaaaatagattccctaatggacaacgaagaggacgcgggtgaagaccttaaaatgtatcaagaagatcaggagcctcaaaagcagaagacaaaaaaatcagccaagaaaactaataaggacagtaaggaagagtcaggtgaagaccaggaacaccaagagcaaaagaagccactcaagaaaataaagttggacaatattgacaccaaggaggataaggaacagatagtgaagccgaaaaagatggccaagaaaaacaaacagaaagtactgagcgatgacgagtcagaggaaaatcagaatgaaaaggtggatcaagatcatgatcttaagaaaatgagcagtgaaaatgagctggaaatgggcagcgataaggaagaccaggaaatgcaggaacctcccaaaaaggcaaagaaaaataaacaacgaatggacagtgaaagcgaagatgaaatcccgaaaaccgaaagcgagaaaataaccagttcacccaaaaacaaactgaaaggattggtggactccgaatctgaaccggaagaaactgctgaggaagttagtcccgtcaagaacaaacttaaaggattggtggactcggaatcggaaccagagctagacaatcccgaggaatctgcaggagaacaggaagccccaatggaaagcgctctctccagagagaaacctaagaaggccaaagttgttcgcgtgagttttttaattaataggatggctataatatattttaatacatactttcatataattaggaatcagctaagaaagcactggaggggatgcaggccatccaaagtgaacagcagcgtttgcaccgcgaggcacacatcaacgtgccgtatcatcagccgaaaccaaggacactgaaggagtttcttagccgacgaaccatcaacgctccactggccacggctctggctggaggaagtccaatgcccagcaggcagccaaggaagtcggtgggactgcggatgaccagggaggaattggaggcttatgcgtaagttacatgaggctttaaaagataatttaaacctaatctattgtttagaaaacttatggaggatcgtgccaaagaagctaccgagttctttaagtctgagtctgagtcagatgaggaggatgattcggagaacgaagaacctatggaattaaaagacaatccaggtgttatggatgagatgctggataatccaaaaactccagaacagcccaagaacgacacagaggacatgaccagccaagcagttattgaggtacctgtcctgggtgaagacaaaacagatgataccgtcggtgatgaagcaatggttgcagattctattactgaagaagaacccattgcctccacctctactgcagctgccctgaaattagcagataattttgaaattcagcaagagactaatgcgaaatcccccagcaaagtctgtctggttacagaagtagtggaattgcccaagctggacttgagcaccatcaacataacaccgtcctctaagccagcaactcctaagattagcgaagttattcgccagctgaagattgagaagagcttagatgagagcccttcgctgaaaggcgatcccaacatggttattgatctggaaacgggtgatatgttcgccaaaaaaccaacaggtgtggatgacctgctaaaccgtctgatgaaaacgcgggaagctaaaaagcacaagaccacagagactgtcaagtatgtagcccactttaccatctttttcagccctaaaacttgggtacattttttttagcatcctaaccactgaacatggcaagctggagatgtccaaggtgagcatacacctgcacgaagaggaaatcgcaaaagaaccaaaaccaggagcgggttacatgaaaatgcaggagcatctcaaaaccctgattactaaaaaacgcatggaggacctacgcaaaaagcaggctgaagaacaggagaaaatggcagaagatgaggaggaaggcatggatgtggatgaggagtacgaaccggaagataaacctggctatgcagaagtaactataaatgaagatgaggaaatcatagataaagttgatagcactgctgaggatgatggcgatgctgaagaaaacaaaaacgatgcagacgaagatcccgaagacaatccagttgaagacagtgaggatgagaaaaatgacagtgaaagtgagcaggaatgtgaagcgaacccagagccagaaacgcaaaccagaaagaagaaccgcatcattaaagcattcgaggacgacaactccgatgaagatgatctcgacctgctgcaaactccgaagccaagcaatgttgctcccataaccgctacccagttgcaattatccgcccacaagcttttcgatgtggagacccgacgcacggccagcgacgaggagaatgaactcctggatctgtgttctggccagtttccgcagacccagatgctttcctccgacgccccttcggtggatacagctgtgatcagtcagattcccatgacacagtttggcggcagcagccaggcagcagatgaactggagggtctgtgttctggtaccttcgccacccagttgccatcgcaagcacccactcaacagccggaacagcaggaagaatccgaagtaccggcagcagtagcgaacagaatagtatccagcgatgaagaagcccaggaggatgccttggaagtcgataagccaagaaacaaaaaactaaccaagaaaaggccaaagaaaaaggccaaattgggcttctcggatgatgaagatagcgatgatgaggttgaggaattcgacgaggaaagtgacgcagagccagtagaggaaattccggaaacctttgtagactacgattccgaggaaaatgagattgttgtggagatgaccaagaaggatcgtaaaatacgagcagccaactttgtggacaaagaagctgagctgtctgaatccgaatggggatcagccgacgaggatgagaaaaacatggacgagtacgacattgaattgggcgacgaagaccagttcgatcgtgataaactgcggcatgagcttggccagatacatgcgtaagtaaatcaaaaattctacttctttaaaatactttaaccatttctttttgacaggcgtaaaatgatggatcaggatattcgggaagtgcgcaagatcaaggaattgctcttcgaagaggaggaagagggagcgaatcgccagcgccaattccgctggaagaacgtggaggccggattcagtctcgacgataatcgaaccgacaatggtgaaggaaacgacggcagtggcgatgaggaaaacgagcatctgtggcgaaaaatccgctacgaacgagagcagcttcttttagagaagggtttaaaaccggtgcgaaaactcgtttattttcttagttctattcactaaaacattttaatcttttaggaggtggcctcaccgctttctacgtccgtgataaacaccagtaacaatggtaattcgccggccattcgccgactgaacataatttcctctaagaagacaactgtggaggtgaagaagaattctccattcctgatctcaaagacaatagctggcaagcagcagaagagcgctgttcgtggctcctttctgattcgggaccagcagacgctttccaaactggcaggactcacaaaaggaacctccggcgatgtggatgccgcggagggcactatttctgtgaagtcagcgaaggcgaaaaacttcgttttcgccacgctaacggaagaggaacatgaggtgggaactaactatgttcttttgattacgattccttctaaaccaaattaataacattccagaatcgaaagagaaaagctgccgatatactgaacagcagcactgagacgggggtaaacttcataaagaaaccaaagttggagcctcggagagacaagtgcctaatagatcagctcctttgatccgttcttcttttaagctaagacttaaatgtacatttcaaaagttagactgctaagatagtttataggagtgaataaaaataagttaaattttatatttctttagataggaacagtataaattggttatactgccttataattggaatattccttacattttatgtgcgattgttgtgaaatttggtatgtaggaagtttatgattaggaatttgtatgtatttcagtaaaatgaggaataattaataaaaaattaagaaagatttaagattttacaaacccagttaacggtctattttgtaaaatatatacatatgtgcgtatatatattttggtatatttctccagctacatggtatatttcgaacccacaaacattggtcatactgtgtgaatgaatgtgaattctatacagaaattatgaatatgtaagtgaatcatttacaaagtcgccgtgatccaggaggcacaacaaagccaccgcctcctccgccgccgataaatttaatctaatctacacatcgcggcgaacagcgctgccgcagctaaattttcaacaaccggcggatcgatcgggtcgtcgtcaatcagtaaacactcgcccgaagacgccgccggacgttccagtccccagtttagagatctcacagtccgacaaacaaacagcagaatggtggccccctcgaaactcagccaggtgcttagctaccagaactttgtgcatgccgtatccggagctgcggtgagtgggcaaatatttgccggctaaaggtcaagatggcatcggtgctaatttgcatttggtcacctattcacagggcggctgcatcgccatgagcactttctatccactggatacagtgcgttcccgcctgcaacgtaagtttacccagggattcaacaatcggactgtaactaatcatcacccgataagcgggccacgctttgataattcatataggcgcacctattaatctgtgcgcgagttcaaactccagcgtttgaaactttctattgacgatatgtttgagagtccatatcagtcaattgcccgggctaatccaatttgaggtctggttatagatgaaattcgatagcgtctggtttctgtgccgcgaaaaaaattgtgataattattttctgtatagtatgaggaataactaaaggtttattttaaaagatatacaaacactatagatgatatcatatgtgaacgtagttataatattacattgtgtatattttgatacacaaaattcgttcaatattaagtgcccatatgatacctatgtgatatcgagggttcactttacaaggtgtgcgctctatttcccattttccaagtacacgaacagcttatattatctgaatgcataaattttgcaattttatagagccattggactttgactcgtaaaataaaacttcttacaattatgatcagttaagttcactaaaattcgcgaaaacaaaaagaaataccttttaatacatttttttaaaggtgcagctttatgacaattttagcccataccatatttacccaacacggttgcatattcgactaaagcgttttcaaatttaattctagaaattggataattaacataatagggttcagggttggcttaatatcactgactcgtagtatgcgtgacaagttcaattagcgcgaaaaccaaacacacctgaaataatcttggcttcagaatccccagcttaaaacttatagtgttttttccaataaatatttacagtggaagaagccggcgatgtgcggagtacaaggcaagtgatcaaggagatcgtgctgggcgagggattccagtccctgtaccgaggtcttggtcctgtactgcagagcctttgcatttcgaactttgtctacttctacacattccatgccctcaaggcggtggcatcgggaggctcgccatcccagcacagcgctctcaaggatctgctcctgggcagcattgccggcatcatcaatgtgctcaccaccacacccttttgggtggtcaacacgcgactgcgcatgcgcaacgtggccggaacctcggacgaggtgaacaagcactacaagaacctgctggagggtctcaagtacgtggccgaaaaggagggcatcgccggtctgtggtctggcaccataccctccctgatgctggtctctaatcccgcgctgcagttcatgatgtatgagatgcttaagcgcaacattatgcgcttcaccggcggtgaaatgggcagtctgagtttcttctttattggtgccattgccaaggccttcgccacggtgctgacctatccgctgcagttggtccaaaccaagcagcgtcatcgcagcaaggagtcggactcgaagccgtccacatcggcgggttctacgccccgcaccgagagcacactggagctgatgatcagcatactgcagcaccagggcattcgtggactgttccgcggtctggaggccaagatcctgcaaaccgtgctcacggcggccctgatgttcatggcctacgaaaagatagccggcaccgttggcatgctgcttaagcgcaactgaaaagaggctctagtcaacaagtagttttactcaattaatcctaacgtaagctataacacaaacatacacattctgacataggatatggccagcacacagactctccaaagtttagtcgctaagcgtcaatggataaatgaaaagaataaatagttaacagaagtaaataataactggatgctttatttatattcgtctgcacagcagatggtccatctatacctaggtgtggtcattgctatatatctttaattgggcggttttgattttcatttatttgtcattctcagtagagtccttattctcatcgtcattagacttggactcttctgaagattcagcttgctccttatcgttgccattggcgacctctgaagtctccgacttggaatctccttcgccggaagattttttatcgctaggattggccagctcggccaggttgaactttttgcactccagatagttgtcgatcacgctaagcagacaccagcccctcaagacctccacgatgatggatttcttggcctcctttaggtccaccttgttacccacgttcttggagttgaccagctcggccagttgggttatgatttggtcgcgcttgatctgctgattatagcgatgattgaagatgatgccatagctggtgggctccttgaggaagtgcttgtcgaagagctcgccggcggcagtgatgatgtccggcatgttggcgcggcagacgacttcgatgggcaccaggcgcaggacaaatcgggacatggacttgccggtggtcgctatgtcgttgatgatgtgtttacccagggcgaccggatcctccagttgggtgcggatgaacacgcagttggtggtgttggtgtctacattctggaatcgcatcttgcgctgcgaaagcatctcgcggcatttggcggcagctgcttccaagtcgtcatcgtcatcactggtgcctcccgccgctggcttcggatcatcctctcccgcatcaccaccc

SEQ ID NO: 857 - DNA, 5439 bp, DROSOPHILA
atgagtgaatcgcttgcagaaactgcagctgcagcggaaaatgaagagcaggccgacgactcgatggaaaagctggtcttcgacgaggaagacgagcagatggtctccggcgaagatttactgggtggcaagagtttgataatgtcggatgacagcgaagcggaagatggctcccaggaaaagcccctatcacccaaggacaggcgccgaaggatgatggacagtgaccaggaggaagatgcaatggatcagggaaacggtgattccataaaaaacagcgaggatgtggaggaggagatggtttccaggccgaaaaagaaggtatccgccatcatagattcggataatgatgatgagcagcaggcggaaaaaaagacgcagaaggaggaggggaagcaacccgtcaaaagcaagaagaagagatcccaggtcaaccaggaggatcaggagaaacctgtcaaatctaataagacaaagaaggcggtaaagaataagacccaagcaaacaaggcggaggacgaccaggataacccttccaaggaggataaaccaaaaaaagtggtcaaaaataagaaacaaacgaataaagatggtaaaccccaaacaaacgaagagtacgaccaccaccaacagcatgagaaacctgcaaagacacaaaagtcaaaaaagttggccaagaagcagaagcaacaagaggatgataaggaggacaatggcactgaacaggagaagaagaaaccttcaccaaaatcaaaggcaaagaagtccgacaaatctaaaatagattccctaatggacaacgaagaggacgcgggtgaagaccttaaaatgtatcaagaagatcaggagcctcaaaagcagaagacaaaaaaatcagccaagaaaactaataaggacagtaaggaagagtcaggtgaagaccaggaacaccaagagcaaaagaagccactcaagaaaataaagttggacaatattgacaccaaggaggataaggaacagatagtgaagccgaaaaagatggccaagaaaaacaaacagaaagtactgagcgatgacgagtcagaggaaaatcagaatgaaaaggtggatcaagatcatgatcttaagaaaatgagcagtgaaaatgagctggaaatgggcagcgataaggaagaccaggaaatgcaggaacctcccaaaaaggcaaagaaaaataaacaacgaatggacagtgaaagcgaagatgaaatcccgaaaaccgaaagcgagaaaataaccagttcacccaaaaacaaactgaaaggattggtggactccgaatctgaaccggaagaaactgctgaggaagttagtcccgtcaagaacaaacttaaaggattggtggactcggaatcggaaccagagctagacaatcccgaggaatctgcaggagaacaggaagccccaatggaaagcgctctctccagagagaaacctaagaaggccaaagttgttcgcgaatcagctaagaaagcactggaggggatgcaggccatccaaagtgaacagcagcgtttgcaccgcgaggcacacatcaacgtgccgtatcatcagccgaaaccaaggacactgaaggagtttcttagccgacgaaccatcaacgctccactggccacggctctggctggaggaagtccaatgcccagcaggcagccaaggaagtcggtgggactgcggatgaccagggaggaattggaggcttatgcaaaacttatggaggatcgtgccaaagaagctaccgagttctttaagtctgagtctgagtcagatgaggaggatgattcggagaacgaagaacctatggaattaaaagacaatccaggtgttatggatgagatgctggataatccaaaaactccagaacagcccaagaacgacacagaggacatgaccagccaagcagttattgaggtacctgtcctgggtgaagacaaaacagatgataccgtcggtgatgaagcaatggttgcagattctattactgaagaagaacccattgcctccacctctactgcagctgccctgaaattagcagataattttgaaattcagcaagagactaatgcgaaatcccccagcaaagtctgtctggttacagaagtagtggaattgcccaagctggacttgagcaccatcaacataacaccgtcctctaagccagcaactcctaagattagcgaagttattcgccagctgaagattgagaagagcttagatgagagcccttcgctgaaaggcgatcccaacatggttattgatctggaaacgggtgatatgttcgccaaaaaaccaacaggtgtggatgacctgctaaaccgtctgatgaaaacgcgggaagctaaaaagcacaagaccacagagactgtcaacatcctaaccactgaacatggcaagctggagatgtccaaggtgagcatacacctgcacgaagaggaaatcgcaaaagaaccaaaaccaggagcgggttacatgaaaatgcaggagcatctcaaaaccctgattactaaaaaacgcatggaggacctacgcaaaaagcaggctgaagaacaggagaaaatggcagaagatgaggaggaaggcatggatgtggatgaggagtacgaaccggaagataaacctggctatgcagaagtaactataaatgaagatgaggaaatcatagataaagttgatagcactgctgaggatgatggcgatgctgaagaaaacaaaaacgatgcagacgaagatcccgaagacaatccagttgaagacagtgaggatgagaaaaatgacagtgaaagtgagcaggaatgtgaagcgaacccagagccagaaacgcaaaccagaaagaagaaccgcatcattaaagcattcgaggacgacaactccgatgaagatgatctcgacctgctgcaaactccgaagccaagcaatgttgctcccataaccgctacccagttgcaattatccgcccacaagcttttcgatgtggagacccgacgcacggccagcgacgaggagaatgaactcctggatctgtgttctggccagtttccgcagacccagatgctttcctccgacgccccttcggtggatacagctgtgatcagtcagattcccatgacacagtttggcggcagcagccaggcagcagatgaactggagggtctgtgttctggtaccttcgccacccagttgccatcgcaagcacccactcaacagccggaacagcaggaagaatccgaagtaccggcagcagtagcgaacagaatagtatccagcgatgaagaagcccaggaggatgccttggaagtcgataagccaagaaacaaaaaactaaccaagaaaaggccaaagaaaaaggccaaattgggcttctcggatgatgaagatagcgatgatgaggttgaggaattcgacgaggaaagtgacgcagagccagtagaggaaattccggaaacctttgtagactacgattccgaggaaaatgagattgttgtggagatgaccaagaaggatcgtaaaatacgagcagccaactttgtggacaaagaagctgagctgtctgaatccgaatggggatcagccgacgaggatgagaaaaacatggacgagtacgacattgaattgggcgacgaagaccagttcgatcgtgataaactgcggcatgagcttggccagatacatgcgcgtaaaatgatggatcaggatattcgggaagtgcgcaagatcaaggaattgctcttcgaagaggaggaagagggagcgaatcgccagcgccaattccgctggaagaacgtggaggccggattcagtctcgacgataatcgaaccgacaatggtgaaggaaacgacggcagtggcgatgaggaaaacgagcatctgtggcgaaaaatccgctacgaacgagagcagcttcttttagagaagggtttaaaaccggaggtggcctcaccgctttctacgtccgtgataaacaccagtaacaatggtaattcgccggccattcgccgactgaacataatttcctctaagaagacaactgtggaggtgaagaagaattctccattcctgatctcaaagacaatagctggcaagcagcagaagagcgctgttcgtggctcctttctgattcgggaccagcagacgctttccaaactggcaggactcacaaaaggaacctccggcgatgtggatgccgcggagggcactatttctgtgaagtcagcgaaggcgaaaaacttcgttttcgccacgctaacggaagaggaacatgagctacatggtatatttcgaacccacaaacattggtcatactgtgtgaatgaatgtgaattctatacagaaattatgaatatcgctgccgcagctaaattttcaacaaccggcggatcgatcgggtcgtcgtcaatcagtaaacactcgcccgaagacgccgccggacgttccagtccccagtttagagatctcacagtccgacaaacaaacagcagaatggtggccccctcgaaactcagccaggtgcttagctaccagaactttgtgcatgccgtatccggagctgcgggcggctgcatcgccatgagcactttctatccactggatacagtgcgttcccgcctgcaactggaagaagccggcgatgtgcggagtacaaggcaagtgatcaaggagatcgtgctgggcgagggattccagtccctgtaccgaggtcttggtcctgtactgcagagcctttgcatttcgaactttgtctacttctacacattccatgccctcaaggcggtggcatcgggaggctcgccatcccagcacagcgctctcaaggatctgctcctgggcagcattgccggcatcatcaatgtgctcaccaccacacccttttgggtggtcaacacgcgactgcgcatgcgcaacgtggccggaacctcggacgaggtgaacaagcactacaagaacctgctggagggtctcaagtacgtggccgaaaaggagggcatcgccggtctgtggtctggcaccataccctccctgatgctggtctctaatcccgcgctgcagttcatgatgtatgagatgcttaagcgcaacattatgcgcttcaccggcggtgaaatgggcagtctgagtttcttctttattggtgccattgccaaggccttcgccacggtgctgacctatccgctgcagttggtccaaaccaagcagcgtcatcgcagcaaggagtcggactcgaagccgtccacatcggcgggttctacgccccgcaccgagagcacactggagctgatgatcagcatactgcagcaccagggcattcgtggactgttccgcggtctggaggccaagatcctgcaaaccgtgctcacggcggccctgatgttcatggcctacgaaaagatagccggcaccgttggcatgctgcttaagcgcaactga

SEQ ID NO: 858 - protein, 1812 aa, DROSOPHILA
MSESLAETAAAAENEEQADDSMEKLVFDEEDEQMVSGEDLLGGKSLIMSDDSEAEDGSQEKPLSPKDRRRRMMDSDQEEDAMDQGNGDSIKNSEDVEEEMVSRPKKKVSAIIDSDNDDEQQAEKKTQKEEGKQPVKSKKKRSQVNQEDQEKPVKSNKTKKAVKNKTQANKAEDDQDNPSKEDKPKKVVKNKKQTNKDGKPQTNEEYDHHQQHEKPAKTQKSKKLAKKQKQQEDDKEDNGTEQEKKKPSPKSKAKKSDKSKIDSLMDNEEDAGEDLKMYQEDQEPQKQKTKKSAKKTNKDSKEESGEDQEHQEQKKPLKKIKLDNIDTKEDKEQIVKPKKMAKKNKQKVLSDDESEENQNEKVDQDHDLKKMSSENELEMGSDKEDQEMQEPPKKAKKNKQRMDSESEDEIPKTESEKITSSPKNKLKGLVDSESEPEETAEEVSPVKNKLKGLVDSESEPELDNPEESAGEQEAPMESALSREKPKKAKVVRESAKKALEGMQAIQSEQQRLHREAHINVPYHQPKPRTLKEFLSRRTINAPLATALAGGSPMPSRQPRKSVGLRMTREELEAYAKLMEDRAKEATEFFKSESESDEEDDSENEEPMELKDNPGVMDEMLDNPKTPEQPKNDTEDMTSQAVIEVPVLGEDKTDDTVGDEAMVADSITEEEPIASTSTAAALKLADNFEIQQETNAKSPSKVCLVTEVVELPKLDLSTINITPSSKPATPKISEVIRQLKIEKSLDESPSLKGDPNMVIDLETGDMFAKKPTGVDDLLNRLMKTREAKKHKTTETVNILTTEHGKLEMSKVSIHLHEEEIAKEPKPGAGYMKMQEHLKTLITKKRMEDLRKKQAEEQEKMAEDEEEGMDVDEEYEPEDKPGYAEVTINEDEEIIDKVDSTAEDDGDAEENKNDADEDPEDNPVEDSEDEKNDSESEQECEANPEPETQTRKKNRIIKAFEDDNSDEDDLDLLQTPKPSNVAPITATQLQLSAHKLFDVETRRTASDEENELLDLCSGQFPQTQMLSSDAPSVDTAVISQIPMTQFGGSSQAADELEGLCSGTFATQLPSQAPTQQPEQQEESEVPAAVANRIVSSDEEAQEDALEVDKPRNKKLTKKRPKKKAKLGFSDDEDSDDEVEEFDEESDAEPVEEIPETFVDYDSEENEIVVEMTKKDRKIRAANFVDKEAELSESEWGSADEDEKNMDEYDIELGDEDQFDRDKLRHELGQIHARKMMDQDIREVRKIKELLFEEEEEGANRQRQFRWKNVEAGFSLDDNRTDNGEGNDGSGDEENEHLWRKIRYEREQLLLEKGLKPEVASPLSTSVINTSNNGNSPAIRRLNIISSKKTTVEVKKNSPFLISKTIAGKQQKSAVRGSFLIRDQQTLSKLAGLTKGTSGDVDAAEGTISVKSAKAKNFVFATLTEEEHELHGIFRTHKHWSYCVNECEFYTEIMNIAAAAKFSTTGGSIGSSSISKHSPEDAAGRSSPQFRDLTVRQTNSRMVAPSKLSQVLSYQNFVHAVSGAAGGCIAMSTFYPLDTVRSRLQLEEAGDVRSTRQVIKEIVLGEGFQSLYRGLGPVLQSLCISNFVYFYTFHALKAVASGGSPSQHSALKDLLLGSIAGIINVLTTTPFWVVNTRLRMRNVAGTSDEVNKHYKNLLEGLKYVAEKEGIAGLWSGTIPSLMLVSNPALQFMMYEMLKRNIMRFTGGEMGSLSFFFIGAIAKAFATVLTYPLQLVQTKQRHRSKESDSKPSTSAGSTPRTESTLELMISILQHQGIRGLFRGLEAKILQTVLTAALMFMAYEKIAGTVGMLLKRN

SEQ ID NO: 859 - DNA, 7957 bp, DROSOPHILA
tccgcccctctgggacctgctccatacttcgccccggctgcgtactccgcccctctgggctacgcggctcctttgggatacaacgcccctctggtggcgggacctgctcccctggtgtccaagacctacgctgccgctcctttcgccgctcccttcgctgctccagttgccccagttgctgctcgcctggctgccccagtcgccgctcctctcgctgccccagttgctccagtagccgctcccctggctgctccagttgctgctcccctggctgctccagttgctgctcccatcgccaccgagatcgtggatgcccacccacagtacaagttcgcctacgatgtccaggatacgctaaccggtgactccaagacccaggaggagactcgtgatggtgatgtcgtccgtggatcctactctctgatcgagcccgatggttcccgtcgtattgtcagctactacgccgactccatcaacggtttcaacgcagtggtgcagaaggatgtgcccgtggctgttgccccagtggctccagttttggccaagaccgtggctgctccagtggctccagttgtggctgctgcccccgctccagtcttcgccaagaccctggccgctcccatcgtcgcctaagtagaaggaggagaagtaggagtcgtaaaggaagtattgaccgcaattcgacaaaggactttcatctgtacatattcgattaatcattgtcgagctattgaataactttcatcgcaaaaacccaaaattaaagaaattctgaaaacaaaagattgtagtttattgtttaaaggcatcctggattacgagagtgatatcatatagaggcttaagaaaattatttaagtattttagctttaatatttataggtaatatttatatgtatcattctttatattttaaggattacacttaaaacttggtgttctttttagggaagtggatgaagagttctggaagctttcgcaacatgagaacgtggccaggatgcgtctgaaattggagcctcagttatatccaaataaacacgagaatgccgccaatctgcgcgacaatgcgaccagtgcctacgacaccaagtaagcccagccagtccttagtagtgtccttcataatctgattttcaatatcctttatcttagggaaatctctgaatttgactccaccatcaagaatgccgtggtgcgcgatttcctggcggatgacgaaagttcccagctggaggaggaactacgtcaactgatcgacacgcaagcgcaacaggatgtggcgctggagaagctagtcatgtcacaggactgtgagctgatcacgctgatgaccaaggtgaagggacgcattgaggttaaccagagcgtgttcacctttgtggacttgagcccgccaacagaggatggttccaaatacgatttcaggttctccaccaacaagatacgtgaggttcatctgcgaaagtacaatctgcgcaggagtgctttggaaatcttcctggtggatcagactagctacttcctcaactttacgacgaaggtgagttttttttttgtaaataaaatgtgatcattgcaaatgttcttatttctttaagactcgaaataaagttttcacaaaaatcgtgggtctaccgcttccaaacatactctacggctcgggaagatcgccggctgagctgcttagggcctcgggactcacacagagatggatcaatcgtgagatttccaactttgaatacttgatgtacctaaacacaatcgcaggtaagcaaataacatctgattattacatacatttttatcaaactaacgtattttacataactaggtcgatcctacaatgatctaagccaataccccgtcttcccctggatccttgctgattacaccagtgacgtgctggatcttaccgatccaaaatcgttccgtgacctatccaaacccattggatgcgtaagtattactgaaaatagaaaaaggtgatcagttacatgacaaacgcatttctaccgcagataaatcctaaaaacgaggccgaagtgcgcggcaaatatgattcattcgaggacccctctggtgccataccaaagtttcactacggaacccactactccaactcggccggcgtgctccactatttgcttcgcgtcgaaccgttcacctcgctgcacattgatctgcagagcggtcgtttcgatgtggccgatcgacaattccactcgatacctcagacgtggaagttgctaatggacaatcccaatgacgtgaaggagctgatccccgagttcttttacttcccagaattccttaagaacatgaataagtaatgcatgtggttttttacttttacttagttagcctaatgttattttatgtgcagatttgatttgggccacttacaaataaccaaagaaaaggtggacgatgtcatattgcctgcttgggctaccacgccggaggagttcatagccatacaccgacgggctttggaatcggagtatgtcagtcagcatctgcaccactggattgatctgatctttgggtataagcaaaagggacccaaggcagctgaggctctaaacgttttctattattgctcctatgaaggcgctgtggatttggacaagatcaccaaccctgtagaacgggaggcggttgaaggtggcttacaccaagacttttttttttgctatttttattgacatccattcatttatattaggaatgattaataactttggccaagtgccttcacagctgctgcgggagccacatccacgacgccttactcaggatgagacggctctaaagctggtacgtgctgagctccgaaggccggatcttactcagttcctggacaaggtggtgcagtactactgcgagctgtccacgcccaaggatcccattgtgtacctgagtccaccgcgaagtcctccgcgatcgttcctgcagctgagtcccgatgttctagtcagcatatcgaagtccaccatattgggctgcaattcgtggctatcgtttgataaggatcagggattcctgctggaaatcgatgccacaacggctaatctaaagtatgtttaaagatttagcaaatcggtcatattaatgtacatatctttaaaggaaccgcaagcggatctttggacccttccactcgtcacagcaaccgcattcacagctctttgcggtgagcacggatggtaagctgctctatgccggtggaatctgggataactccttaagggtgtacaatctgaacaagggcaaggcggtggcttcggtgacccgccacctggacattatcacctgcatagcactggacaattgcggctcgtacctggtcaccggctcgcgtgattgcacctgtattgtgtggagcatccaaacaaatcagcagggcggtggatccactaacaacattccagttcatgcgctgacgggtcagtcgcacctacaggccatcacccagctgaatactcagaatagctattcacccaagcccttgacggtgctctatggtcacgacgatgccatttccagtgtagccatctacacggaactggatctggtggtctctggatccctggatggaactgtcaacgtgtacacacttcaggagggtcaatttgttagaacactgaagcccattggatgcactgagtcgtgtgtacaaatctcttttgtaaccctttcctatcatggtaagttgataaatttatttaataattatttttatttatttataattggtattcttattccttcttgaggataaattaaatcatacagtttgaggatcattgttgtaatggcctaaaagtatgcaccacaattgtggcattgtagtttcatacatttgtttagaaatccatggtagcatttaggcgttcacaacaatttatttgatgtcgctaacaactttatcagactttgcctacacccaaagtcttattccttcgtatatgtttattcatgaagaactaatagtttaatactgattaaattcctgaatgcatgcatcagagctaattctgcgaaaaaaatttaatcaatttgaactattcgacccgtctgaacaaaactcaattgactcggttaagaattattgataagaaagttaacatgggccaactattgattgataaacccaatgaaatcgagcttgatcggttgactcataagacggctgtgggctgtgcccacattcgaccacctgaaacccataatctcagtcaatcggccctcttttctgtccactcatggtgcccctaatcttccgatgagacggtggatacctcacgtgctactgcatagcactcccattatgtttgaagagggcaatcaaacaatttaatcagccctcctatcgccaattgccacataagtgcgtcgacgagaatcacgtgattgtgtggccatgtgcctcgtctcgcctcgcctcctcaaacgggctatatcataatgatgttggaaatcgtccgactttgtcccatgcactgctccgctatatcttatctcgcattgcagctagggcgacggggcattaatccaaatagaagcgtgcctaacccggcgagagtgtaaagtatacgaaccccagcaaggttaagactctgttcgtttttgttggcaagctgaaaatgtatgcctctgaattctccatcgttcctcatagcaacactgtctcaaggtgttattaccatataataaaatccgggtttcttctgattttgcacaaaaaaaaaaaactatcacgggcacgtaccatcggcccgataaggaaatatcttaattgcgcaattgtaccgacctaaatcaatatgctttcgattttattacgacaataattaacatactcatgcttattgctctaaaatggcgttgattttatgaacagatttcacaaatcacatttcttttagcacgagtttttagagtttgatttaaacgctaaatgtttccgttaaaggaaagatttttaattctaataatgttttgtctttatgttgaatccatcctttttgggttaatataatatgggattacctcaaaacgagtgcttaaaacgagcaaaacacgtttttaaatatcaaagtgagcgtgtaatgccattactcgcaactcgattcaacgttctgaaagttaatataattttgctgcctgcacttaactttcatttttgtttgttatacaatatttgtcttgtgataatgcgaatcaatactcgaattccgtttgctttgcattctgactacgaaatacgtcaatcgatggcgccggcttgcatatcgagttctttaaatatgcagccatatagattcgctaagccactcgattttcgggcaatcagcttggactcttggaaattgatataccactgccatgcggagatatacccccattcccttccctttcgtctccttcgttttttcttgcctccagtaagccgagtatatagacggccataatgcatataatgtagccacttgcagccgtccgtccgcttatcgactgaattaatacacacttctgattataaattcgcaacatccggctgcgatcgattcagaaatatggaaatcgaatcgaaaaacgtcagtcgcggttcattttccagggcaatgatgggcacttaattgcgttcttgtcggggccccaatcaattacatagccgctaacgaagacccgatcccatccattgattgactatcagtccgcaacgaacccacccatacatacgcatccatatgcccgatccgtacgacactcggttctctggcattaacccaacgtcgttaatggaatcaaatcggaggggcgaacgaatcgcgcgtcacacagtcacacgaccagcaagtccaaccccccccccccaacaccatgtgctcctccgatccccctcaggccacccatgtgccccagcgattcattcatttttaaattcctaagacgcagcagaaaatttatgaactagttgtagtaaatttcgacggaaagatcaagatatacgtatatactttatatacagatatcaactgtgagagtttgggattttttttgttgaatgaactactcgtacaagattggccaaaaccaactgggcacggtttatactagttatttctgtgcgcgtggccgggtcactttaggaagttcattcagatccaatctaggctatttagtggctcttccttctgaacgcgtttcgctgggtggcattggcatacagatacatttacagatgcagagatacaagtgccgccacataacacggatacttgtgtagataagagcaactacgcattgctcggacttgtagtatgtagtatgtcgccatgtgataatgtttttatgcgatgtcaggttatcagcagaccagagtgggccggacctcgtctaatagcataatggcatttccactgcgtagattaacgccactacgccctgccccacattctgtcatctgagctgatatgatcaaagaatgcttcacatgattgaaccacaattctgattgctcttcttttctgtatcctttacacacaggtcacattgcattcagtgctctggatgacacctcgcactcggtgcacgtgtacagcatcaacggctgcagtctgggctccaaatacgtttctggcagggtgacgggattggctagtgcctccgactacctggtggtggccgacgatgccggcgatatcaccatgagcagactacacgggtaagaattgtaatatagcacatttgttactgacttattttaccttcttcttttccagcttgaagcccgttttcgacattcccctgcacgtgcccatccagacggtggtggtcactccgggcaacacccacattctggcgccgcttcgagatggacgcttggcggtgatcgccgtgcaactgccctccggcggcaataagaagcattccgtgctaaatgtttaggttcagcaggagctggaatgaacactggctgacctactgaattcccgaattttaccctctgcgtagcataagttgtagtcgttctagtttccttcgttctgcttttagcgcaccctagttttatttattgtgtcttgtgtcatttgtcatgatttatttcctatctgcttcccatgctacgtgacgtgccaaaagcaaagcgcctttgaccaactcaaaaaattcccagaaagttgacaaatgtatttagaggtattcagcaagtcgatcgattgcattcgcggaatttccatgccaactaagcattatttccccatcacatgtgcgtgtacacctgtctgggtcggcgatcctccatcctgggcggcagaaatgatggatggcacactccccttcttcgcttgatgaaaatctgaatgaataatcaatcattccatttgtggcggtgcggagagatagctcggcaaatgggacgcaggagacgggaattggagacggaaaactggttgtcgacgcacttggcaactacaactacttctctctgactcacgagcgactttcaaattggccgaaatacaaagaaaaagaattaagaccgaaaaaaaaagcgcccggcaacagcggcaaggcgcttaaaaaacggcaaccgttcgcagagatcgacggcatccagctgctcggttgatcaagagaaacactttcgttgcgccccttttcgcctgcagatacaaccaaaaatagagcccagagatctttgtcccattaagtacgcacactcggatcgcatggtattgctacccaatcattaacagagcatttccaattgaagtattatcaccacagcacgatcacagtccgtccacacagatccgagatccgcataggcagacaatacccaatacttggtgcgccagagcaagagattctatctatttccataccacccagtacgagtaccagcaccagcaccattccgatcaccaaactttctgcctttgat

SEQ ID NO: 860 - DNA, 2637 bp, DROSOPHILA
atgcgtctgaaattggagcctcagttatatccaaataaacacgagaatgccgccaatctgcgcgacaatgcgaccagtgcctacgacaccaaggaaatctctgaatttgactccaccatcaagaatgccgtggtgcgcgatttcctggcggatgacgaaagttcccagctggaggaggaactacgtcaactgatcgacacgcaagcgcaacaggatgtggcgctggagaagctagtcatgtcacaggactgtgagctgatcacgctgatgaccaaggtgaagggacgcattgaggttaaccagagcgtgttcacctttgtggacttgagcccgccaacagaggatggttccaaatacgatttcaggttctccaccaacaagatacgtgaggttcatctgcgaaagtacaatctgcgcaggagtgctttggaaatcttcctggtggatcagactagctacttcctcaactttacgacgaagactcgaaataaagttttcacaaaaatcgtgggtctaccgcttccaaacatactctacggctcgggaagatcgccggctgagctgcttagggcctcgggactcacacagagatggatcaatcgtgagatttccaactttgaatacttgatgtacctaaacacaatcgcaggtcgatcctacaatgatctaagccaataccccgtcttcccctggatccttgctgattacaccagtgacgtgctggatcttaccgatccaaaatcgttccgtgacctatccaaacccattggatgcataaatcctaaaaacgaggccgaagtgcgcggcaaatatgattcattcgaggacccctctggtgccataccaaagtttcactacggaacccactactccaactcggccggcgtgctccactatttgcttcgcgtcgaaccgttcacctcgctgcacattgatctgcagagcggtcgtttcgatgtggccgatcgacaattccactcgatacctcagacgtggaagttgctaatggacaatcccaatgacgtgaaggagctgatccccgagttcttttacttcccagaattccttaagaacatgaataaatttgatttgggccacttacaaataaccaaagaaaaggtggacgatgtcatattgcctgcttgggctaccacgccggaggagttcatagccatacaccgacgggctttggaatcggagtatgtcagtcagcatctgcaccactggattgatctgatctttgggtataagcaaaagggacccaaggcagctgaggctctaaacgttttctattattgctcctatgaaggcgctgtggatttggacaagatcaccaaccctgtagaacgggaggcggttgaaggaatgattaataactttggccaagtgccttcacagctgctgcgggagccacatccacgacgccttactcaggatgagacggctctaaagctggtacgtgctgagctccgaaggccggatcttactcagttcctggacaaggtggtgcagtactactgcgagctgtccacgcccaaggatcccattgtgtacctgagtccaccgcgaagtcctccgcgatcgttcctgcagctgagtcccgatgttctagtcagcatatcgaagtccaccatattgggctgcaattcgtggctatcgtttgataaggatcagggattcctgctggaaatcgatgccacaacggctaatctaaagaaccgcaagcggatctttggacccttccactcgtcacagcaaccgcattcacagctctttgcggtgagcacggatggtaagctgctctatgccggtggaatctgggataactccttaagggtgtacaatctgaacaagggcaaggcggtggcttcggtgacccgccacctggacattatcacctgcatagcactggacaattgcggctcgtacctggtcaccggctcgcgtgattgcacctgtattgtgtggagcatccaaacaaatcagcagggcggtggatccactaacaacattccagttcatgcgctgacgggtcagtcgcacctacaggccatcacccagctgaatactcagaatagctattcacccaagcccttgacggtgctctatggtcacgacgatgccatttccagtgtagccatctacacggaactggatctggtggtctctggatccctggatggaactgtcaacgtgtacacacttcaggagggtcaatttgttagaacactgaagcccattggatgcactgagtcgtgtgtacaaatctcttttgtaaccctttcctatcatggtcacattgcattcagtgctctggatgacacctcgcactcggtgcacgtgtacagcatcaacggctgcagtctgggctccaaatacgtttctggcagggtgacgggattggctagtgcctccgactacctggtggtggccgacgatgccggcgatatcaccatgagcagactacacggcttgaagcccgttttcgacattcccctgcacgtgcccatccagacggtggtggtcactccgggcaacacccacattctggcgccgcttcgagatggacgcttggcggtgatcgccgtgcaactgccctccggcggcaataagaagcattccgtgctaaatgtttag

SEQ ID NO: 861 - protein, 878 aa, DROSOPHILA
MRLKLEPQLYPNKHENAANLRDNATSAYDTKEISEFDSTIKNAVVRDFLADDESSQLEEELRQLIDTQAQQDVALEKLVMSQDCELITLMTKVKGRIEVNQSVFTFVDLSPPTEDGSKYDFRFSTNKIREVHLRKYNLRRSALEIFLVDQTSYFLNFTTKTRNKVFTKIVGLPLPNILYGSGRSPAELLRASGLTQRWINREISNFEYLMYLNTIAGRSYNDLSQYPVFPWILADYTSDVLDLTDPKSFRDLSKPIGCINPKNEAEVRGKYDSFEDPSGAIPKFHYGTHYSNSAGVLHYLLRVEPFTSLHIDLQSGRFDVADRQFHSIPQTWKLLMDNPNDVKELIPEFFYFPEFLKNMNKFDLGHLQITKEKVDDVILPAWATTPEEFIAIHRRALESEYVSQHLHHWIDLIFGYKQKGPKAAEALNVFYYCSYEGAVDLDKITNPVEREAVEGMINNFGQVPSQLLREPHPRRLTQDETALKLVRAELRRPDLTQFLDKVVQYYCELSTPKDPIVYLSPPRSPPRSFLQLSPDVLVSISKSTILGCNSWLSFDKDQGFLLEIDATTANLKNRKRIFGPFHSSQQPHSQLFAVSTDGKLLYAGGIWDNSLRVYNLNKGKAVASVTRHLDIITCIALDNCGSYLVTGSRDCTCIVWSIQTNQQGGGSTNNIPVHALTGQSHLQAITQLNTQNSYSPKPLTVLYGHDDAISSVAIYTELDLVVSGSLDGTVNVYTLQEGQFVRTLKPIGCTESCVQISFVTLSYHGHIAFSALDDTSHSVHVYSINGCSLGSKYVSGRVTGLASASDYLVVADDAGDITMSRLHGLKPVFDIPLHVPIQTVVVTPGNTHILAPLRDGRLAVIAVQLPSGGNKKHSVLNV

SEQ ID NO: 862 - DNA, 2745 bp, DROSOPHILA
tataccgagatggagctatttcttcagctgctgctaccattgaatggccgaactcgcttttgccggcgggccacgctcttggcgtaattagtgcaattcatttatgctaaacgtgtgtggagagggaaaagtgaagcttgaaggcgtgctcaatctttgtatctctgtgttttgtcatcaaataacttcaatttatccgagagaaacggagagcgtgcgctgtgacatcactgcttactaaatccagttagcttacaagacagttaatattgtggcaaaaaggtcgcttaaaaagatattaactcaaaacatctaaattatcgtagctttattaaattaaaattattattttttatcacccacctttggtttccaaaatttgaagatagttcacaggcgaacagctttttaacatgcttaaaacttttttttgtaacatatttgtaatattttatgtaggttaataaaattatacaactttgtaggaaatgtgttttaaatacataataatcaaattatgatcccaacataaaatattcattatacctcaccaagacaaacctatggatacaaactcaaaacgtatttaataatttgactagcaaatatttaaacaaataagatcagaacttttattccctttttataaaaaatgggttcaattatacacacttactttgttgtactttccaaaagaaaaacaacaaaattgaataagaagactccaagtttaaggaaaatagtaattaaaattggcttggcgtaatcaattaagtgcagctggttatttcgaccgatcgaaattggcagaactgaagaaggtgcgtgacaatttttacatgccaccggcgccgctcgaggtgatgcgccaaaaatgaattccaattaggtgtcatcaatgtcaccaagtagcgtataaaataaacggcccacaatgggtcagacattcagtgtttggcttcggctcaagacagcagttaatcaaattcatccaactacaatggcagcaaaggtttgtgctaccaattggaggataaacgttccgggggactactagtggattaccagactgccttcgcctttttatcttggaaaaaaaaatcctaaaaagagtgtaatttattccgcagattgttatcgctttggctctgttcgccgtggcccatggcgccgtccttagaactgctgctccagtggcagtggcttctgctccggtgccagttttggccaagaccgttgagttggaggaggttgatccgcatcctcagtacacctacagctacgacgtgcaggacacgctttccggcgacaacaaggggcatgtggaggagcgcgatggtgacgtggtccgcggcgagtactccctgatcgacgccgatggctttaagcgcaccgtgacctataccgccgattccattaacggattcaacgccgtcgtccgccgtgaaccccttgccgctgttgtggccgccgagccgttgctgaaggttgctgccccattggtcaaggccgctccagtcgcccccatcgcccctgtcgccttggccgcaccagctcccattgtgcgctccgctccagtggccgtcgctgctcctctgatcaagtccgctcccctagcagttgccgctccgttcgtccgctccgcccctctggcggtggctgctcccgctcccgttctgcgtaccgctgcctatgccacgcctctgcggtacaccgcccctgcgtacaccgtcgcccaattgtaaacacccatgcgaccgctgttattttgaacccttgttttgtttctatgataataaaatgtgatttgatatgttaatttgaattgtggttttatttgggcttagaaattaagttatatttttaccaactcaattgaaattcagttcaagcatatttcaaagctttcttaattgttcccatgatttgactagtatccgtaaaaactcttatttaatccatcagtttgcttttaagcagactaacttattcttgattcttgaagtgtgcattgaaatatatttattattatcgtctaatgtgcttttcaattcaaagtatgtaatcagtgtaggtcagttccaagcgttttgagctgcccggtaacatgatataccactcaaggcagaatggtgaaagcatttaattcgcaataggcaccaaaatccgagggtctctcccaagacactaagccgcactagatttggatgcggattgcataaaagtatctctggcccccggcgtgggcagttgtaagtgcccatattccagtcgataaagtaataaggtaaatagcatagcggtaatacaataataaatgtataaaataaaaagtgacaaaaatgatttgcccaacagcgaattaatcagtttcaattcgttattcgcattttgctttgcacacgttcagtgggtataaaaagcaaagctcgtgttccagtaaatcattccacagcttcaccgtcttcgcagcagttaacggataaccaccaccagccctcctccaagtccagagccatggccttcaaggtgggtaatccttacatgaatatccgatcctttcaattacccctcttttctcccacagttcttcgctgttctcgccctcatctcggccgccagtgccggagttcttcccgtccagcaggtgtatcacgccgcccccgccgtggccacctacgcccaagcacctgtcgccgttgcccacgcccagccggttctgaccaaggccaccgaggaatacga

SEQ ID NO: 863 - DNA, 627 bp, DROSOPHILA
atggcagcaaagattgttatcgctttggctctgttcgccgtggcccatggcgccgtccttagaactgctgctccagtggcagtggcttctgctccggtgccagttttggccaagaccgttgagttggaggaggttgatccgcatcctcagtacacctacagctacgacgtgcaggacacgctttccggcgacaacaaggggcatgtggaggagcgcgatggtgacgtggtccgcggcgagtactccctgatcgacgccgatggctttaagcgcaccgtgacctataccgccgattccattaacggattcaacgccgtcgtccgccgtgaaccccttgccgctgttgtggccgccgagccgttgctgaaggttgctgccccattggtcaaggccgctccagtcgcccccatcgcccctgtcgccttggccgcaccagctcccattgtgcgctccgctccagtggccgtcgctgctcctctgatcaagtccgctcccctagcagttgccgctccgttcgtccgctccgcccctctggcggtggctgctcccgctcccgttctgcgtaccgctgcctatgccacgcctctgcggtacaccgcccctgcgtacaccgtcgcccaattgtaa

SEQ ID NO: 864 - protein, 208 aa, DROSOPHILA
MAAKIVIALALFAVAHGAVLRTAAPVAVASAPVPVLAKTVELEEVDPHPQYTYSYDVQDTLSGDNKGHVEERDGDVVRGEYSLIDADGFKRTVTYTADSINGFNAVVRREPLAAVVAAEPLLKVAAPLVKAAPVAPIAPVALAAPAPIVRSAPVAVAAPLIKSAPLAVAAPFVRSAPLAVAAPAPVLRTAAYATPLRYTAPAYTVAQL

SEQ ID NO: 865 - DNA, 2514 bp, DROSOPHILA
gtcgcccccatcgcccctgtcgccttggccgcaccagctcccattgtgcgctccgctccagtggccgtcgctgctcctctgatcaagtccgctcccctagcagttgccgctccgttcgtccgctccgcccctctggcggtggctgctcccgctcccgttctgcgtaccgctgcctatgccacgcctctgcggtacaccgcccctgcgtacaccgtcgcccaattgtaaacacccatgcgaccgctgttattttgaacccttgttttgtttctatgataataaaatgtgatttgatatgttaatttgaattgtggttttatttgggcttagaaattaagttatatttttaccaactcaattgaaattcagttcaagcatatttcaaagctttcttaattgttcccatgatttgactagtatccgtaaaaactcttatttaatccatcagtttgcttttaagcagactaacttattcttgattcttgaagtgtgcattgaaatatatttattattatcgtctaatgtgcttttcaattcaaagtatgtaatcagtgtaggtcagttccaagcgttttgagctgcccggtaacatgatataccactcaaggcagaatggtgaaagcatttaattcgcaataggcaccaaaatccgagggtctctcccaagacactaagccgcactagatttggatgcggattgcataaaagtatctctggcccccggcgtgggcagttgtaagtgcccatattccagtcgataaagtaataaggtaaatagcatagcggtaatacaataataaatgtataaaataaaaagtgacaaaaatgatttgcccaacagcgaattaatcagtttcaattcgttattcgcattttgctttgcacacgttcagtgggtataaaaagcaaagctcgtgttccagtaaatcattccacagcttcaccgtcttcgcagcagttaacggataaccaccaccagccctcctccaagtccagagccatggccttcaaggtgggtaatccttacatgaatatccgatcctttcaattacccctcttttctcccacagttcttcgctgttctcgccctcatctcggccgccagtgccggagttcttcccgtccagcaggtgtatcacgccgcccccgccgtggccacctacgcccaagcacctgtcgccgttgcccacgcccagccggttctgaccaaggccaccgaggaatacgatccccatccccagtacaagttcgcctacgatgtccaggactccctttccggagactcgaagagtcaggttgaggagcgtgatggcgacgtggtccatggcgagtactccctgatcgattccgatggctacaagcgcattgtccagtacacctccgacccggtcaacggtttcaacgccgtcgtcaaccgcgttcccctggatcacgtgaagaccgtggtgaagaccgtggctcctgtggccgtggctgctgcccctatcccagtggcctaccaccagcaccactgaggaactctcctactgatttgttgaatccgtttgtagatcaaataaattgttgaatatttgtaagctgaaagaaatcgaaacgcatttttctttacgtcttgtaagggatctcgctcattagcaggcattagtcaatcaaaatattatacatatatttatatattgtattgttaaagtaaattcgtaatattgaaaaaatctaagaattacaagttacacaaaagcacccagtaagcaacttagatgaccatcaagtgggagcccgcctggtaccaacgaaaaacgtcactggagctgcttactctgcatcaccttggctcctcttaaatccctctccagcatatgcactttgtaatcaattttctgccggtaataagtcattaagggcccaaattgatcaggcgttcgcgtccgacccattttacaccaatcaacgaaaattggggtagacatccgatcggaaagaaacgcatcgatcggaacatttcaataaaaccatctgcgtcgaaggcttattgaatttaatgcatgtaatgcggtccgctcttgaaaaccagttaaggtcactatgctgcagctttgaagtggccagaaacctttcgccaagtccctcgattattggggtccacttgagaatgatatacgcgacatcatgggacccaaactacatattctccttatctgaccagccagccgactttccagcccgaacaagtgcaaatatgccaaggtacctcaaagaggacagtaaacagtggacaacatacaacggacgacggacgacggacgacggacgacggacgacggacaaccgacggcgagggttaaggtcaaagtcagttggcattgttaattaccgttggagcgaacggacttggctgcccatttccattcccattcccatgtttagcatgtaagtacatcggcccagagattcacgccaccagttcagatttaatgccagcgcgcatgcgcaactcgcgtcgaggcacataaagtt

SEQ ID NO: 866 - DNA, 456 bp, DROSOPHILA
atggccttcaagttcttcgctgttctcgccctcatctcggccgccagtgccggagttcttcccgtccagcaggtgtatcacgccgcccccgccgtggccacctacgcccaagcacctgtcgccgttgcccacgcccagccggttctgaccaaggccaccgaggaatacgatccccatccccagtacaagttcgcctacgatgtccaggactccctttccggagactcgaagagtcaggttgaggagcgtgatggcgacgtggtccatggcgagtactccctgatcgattccgatggctacaagcgcattgtccagtacacctccgacccggtcaacggtttcaacgccgtcgtcaaccgcgttcccctggatcacgtgaagaccgtggtgaagaccgtggctcctgtggccgtggctgctgcccctatcccagtggcctaccaccagcaccactga

SEQ ID NO: 867 - protein, 151 aa, DROSOPHILA
MAFKFFAVLALISAASAGVLPVQQVYHAAPAVATYAQAPVAVAHAQPVLTKATEEYDPHPQYKFAYDVQDSLSGDSKSQVEERDGDVVHGEYSLIDSDGYKRIVQYTSDPVNGFNAVVNRVPLDHVKTVVKTVAPVAVAAAPIPVAYHQHH

SEQ ID NO: 868 - DNA, 9435 bp, DROSOPHILA
tctttgcttttcagcttttgtagttcccgaaatattctcgtccatacggacggacagacagccagacatgactagattaacttggctagtgatcctgatcatatctaaacacagttcaaaattaaactattttaataaggcgacccaaagctttccatgtcccaattctatatttgagttcgctaagttctaaaaatatttataccgataagttctttcctatatacctaaaaaaatcaatgtgcttaaaaacattaaaggtgagacttttattattcgtttgattttaaacatttttaggtttttttaatttttaaaatcttttttggctttcattaatttttttgtttattttatttacgtaaatgaataattccattacactgataagtattttcgtaatgtttcggattgcaaatttcatttaaagttgttgttgtcctatttaaattatatttaatttttaaattaaatacataggatgtttacctaaataattatgtaagatattatttgcttattaattaataactataatataatatttttgcacacctctgttaatttattgcaaagctagttgaatatgtttttaaggtacatcatttgcttttttgttccgtttttgagcttctaccgcacaattttattatgtaattttatacacttatacctacgtttctaaaggatacagagtttgatttagtgcctaaggtttagggcaaaaataaactaacacaagaatatctagatttttatgtgaaattcttttaggtacatttctatatacatacatacatccatagatgtacattttaagggatgcttcatataaaataaaatacttttcaaacgagtattttcgcttaatatagaaagtttcggtagatataaataacgattgtttggggcgtcttggctaaggtgaattaactaatgttgcttaaaaattctgctgtctattatctcgaaccatatccttgatgttacggttacgtagtcaatccttagcggtaattgccactggaggaaattgtcgctcatcgtagagctttgttggagtgtcgatggcatcgcaaagcttgcgaaacttggcagaatctacggataaggcctagttagaaaaacttattcaacaaatataaatgtttgctcaccagacattgcatctgcctggtcacctttcaggatgcttgcatagctgttgtcttgcatcggatccggattctcgatgagcacactagccgcacagctctttagcatcgtaagcgaaggctgcgtcacagttgacggattcgaaggcttagtctgcgacctttgcacgctttcgctcagctcaagctctattacatcctccagggctccgcgcaagtcgtggacagacatcagtttacagggaccaccccgttccgcaggaaactcgtgcacgtacaggaatccgtcctcgcacgcaatcagcagacgtggctccttctgaacacgggtcagggcacagatgtgctttaggccgccctgagccagctgcaccgtagcaaaggatcggtcctgagctaatacttcgctgacttgcgtgggcagcagcaaagatgacacagccttggaaaacattccgccccaggaagcgacaggtctacagctctcctctgctgctgtggatgccactgcttccttggcagaattttcggacttggcagctacatcggctacaataaaaaagcatcattgtattatatgaaaataataataataaataatattgcttcactacccacagacgttcagaaagttcaagaaagtactcaagataatacattaaggtaagcaaagccaaagcttggccaacatactcacctatcgctttcagctcaaccgtctccactgcccgcgtatcgatcttgaaaacgtggacggtctccgtgttggaggaggcgcagaggaagtctccactggccgagaagaccagtgaggcaatgcggacacagctgacgcccctccggaattcctgcacccgctggccattttttacacaaaagacccggatgacggtcccgcgctcggaggcggtggccagcagagctccgctgggcgagaaagcgagagctgagagggacgtgtcgtgggccctgatggtcatgcccgtgcgcagcttgctggcgttaaagatgcgcagctcgccgctcgtttggcagactgggaaggccaggtgcgagttgagggagagggcgcatagaccctgctcgttgggagcgatgttctcgatggagtgcaggatcttcatgtcgcggatgtcgtggatgtgtatgctctccgccaggcagacgatcaggcgttggcggttcatgcggacgcacaggatctccgacgggtaaaagcagttacagatgtcctgcttcttcttaaagtgcagcatcttgaggcagttgggcttctgggcggtgaccagcactactagtgagctgttgaacaggcgctccacgattcggatttgctccgtgttgtccttggcgaatatctcctccaccttgtcctggctagaaatcgagaacaggcgtagacccgtggggctcagcacggacagggaactgtcggaacacacagaacatcaataagagttgatgaatacggcaaattaagtaaggcatttgagaagttgcaaagcattgcattttcctaggatgaaaactcgtgaccatcagttgttttttaaaaagtacatatatgctgctaactgttctattagttgtgaatttataacgatttgtttcacgctatttcttttttgtaagggcgtggcatttgctttttaacttttagaaatgttcctttgcagacaattttttgtatccaaataagactatctctcaatacaaaacagaagtataaacataagctcagctcatgcacattttcatcctacgactactaaaattctaacgataaaataagacaaccgtcatattaattatttaattagccctctcgggcttccaaaaattgccgtagtggacggtatttcacgtccccatggcggggtattggttaaagttttcaactagcaataaccgcacctcaggaggacttcattggttacggtattgccactgcgcaaagataactaacctctgccatttttaccatataccatgccggcgctgccagaagcagttgggaattatatgcgcacacgcaggcgaaagcaacgaatttgcacactgccaaaaggtgcagcatgcttttgggctcgggctccatagttctgttacttttgatacttttgataaggctgccggtgcaggcactttggggaggctcttagagggtgggtttcgcacagtagccgttgcccaaacgaattaagtacatttggtcgtagactactttgaatttaattgtggcttgtaccaaaattgattgttcaagaaaaaccaaaaaaacttttcgtgttctagttattactcgtagagtaaaatggtatactactacaagagtgtgtaacaagtagaaataagcgtttccgaccatataaagtatacattattgatcagaatgattataaggccatattgctttaattgataaacccgaattgtagttttgaagcaaggatgttcaccgacttccttcgtacctgtccaaaatttgtgtgtaaccttataaacctaattttgtcttggacgctattattcaagcgatttacgctttacgccttctttcaggacaattattgaatcttatccaatttcaaatattaaaacatttcagtgttgatttataattaattttgatgaaactaaagagacaatactaggtttgttgtcaattgttcctccgggaaacttattaattatttgtttaccttatcggaaaggctttatattaagtaaatgcatgcaataatgtttcagaaattcgtaagtacatgaataaatcgtgtctttgaatggacgtattttattatttgaaattaatctgtccaaattgcataactatttgactaaaaattaatataataatattttgtaaatcatctcatcatttaaaatgctaccgctaatggtccagctagaattaaatttgtaaactgttgccttgaattcaatagccttacttatttcccaatttttttattctgcccattttctaaataaaattaatcttgagatcaatctttgaacatattcgagatgcgccgttccactttgtaataatggtaaatattttttccacattttattcccgttctcagaggaggtcgcttggcgacaactgtgattctccctccgccagatagatgtgcatggccttgaaaagcagcgctattcccagttgctttttctgtttcatggtccaagactgagccggcccatagtagtcgccgcgctttatattggtaaggtgattcaagcccagagcgtctataatggaagcttcgcgtgtgtatgcatcaattggcaagatgttgtgaaagacatgaagacatacgactccactgccatgttgccaaatgtccaggatgcgctccagcttacggcttcccatctttccatctcccggtggaggggagcggaaaacatctggctgtagggtgcggaatccgccgccgcgttccctatttgtcttatctttttcgcgcttctggtgaaggcgtgtgtgctgccgcatggcatcgtaaaggtgagcgtacggtcgcgaacatttacccttgcctatgtaaaaaatggagtccagaaaacgctgccaaaccccgaacttttcgagaaaagcgctctccccaggcagattccgagaaatgcgtggatcaatcaacatgtagatgaagctctgtttaaggtgcccctctcgcatgttcttttttgtcaccccacactgtgcgaaatgcgctgcagaggttgcttcatgcggcaagtaatcattgatcctcgcaaagtcctctggcgaccgcagcgtgcgatgaagctctaccgagtatcggatctgcgcatcctgggcgtgtttttgggcggccagcagcgcctccgtattgcgcttgtatttgattagctgcttgatgtacagccgcttagttgttttggtaatgggacccaccggagcccctagctgtgtcaactcccggcgcagggcgtccgtttcgtagtcaagtggcagggtataattagtgctcacggagctttccaaatcgtgcttcctctctttgggagtttgctcgactggctcccgcctgtccctgttttgtaggtatctcgcttcgtagaaaactaacccattctcgtcgtcggtgtgaacgtaggcctccttgatttgcagaaagtactcatcctggcgtgctgagctctccgccacgtccacctcgtcgccctgagctgtaaagaaactgtgctccggttccggctccacgacgacagcctgagagacttgctccactagcatctcgaacacctgacgacccgagttgggtgcatcctctgtcagattcttcgaattgtcctcgtctctgagctttttctgcaggtgctccttatagttgaagtcctcctgactaatagcatcatccaccatcgcttccacatgctcatcgtactgatggaacagggactggcgggcgcgcgagcgttccaccttctcacgccagctttcaataagagttcgccgctttggctgacaaggatcttccggctggttctgccgttggctctggatgagttgggtaaggtgagcttcagtgagggcaaacaggttcacagactcctcatcgggcaggggtggaatgtcggcgcactccacctccgttggctccggaaacttcggctgcggtcgatgccgcctgtgagtgatattaatatagtacggggaagttacatcgtgattgtacctaggctgattgggggttagagcgtcaaccacctggactcgctgttgctgctttttctggatctgcctctcgcggaagatgtgatcccggagcagctgcagcacctcaaagtggcactcttcaatggcgtagtgaactggcagcttattatcctcatcagccaggtccgcgcaagctccgcgctccagcagcatcctaaccagttccgtccgcccataaatgctagcgatgtgcagcgccgtggtctggccgtcgcacaaggcattcacgtcgaggtcggggcactcgagaaaccgctccaggattcgctgggccagtcccccgtttcgcatgccgcacacgtagtgcaagggagccagtcctcgatcgcagggcacgatgccagcatttatgctgttcctctccagcatcgacattatatcagcctcgttctcgtcctccagggcgtccaggagggtcagagccagaaagttggcgcgctgctccatcggcgtgctccctgtattgatttttacccatgcactctctcgctcctatttcaaactgcaatcaattatcgcttaattctcgccttttcaatgtcagcggtgccgcatttccaagtgtggccaaactcgcagacctggcgaggctgccagatgttcgcagtcctagttggacattggtggtggcccgtattttgagcgccacatttcaaacctgttttttgtcttcgcaagctgagctctgccaattattgcgattgatttttggcacatagttggcttggagcgcacgctccacgcgataagcttaccacagtaatgtgatcagtgagcgcaacacgtgttgttgctatttctgactatttgttctcttggatcccaaactagttcccgccaaaggcgtaacgacgctaaaatgggcccaaggttaccccttgttatgcgatagcgcattgaggtctcttgcttgttgttactctctcagttgtttttgttttcgcgttgttagtaaacaaacgcagtgtttaagtaaaataaacgcacacgttgtcattctcttacatggggcatcgaaaataaatttactgatcagacaaaagtgcacttacggtcgtttgcattaaaattaaagcttatgagcaattgcgctggcttatcaaataaataacaacaaactcaagaatcttgatgacacacacaaaaacaaaccttatccgaccgcaagtcttaagtataagtctgaagtcttaaacaatataactttaaatgcctgatcttaagattttattagttgatgtagcagtcctatgacgaaggcttaattatttcctttgatcaaaattcgcatataatatattaaatctgtgcgtacaatctaaattcctagtcagctaacagcaatttgatagtaattacataacaaaataaaaaattttggaataatgctgtttacattttaaatttgtacattgctgatagacttgagacttgagtttttttttttaaaactacagagtatcgtaggaaaacccccaaaagataatagccaattgtttgacttgcgttttcgcgtacattcacccgtgcttgatttgttactgattggaaatctctcttttgctttgtttgagctatgacaaatttttcagattatattcttttcgattcgattttcaccacaaatagtcatattgatgtttgcgtttctttctaaggcttgctcgcacttcttccctcaccctgttcttggatgacatcaacgtaccgtgcaatagcgaaactggttaattaagctcgagattaaggctgcgttgatagctacagtgcgctcccgccagattgaccccctttgtttcttgtcattttatttcatccttatcgctccgcactttcatttgttccttagtcatcagctgttgcgcataaacaattgattgtgcgccaattgtgcgagtgttggtgtcccgcacagtggccatcagaatggaaatactgctaaatcggtcgcttgttggccactgacagtgtaccgagttcggttcccagccccctcccgaaacgggaaaggcattccaaaatgttagatgaatgcatgctattgtaattggaactgcttgtttgcatgttctaataaactacacacacacacgacacgaaaaatgacgccaattcacgcttacccacagacacactaacgatccccgtccaccttccccacagcagctgttttcgccttatttacccgtctcatttgtcgatttttgtgtctcaattgtttgccacttttcgctttggtgaccttccgggatttaaggatttaagcacagatgtcgctacttacgtaaagtcctggttgaagttcatttgatatgtggtcattgctgctgaagatttgtgctttggtgattgtattttttttatatagttacactttcactggtctttagatgctttttttcagcgatattcagttgcagagtcccgtcgtttgagtacacaagatattgatcgacgatggcagatgagcaaagcgaaatgatttcacttgatattgaaaactaaattcgactgttttgcgtcgtctttgttgttttgctgcgactgtttttctcgttctatctatcaacaaattccccctacacacaacacacacacacataaatcatcatcattggaactgggttcgggaactgaaccagccgtgttcaccaaatgccatatataccgttaaatcatttgtgtaacggaaaatgtaaaattgttattaaaaattgaaatggacaatatatatacatgtatccgcatatatttgcattggaaaaatcataaaattacctcatatttcacacaattacagtgcatttagtgtgtatatgtcagtttcatttctttttatataaacattaaaatagttttttccaataagtatctacaattatctaagtgttgtgtcaaattttctatcaaatcggaacaaaacagtggacgtgttaagcttcttataaggttcttctgtcttagcaaaattgtatttcccataatgtatttccctacttcaacttgatctacactaaaactttataccttttgttcctaatttatattataacctatattgttcgtcgatttaataaattttgcatagcctatttaatagtaaaacaatttttagatttgtaacatttaatacacatttcatagtctagcgctaacttaaaaataaaactgtcttaacgcgaatctgagtaagttataaatgtattcgtagtttgtaaaaatcgttttcatgcatacgccaagtatactagaaactagttccccagtgcatcgactgccaactcgcttcaattacatgggtgcaatctgcagtattgtcgaaaagtgactgcgcggccacactgaaactcacaacagaaaataaagcattttcgcttgctttaaaataggattttatcccgtacaagagctgtctcgcggcaagaaatatgcaccctcgaagtctcgcagtgccgtgcgaccagagaacttgatccttggacaaatgactcgtgtttgcagtgcccgttttgaggttttgccaga

SEQ ID NO: 869 - DNA, 1619 bp, DROSOPHILA
acgacgcaaaacagtcgaatttagttttcaatatcaagtgaaatcatttcgctttgctcatctgccatcgtcgatcaatatcttgtgtactcaaacgacgggactctgcaactgaatatcgctgaaaaaaagcatctaaagaccagtgaaagtgtaactatataaaaaaaatacaatcaccaaagcacaaatcttcagcagcaatgaccacatatcaaatgaacttcaaccaggactttacttccctgtccgtgctgagccccacgggtctacgcctgttctcgatttctagccaggacaaggtggaggagatattcgccaaggacaacacggagcaaatccgaatcgtggagcgcctgttcaacagctcactagtagtgctggtcaccgcccagaagcccaactgcctcaagatgctgcactttaagaagaagcaggacatctgtaactgcttttacccgtcggagatcctgtgcgtccgcatgaaccgccaacgcctgatcgtctgcctggcggagagcatacacatccacgacatccgcgacatgaagatcctgcactccatcgagaacatcgctcccaacgagcagggtctatgcgccctctccctcaactcgcacctggccttcccagtctgccaaacgagcggcgagctgcgcatctttaacgccagcaagctgcgcacgggcatgaccatcagggcccacgacacgtccctctcagctctcgctttctcgcccagcggagctctgctggccaccgcctccgagcgcgggaccgtcatccgggtcttttgtgtaaaaaatggccagcgggtgcaggaattccggaggggcgtcagctgtgtccgcattgcctcactggtcttctcggccagtggagacttcctctgcgcctcctccaacacggagaccgtccacgttttcaagatcgatacgcgggcagtggagacggttgagctgaaagcgatagccgatgtagctgccaagtccgaaaattctgccaaggaagcagtggcatccacagcagcagaggagagctgtagacctgtcgcttcctggggcggaatgttttccaaggctgtgtcatctttgctgctgcccacgcaagtcagcgaagtattagctcaggaccgatcctttgctacggtgcagctggctcagggcggcctaaagcacatctgtgccctgacccgtgttcagaaggagccacgtctgctgattgcgtgcgaggacggattcctgtacgtgcacgagtttcctgcggaacggggtggtccctgtaaactgatgtctgtccacgacttgcgcggagccctggaggatgtaatagagcttgagctgagcgaaagcgtgcaaaggtcgcagactaagccttcgaatccgtcaactgtgacgcagccttcgcttacgatgctaaagagctgtgcggctagtgtgctcatcgagaatccggatccgatgcaagacaacagctatgcaagcatcctgaaaggtgaccaggcagatgcaatgtctgattctgccaagtttcgcaagctttgcgatgccatcgacactccaacaaagctctacgatgagcgacaatttcctccagtggcaattaccgctaaggattga

SEQ ID NO: 870 - protein, 466 aa, DROSOPHILA
MNFNQDFTSLSVLSPTGLRLFSISSQDKVEEIFAKDNTEQIRIVERLFNSSLVVLVTAQKPNCLKMLHFKKKQDICNCFYPSEILCVRMNRQRLIVCLAESIHIHDIRDMKILHSIENIAPNEQGLCALSLNSHLAFPVCQTSGELRIFNASKLRTGMTIRAHDTSLSALAFSPSGALLATASERGTVIRVFCVKNGQRVQEFRRGVSCVRIASLVFSASGDFLCASSNTETVHVFKIDTRAVETVELKAIADVAAKSENSAKEAVASTAAEESCRPVASWGGMFSKAVSSLLLPTQVSEVLAQDRSFATVQLAQGGLKHICALTRVQKEPRLLIACEDGFLYVHEFPAERGGPCKLMSVHDLRGALEDVIELELSESVQRSQTKPSNPSTVTQPSLTMLKSCAASVLIENPDPMQDNSYASILKGDQADAMSDSAKFRKLCDAIDTPTKLYDERQFPPVAITAKD

SEQ ID NO: 871 - DNA, 6789 bp, DROSOPHILA
acaaaattcagtgcttctacacgactctttccagctaaataatattaccataacttgaaagcctcagaagttagaagatttattttcaatacaaattcctaactaagattaattcgcaagcggtgtatttacactacctaaaatccaaaaatgtattcctttacattaacttttgattcaataaagcacacttaaaaatggtataaaaccctgtgacagctggttctacttcttgaagcacctctgtatttacattatcaccctttgcgtttttacagtcacacacttgaatatttgaatatcacagtaattaatcaaaaagtcagagaaataagcagcacatacaaataaatcatcgatcgtcatcgtcggtcaagaaactataaagcacgtccacatcgaccccccagcccgtaaccccctgtcaaatcgaaggaacccatttcgctttaataaagttgtcaacccacgatactggcgtgtgaagcgctctttgaatatacacagtgggaaaatttgtggctttaaaccaccgaataagtagttagtagtcagtagacagtattaataagctgaaagccataagcttgtataattttatacaccctttcttcagtcagtgctgggaatttaataattttaaaaggtttttagtattaattattaaaatttaagggcaatcatctgctacttctttcagtgtactctttgtgaattgtcaagaggtcgttttgcaattcgttttggagtgcttaattgtgcgcccataacggtaaacgtagcgaaggccgaagaattttaggactcccccttttcagcccccacgaaaacgcattttatgaatgaaaagcgggaggcggaaagctcgacttatcccctgagctttgactttaggcctctggggagcttcgcggaggaaacccaaaaagtgcgcggagctttagtgcgaaaaacacattttcaccaagcacattttccattctgtttgttgttctcgctgcgtgcggtttgtgttctatttatctcgaatttgtaggctttatccaccagttatagtttgccaagtcggttgcctttccccagtaacagtagtgaacgtaggataaaacggacttattacctgaattaatattcatagccgcgtgtcattccaaaaatgtgcgaatggcatcatttggccaggccaaaaagcaaagacccctgtgatataagctggccacaatgggcataaaaagctccatggccagtgaatctgagctttcgtcccgttagtcgcatcatcagctgacccggagcaacaacaacctgtgcggaggcacaaagtttcgcgctaaaaatacccaaagttcatggtcaacgtcctgggcggagcgggctgattgaatccctgatattggcatcccgaaatggccttgattcgctgctgcttcgagccaccggaactgcctgagttcttcgacagcttcgtgcaaaagtgcacggatcccagttgtaagtacatataatgaaggagattttctctaaaagtaaaaatatttatataaattaataaaataagaatattgaaggcaaacatgtacgaaatattaaatgttaaaatagtttaaaggttgactacggtttatagttaatttgttacttcttaactattaaataaaaataaaatagctccagtttttgttgatttgaagtgaaattcaaaaagcacattgtagccccgcacagtgggcatcatttgcaagttagcagatacaattattattttacagtatggcagtgttcttacaccgcactctacactgtatttgcctgcactaatcgcacggtcacacctcttgcctatcgataagtcggccgagagtgtctcatccacgaaaggaaaacaaaagaaaagtcgcgctgcgctcttttatcgctgcgttttattatctaatgccgcgataaacacccagagaagcgaatcgcgacgccaaaatgcctggtaagctgtcggcgcgctcaggtgtcatcagcttggcgtgccacgggccattgagccagatgacctcgccaccagtcaattggccaggaggaatgacgacaccgacaaatcgatggagttgggtggtgctctgtggggcagcgcggaagtcgggcggcggaagccatcaacctacgagcgatgagccgtccaatcattcaaacagcaaaactatagtccactggggcaattatcgcgataagattaagcggaaaatggtggtcgcacccagtcgacccgagtcggttttcacaccaccactttcgcctccaccaccatcactctctccagcggagcggtggcgccatgttcacctaccgctgcatccacgtttgtctgcctaatccctctaaccgctgtgcatttccccgcgctcttctaggctgctgtggatgctgctcagcgctcaggccgcgctacaagcgcttggtcgataacatcttcccggttaaccctgaggacgggctggtcaagtcgaacatggagaagctgaccttctactcgctgagctcgccggacaagctggaccggattggggagtacctgtaccaaaaggccaccaaggatattaaccgaaagcgctataagtaagtgggtcaagaacttgctacgtaatcagcttgttaatctttactcttgtttagactagccgaaattgccatggaggccatggacctgcttctgcaggcttgtcatgcccagaccacactcaacttgtttgttgagtccttcctgcggatggtgcaaaagcttctggaggactcgaaccccaaccttaagataatggccaccaattcggtaagtcttcacttagtggaacacttcactttactctactcactcctctgcccttgcagtttgtgaagttcgccaacatcaacgaggacacaccatcttaccatcgacgatacgacttcttcatctcgaagttctcttcgatgtgccacagcgatgcggctagcatgcgtgacagtctgcgtctggcgggaatcaagggattgcagggcgtcatccggaaaacagtgtccgacgatcttgtggagaacatctgggaggcggagcacatggaaaagattgtgccctcgctgctattcaatatgcaggtgtgtattcttagggtcttgagccttgtccagcccttcggcgatggatacagtcatccatcccagttgcctgtcttattggccaattattgtactaatttcgatgtattttgcatttcgttttcgtgtattttgttaatgcaaaccaaacccaaaccaaccacaacacaaccaacacacaacaacaaccaaacagttttgtgtaaacgttatgttcgtgaagaaaaatttactggcggtaatgatcaaatcgaattgttccattacataaccatattagtaaactctgactagtaacctttagcgtctgtttcggtctcaatactaacacattttttatcactgtagtccggggatctaacgcccgtagaggacgccaccaatgtgacgccaccggccttggccgaggaagttctccgtgagctggtgggacgcgcctccttcggacacattcgcagtgtactaaagccgctgctgacgtaagtagcacccccgcgaagaatagcaactcgttgctaatcagaggtttactctttctgatttacagccacttggaccgacacgagttgtgggttcccaacacatttgccattcacacattccgcatcgtgatgatctccatacagccacagtactcgtataccgttgtggagacgctgatgcagcatctggacaacaacttcaagtcctcgccgaaaacgcgcacttcgctcgctgtcgttctgtcgaaaattatagctattgcagcgggagaaagtgtcggtccctcggccctggacatcatcaacaacctgctgacccacctgcggacgagtgtgagcactaccagcgagataacaccagaggagtcacaatatcaggaggcgctgatcaacgcactaggcgaatttgccaaccatcatcccgactatcaaaagatcgagatcatgctgttcatcatgaacaccgtgccagacctgtccaagaagagcaagggagatcaaatgctgcagaacattctgcttaaatcactgctcaaggttggcactcagtacagcaccgtctccttcgaaaaggcattccccgcctccttcctgcagccgctgctcaagatggcacgcgctccacacaatcccacgcgcatggttgtgatgcaaatattgcaggcccttctagatcgtcatcagaacgagcaggtgctcagtagcgtgagtgtgaagccatacccggctctctcccaagagccgccgtcgcgctccgacataattttcacgcacaaatacggcgccaacatcatgcaggcgttgatcgactccatggcattgtcggatcgggttgacgccctgacctccagttttaataccgctgctctactcatcgtggaaatgtcctgcaacgagaccgtgcaagagtttcttctgtttatcctcgggtatgattgctgtggtagtatctaaaaaacattcttatcgtgttgttccacctcctgcagaatccagcaggtagcctgcaccgtggacactctgggaaacgtgcacaaatgtagtctgcacgccatctcaattggcctgctggtgctaatctcgcgtgttagtggcatcaacaaccttctggagtatgctcaaaagatagtggacgcacggcgcgaggaggccagccatttccttcccccactgctcgagcccaagaagctagccggaaagacattcaatctacagctgccgcacttggccatagataagttggcgctgggcgagtgcttgcagaacgcgggcatggacgcccaacgcctcaacaccggtgctccgtactcgcttaaccagaccgatcacccaggtcaccgccactcttgggtggagtcggtaagcaaccagctgacgcagcgcaacagctcagcggatctgacggtgtacaacggcgatgtggacagcgttagcagctcgccgggagtgtgcaaaaagctccttgcgccggagttcaacttcgatgccatgaagcgagcactggcggagccaactgaggccgctaagcgggagcaacgcgagcgccagatgcagatagtgcgcaccttccgcgagggcgagtttgacgaccttatgagacgcacagaacctaaggtgagtgaagaaatcagatctcttctttacaacatagtgctgtgtctaactgacactgctaatcgagttagaaaacaaatgcttgtgcttttagtgttctagcactaaacaacttcgtacgtaaggaactctagatatctggtgcagtgagctaaaacattgtcatgtttccattcatttacagcacgatctcatccagaaccgccttaacgagcttttcaactcgctagccgtggagcgtcagatcacgcaaagcgacaccaagtccagtcagttgcaagccagcaatgagaagcccatctacgagacgaactttccggaactcttctactactaaaccgtatccctcgaaccgaaaacgatatgcggcgaatattctctaatcaattcatgtatatctatagctgagaaagcgaatttgtttggtgtctgtatggaactaggtaaatcttattaaattttttgttgttaattgcaaacaattcaattgttaaacgaccccgaatatgtactttgatttaattgttagacaaatacatatatgtatacatatatattttagactcgtgtattcagatgatttcaaatttctcccaaaatgggacgtgctgtaaaaaataatagagtaaggtcggcccattgcaacagtgccgccaaggcgacgtcaatcagtggacattcgatgctaaagcaaaacaacgattgcaatggacgcaacccgttctttcagtttctggcctactttcgaaaatgttccaacaactgccttggccacttgccgtcggatcgggtaactctaattgccggcaaggtgtggaattacatgagtctgtcggagaaagaaccctttatcgctgctgcgcgaagatttaactacacgtatcgatcgcggagcagaaaagtcaactgggtcctggcgcaactgcgaaaatccgctgctggggaagaatgccgaccacaggcacagtggatgttgatgaactttttaaagtcttggcaggaatctgtggtgaggaaccttctcgacctggatcacaatcaaaactaaatcagagcagatttttattaagtgtaatctttaataaatgatcactcaaggtaatagttactgtgcgtacatttagcgagtaaaaatgtgttagggacagtaattacatgcgttgaacttgcaggattcgaagacgcttaaaccataatttctttgccgcgttttttcttgttacttaaacataacaattaatctttaaattccaaatttacaaactatttgcaacgcctacatattgtgcgagggcactagagtgtgcgtctactccatttaagtagatgacgtaaagcgtcattacatgatactagtgatgtaaacgatatacaaaaatatagatctgcgcattccaaaacgattgcggatatgcttatactcgatgtacaaacgtctagatggagtgatcagccgtagctaatcgcgatggcgataaacgaatttacaaaacaactacaacgagcccgaactgctgcgggtaaatgaacaaaaaaatggtggtagtggtggtactggtattggtttggt

SEQ ID NO: 872 - DNA, 3102 bp, DROSOPHILA
cgtgcggtttgtgttctatttatctcgaatttgtaggctttatccaccagttatagtttgccaagtcggttgcctttccccagtaacagtagtgaacgtaggataaaacggacttattacctgaattaatattcatagccgcgtgtcattccaaaaatgtgcgaatggcatcatttggccaggccaaaaagcaaagacccctgtgatataagctggccacaatgggcataaaaagctccatggccagtgaatctgagctttcgtcccgttagtcgcatcatcagctgacccggagcaacaacaacctgtgcggaggcacaaagtttcgcgctaaaaatacccaaagttcatggtcaacgtcctgggcggagcgggctgattgaatccctgatattggcatcccgaaatggccttgattcgctgctgcttcgagccaccggaactgcctgagttcttcgacagcttcgtgcaaaagtgcacggatcccagttgctgctgtggatgctgctcagcgctcaggccgcgctacaagcgcttggtcgataacatcttcccggttaaccctgaggacgggctggtcaagtcgaacatggagaagctgaccttctactcgctgagctcgccggacaagctggaccggattggggagtacctgtaccaaaaggccaccaaggatattaaccgaaagcgctataaactagccgaaattgccatggaggccatggacctgcttctgcaggcttgtcatgcccagaccacactcaacttgtttgttgagtccttcctgcggatggtgcaaaagcttctggaggactcgaaccccaaccttaagataatggccaccaattcgtttgtgaagttcgccaacatcaacgaggacacaccatcttaccatcgacgatacgacttcttcatctcgaagttctcttcgatgtgccacagcgatgcggctagcatgcgtgacagtctgcgtctggcgggaatcaagggattgcagggcgtcatccggaaaacagtgtccgacgatcttgtggagaacatctgggaggcggagcacatggaaaagattgtgccctcgctgctattcaatatgcagtccggggatctaacgcccgtagaggacgccaccaatgtgacgccaccggccttggccgaggaagttctccgtgagctggtgggacgcgcctccttcggacacattcgcagtgtactaaagccgctgctgacccacttggaccgacacgagttgtgggttcccaacacatttgccattcacacattccgcatcgtgatgatctccatacagccacagtactcgtataccgttgtggagacgctgatgcagcatctggacaacaacttcaagtcctcgccgaaaacgcgcacttcgctcgctgtcgttctgtcgaaaattatagctattgcagcgggagaaagtgtcggtccctcggccctggacatcatcaacaacctgctgacccacctgcggacgagtgtgagcactaccagcgagataacaccagaggagtcacaatatcaggaggcgctgatcaacgcactaggcgaatttgccaaccatcatcccgactatcaaaagatcgagatcatgctgttcatcatgaacaccgtgccagacctgtccaagaagagcaagggagatcaaatgctgcagaacattctgcttaaatcactgctcaaggttggcactcagtacagcaccgtctccttcgaaaaggcattccccgcctccttcctgcagccgctgctcaagatggcacgcgctccacacaatcccacgcgcatggttgtgatgcaaatattgcaggcccttctagatcgtcatcagaacgagcaggtgctcagtagcgtgagtgtgaagccatacccggctctctcccaagagccgccgtcgcgctccgacataattttcacgcacaaatacggcgccaacatcatgcaggcgttgatcgactccatggcattgtcggatcgggttgacgccctgacctccagttttaataccgctgctctactcatcgtggaaatgtcctgcaacgagaccgtgcaagagtttcttctgtttatcctcggaatccagcaggtagcctgcaccgtggacactctgggaaacgtgcacaaatgtagtctgcacgccatctcaattggcctgctggtgctaatctcgcgtgttagtggcatcaacaaccttctggagtatgctcaaaagatagtggacgcacggcgcgaggaggccagccatttccttcccccactgctcgagcccaagaagctagccggaaagacattcaatctacagctgccgcacttggccatagataagttggcgctgggcgagtgcttgcagaacgcgggcatggacgcccaacgcctcaacaccggtgctccgtactcgcttaaccagaccgatcacccaggtcaccgccactcttgggtggagtcggtaagcaaccagctgacgcagcgcaacagctcagcggatctgacggtgtacaacggcgatgtggacagcgttagcagctcgccgggagtgtgcaaaaagctccttgcgccggagttcaacttcgatgccatgaagcgagcactggcggagccaactgaggccgctaagcgggagcaacgcgagcgccagatgcagatagtgcgcaccttccgcgagggcgagtttgacgaccttatgagacgcacagaacctaagcacgatctcatccagaaccgccttaacgagcttttcaactcgctagccgtggagcgtcagatcacgcaaagcgacaccaagtccagtcagttgcaagccagcaatgagaagcccatctacgagacgaactttccggaactcttctactactaaaccgtatccctcgaaccgaaaacgatatgcggcgaatattctctaatcaattcatgtatatctatagctgagaaagcgaatttgtttggtgtctgtatggaactaggtaaatcttattaaattttttgttgttaattgcaaacaattcaattgttaaacgaccccgaatatgtactttgatttaattgttagacaaatacatatatgtatacatatatattttagactcgtgt

SEQ ID NO: 873 - protein, 820 aa, DROSOPHILA
MALIRCCFEPPELPEFFDSFVQKCTDPSCCCGCCSALRPRYKRLVDNIFPVNPEDGLVKSNMEKLTFYSLSSPDKLDRIGEYLYQKATKDINRKRYKLAEIAMEAMDLLLQACHAQTTLNLFVESFLRMVQKLLEDSNPNLKIMATNSFVKFANINEDTPSYHRRYDFFISKFSSMCHSDAASMRDSLRLAGIKGLQGVIRKTVSDDLVENIWEAEHMEKIVPSLLFNMQSGDLTPVEDATNVTPPALAEEVLRELVGRASFGHIRSVLKPLLTHLDRHELWVPNTFAIHTFRIVMISIQPQYSYTVVETLMQHLDNNFKSSPKTRTSLAVVLSKIIAIAAGESVGPSALDIINNLLTHLRTSVSTTSEITPEESQYQEALINALGEFANHHPDYQKIEIMLFIMNTVPDLSKKSKGDQMLQNILLKSLLKVGTQYSTVSFEKAFPASFLQPLLKMARAPHNPTRMVVMQILQALLDRHQNEQVLSSVSVKPYPALSQEPPSRSDIIFTHKYGANIMQALIDSMALSDRVDALTSSFNTAALLIVEMSCNETVQEFLLFILGIQQVACTVDTLGNVHKCSLHAISIGLLVLISRVSGINNLLEYAQKIVDARREEASHFLPPLLEPKKLAGKTFNLQLPHLAIDKLALGECLQNAGMDAQRLNTGAPYSLNQTDHPGHRHSWVESVSNQLTQRNSSADLTVYNGDVDSVSSSPGVCKKLLAPEFNFDAMKRALAEPTEAAKREQRERQMQIVRTFREGEFDDLMRRTEPKHDLIQNRLNELFNSLAVERQITQSDTKSSQLQASNEKPIYETNFPELFYY

SEQ ID NO: 874 - DNA, 5355 bp, DROSOPHILA
gatccaagatctgaccgagttttctcaatttgcatatcgagggtcgcgagctcctttgaggggtgctatcgtcggggcaagggtttgtcatgggaacaaaagacgcattcattgccgaagaatagccgaaatcaatatttgaggtaattaattaactgcatcaatattggagacgaggaaatccataacgatattcacatttaccaatcaattgattgacgattgaatgttatcttgaattttatcgctagaagtcatttggaaagttattacgctcatatttcatattttaattaaatatcgttaaccgaattttttaactatcagaaatgaactggttttcatcaaaaagttatttttttatactttgttaaataaattgttgaataaagtggtttacctcgatttcatcatttttatatctgatcttgaaaaattttacattatttaattttaaatcaagctcactctcaattttttgttattaaatattctcattctgctaattcaaatcgagcggttttatttctgttctccataacgcgatctggcaacctcttcccttaaaatgtttcatccctgggaagagggttgcctctgcttcaaaaaaatggcgcgaaatttcaacatatcgtaaattcaatataacaaatatctgatgggcaaatttttaacagattatttttaaaatcttttttttatatatttacggtcaattacattttgattacttatttaacatttaaccaaaacttttagaaaagaaatataaaatttttagaaatattcgaatacttcatttgcgaatcgaaaaaaattactgaaataaaattatttatattaatgggaaatattggccatttgaaaagcacctgctgtgctgagtgaccgcacttcgctcgtcaagtgtggtattttttagtacgtttcggcgcttagcgcgtgcggtcacacaaacgccaggtacgtgtccaaaatcatgaatcgaaagtaaatgaacaatgttgctgcttcgaaacgcaaatgctcgctaaactcgtgaaattgggattcggaatcgcaggtgcgaaatcacacgggtggggaaatcggattcagatgcactccgtcggcgaagcgcaaaacaactgagcacgcaacaacaaaaacagtgacagcaacagtcataacaatagcaacactcacatcaaaacacaatgacaacacgcacggtgcagagaaatctgtgggcctccgctgcggtggtcctagttctgctcctgctctggacggacaccactggaggctattttgcagccatcgatgagacggagactagcaaaaactgcttctgcgaggtgggttaatattcggattattgtacacagtaacggtaaaattaattgatgatttaagccatttaaaaatatgtttttcaaaaatattaagaagttgatttcatcatcatttgcttatcctttaacgatctctacttagatcttaaaaaaaggcttttaaaattgtattttaaactgaaaagtatgtagttgaaatactggagattagtaaaaaagaattcgtgcttatattagttttgctttaattgcagtgcagaacgtacagaatactcaattatttatttgtgataattaattaattacacttgcttcactaataatatttgacctagtatatgtatagtactcagctaacttgagatcaaatttttgtatacctactattgccacctcgactgtatgatatttatattcttcgcagttggagggatctataaacgactgcagctgcgatgtggacacggtggatcactttaacaacatgaaaatctatccgcgattgcagagtctgctggtgaagaacttcttccgcttctacaaggtgaacctgcggcaggagtgccccttctggccggatgacagtcgctgtgcgatgcgcttctgccaggtggagaactgcgaggagcaagcgattccccagggcatcaaggacaagggagagcacaaggagaaggccgcgtttaaagtaagattccgggtatttccatcgctatcgtctacactacgcctcttatcttattcaatcttttgccaaaatcaccactatctacccaatcactcaatgggcttgcaggtgatttatttttattcgaatgtctgcggctccacaagaatgaaccgcatcgataatcttcaactgagcctacactgttaatgatgtggcctttgattttgttttgcaatgctgacgtggtcttcacatctcatcaagcgtttgcccgcccctttttaattgtcgattaacttattaacttatctaaaatattgatcactccttagcagactataccatacagtaaaatattataaacaaaaattctataccccaaaatgagaatgaaaatcaattattgtttttaaagataactcaaaaaaaaaaaaaaaaaaagaaacaatgcagttcaatatacgtatgtatttaacagcagaggttcttatcttcacaaacaaaaaacaattgatactcgtacatagcaaaaaaaaaacaaaaccatattatctaccagatactttattaacgtatagataattatttataccgataatgccgttcaagaatgtattgatatatttgtgaaaagctttatctgtttcttcaaagattacttaaccatcaatgaaataatgactgacttaaaacttaagcttatttgtttgcacaactggctcacttcaccttactgacttcctcatctgcatcttgtatttacagtacacgcgcgaggcgcaagttgggggctcagcgtgctcggatggagaggatttcgacagctctctgggtttcctggacacgagcataagtgatcaggcgcatcgggaattcgaactgtgggcgaagcatgatgaggcggaagaggacttttgcatcgtggacgatcatgaggagggatcccagtatgtggatctgctcctaaatcctgagcggtacaccggctataagggcgaatcggcacatcgcatctggaagagcatctatctggagaactgcttcggtggcaacaacgagacggctaacaagttctctaactacgtgcctcatttggatttgcgaaatgtgtgcttggagcagcgtgccttttatcgcattatttctggcctgcactctagtatcaacattcatctgtgctccaaatacctgctgtcagagtcaaaggacttcttagatccgcagggcatctggggtcccaacgtaaaggagtttaaacgacgctttagtccagaaaccacaagcggtgaaggtccgcactggctgcgaaacctctacttcatctatctgatagaactgcgcgccttggctaaggctgctccttatctgcggcgagaagattactacacgggcatcgcagaggaggatgatgaggttaaactagccatcaatgatatgttgagtgtcatagagtgagtataggaatattcttttttcttacaatgtttcaatttagcttctttttgtagaaattttcaatcccacttcgacgagaacgccctcttcagtaatggaatcgcttctattaagttcaagcacgactataaggaaaagttccgaaacatatcccgcatcatgagctgcgtaggctgcgacaagtgcaaactgtgggggaagctgcagacgcagggattgggtactgctttaaagattctctactcagagaagctcaatctggccacggaaagcgggttgtgggacaagccgcacatcgaagcggatcccatcttcaggctgtcgcgaacagagattgtagctctatttaatgcgtttggcaggtgcgttttaaatgataaaatggcatttctaaaatacttacatctatacacttgcttgcagactatccaacagtatatacgagatggagaatttccggtgcgtgctgaggtaacccatccagactggactaaccgagcgacgagccggatctcattcgcctcacatgagcagctagttaattcatacgcacatcgctggggctgcgtcttggacttcctactgaatgcggtttccctcccatagttcgtaacatttttgaggccagaggctagtaaccccaggatagctgcttccctgtacatacaaactattaccctaggctacttgtactttagcgcaccgtatcaccctaaaaaaaaccaaatgacaaaaaaataacccatgcaggatgcaggtgtttattgtaagttagcatagtatttattgtatctggaggagtttgtgagcggaacttaatgagcaagtaaacgcattgtgcaataccaagaccttacgacacaaggcgctaaaataaacttctgtctgttttgaaacaccctctctaacgtctccatcgatacgggtcctagcaaccgagttgtttgccattccagctgtcggcttttgtgacattagcaaattgctatccagtcgatcgacacttgattgctcttgtgactatattttctgtgcgaaatggtgcttcttcaggtgaaacgcggagacgagcttatcttcctctatgagacaagcgttaaggagaagactgatactgtgcttcgcgagcttgtggctctgcacaatggtcaactgaagattcagcgtgtctgcatggagattgaggagctggccgaacatggcaccatggtgccgcctgaaatgattggcctcaacgaggaacagagggaagagctcaagcttaaggatgtctgggcggataagtgcatcccgtctggtggtttcactatcaacaaggatccgctccttcgccgtaacggacagcagccaactgaggcgatgcaaaaggtcctggcaggtgccatgaacgacgccaaggctatggtggatcgggtaatgtctcctcgaagtttatccctagaactgtttttgctaaatggttaccaacattccctctagcgcttagctaaatcctcaaagaccttgaccccaaagatcgttgaggaggcgttgaacctcctgcgtggtggtgtcactattgtatatcccatgcaattgccgccccacgactccatacgcatggagttcaccaataccgaggatctgactggcacccaggcctccaaggaggtcatcgaaccgtccaaggctcagttctggtttgcaggacaccagatgctgatggggaagctaatgagcgactatttgggtcacaacgacaaaaccaaggtaactgtccctttgatatcctaaatatatttccttcataacccatcctaatacttaaccaggtggtcgtgaagctaaatcaaattggtgaaggaccaccgggacgcgaagccgtgatctccgatcccttgcgtcgccagatgatgg

SEQ ID NO: 875 - DNA, 2069 bp, DROSOPHILA
aatgttgctgcttcgaaacgcaaatgctcgctaaactcgtgaaattgggattcggaatcgcaggtgcgaaatcacacgggtggggaaatcggattcagatgcactccgtcggcgaagcgcaaaacaactgagcacgcaacaacaaaaacagtgacagcaacagtcataacaatagcaacactcacatcaaaacacaatgacaacacgcacggtgcagagaaatctgtgggcctccgctgcggtggtcctagttctgctcctgctctggacggacaccactggaggctattttgcagccatcgatgagacggagactagcaaaaactgcttctgcgagttggagggatctataaacgactgcagctgcgatgtggacacggtggatcactttaacaacatgaaaatctatccgcgattgcagagtctgctggtgaagaacttcttccgcttctacaaggtgaacctgcggcaggagtgccccttctggccggatgacagtcgctgtgcgatgcgcttctgccaggtggagaactgcgaggagcaagcgattccccagggcatcaaggacaagggagagcacaaggagaaggccgcgtttaaatacacgcgcgaggcgcaagttgggggctcagcgtgctcggatggagaggatttcgacagctctctgggtttcctggacacgagcataagtgatcaggcgcatcgggaattcgaactgtgggcgaagcatgatgaggcggaagaggacttttgcatcgtggacgatcatgaggagggatcccagtatgtggatctgctcctaaatcctgagcggtacaccggctataagggcgaatcggcacatcgcatctggaagagcatctatctggagaactgcttcggtggcaacaacgagacggctaacaagttctctaactacgtgcctcatttggatttgcgaaatgtgtgcttggagcagcgtgccttttatcgcattatttctggcctgcactctagtatcaacattcatctgtgctccaaatacctgctgtcagagtcaaaggacttcttagatccgcagggcatctggggtcccaacgtaaaggagtttaaacgacgctttagtccagaaaccacaagcggtgaaggtccgcactggctgcgaaacctctacttcatctatctgatagaactgcgcgccttggctaaggctgctccttatctgcggcgagaagattactacacgggcatcgcagaggaggatgatgaggttaaactagccatcaatgatatgttgagtgtcatagaaaattttcaatcccacttcgacgagaacgccctcttcagtaatggaatcgcttctattaagttcaagcacgactataaggaaaagttccgaaacatatcccgcatcatgagctgcgtaggctgcgacaagtgcaaactgtgggggaagctgcagacgcagggattgggtactgctttaaagattctctactcagagaagctcaatctggccacggaaagcgggttgtgggacaagccgcacatcgaagcggatcccatcttcaggctgtcgcgaacagagattgtagctctatttaatgcgtttggcagactatccaacagtatatacgagatggagaatttccggtgcgtgctgaggtaacccatccagactggactaaccgagcgacgagccggatctcattcgcctcacatgagcagctagttaattcatacgcacatcgctggggctgcgtcttggacttcctactgaatgcggtttccctcccatagttcgtaacatttttgaggccagaggctagtaaccccaggatagctgcttccctgtacatacaaactattaccctaggctacttgtactttagcgcaccgtatcaccctaaaaaaaaccaaatgacaaaaaaataacccatgcaggatgcaggtgtttattgtaagttagcatagtatttattgtatctggaggagtttgtgagcggaacttaatgagcaagtaaacgcattgtgcaataccaagaccttacgacacaaggcgctaaaataaacttctgtctgttttgaaa

SEQ ID NO: 876 - protein, 416 aa, DROSOPHILA
MKIYPRLQSLLVKNFFRFYKVNLRQECPFWPDDSRCAMRFCQVENCEEQAIPQGIKDKGEHKEKAAFKYTREAQVGGSACSDGEDFDSSLGFLDTSISDQAHREFELWAKHDEAEEDFCIVDDHEEGSQYVDLLLNPERYTGYKGESAHRIWKSIYLENCFGGNNETANKFSNYVPHLDLRNVCLEQRAFYRIISGLHSSINIHLCSKYLLSESKDFLDPQGIWGPNVKEFKRRFSPETTSGEGPHWLRNLYFIYLIELRALAKAAPYLRREDYYTGIAEEDDEVKLAINDMLSVIENFQSHFDENALFSNGIASIKFKHDYKEKFRNISRIMSCVGCDKCKLWGKLQTQGLGTALKILYSEKLNLATESGLWDKPHIEADPIFRLSRTEIVALFNAFGRLSNSIYEMENFRCVLR

SEQ ID NO: 877 - DNA, 3653 bp, DROSOPHILA
tatatacggatatatatatctgtataaattagaaaaactttaaaaattgatcaaaagtgtggccgtggcagttttgggtggtttaagggtgttagagagtgggcgtgttaaaaagttgtttcgcaaatcgatagaaatttacacgaataataaaattatgaaaaaatattaaaacattttgcaagagtgtggtcgtggtagttttgggtggttttagggcgttagagtgggtgtggtaaaatagatcaacaatcttaaactgcgtctatgtctctagaatttgtatgctgaatctcaaacttctagctcttatagatctacgattgatattaggtaacacttaaaagaaccagtcaccttttgttccatcatttagtataatttgggtcaaaggagccattgatttttctatcattcgttatactcattcgtaaacatcaaattcagtcagacctctctgaaatcaaaaatttgttacacctaaatttttcaatccgtttttacatttagctacaatatgttttctggtgatttaaagacatcgcgtaagtacgaaacaatagagaatgttatagtcgggatccccgactatcagatacccgttactcagctagtatgcattcgaactctagatttcatcatttttctgggataccaatagatatggggaaataaaatgagaaaaactttaaaaatgtatcaaaagtgtgggcgtgtcagttttgggtggttttagggcgttagagtgggtgtggcaacatggatcaacaaacttgagctgcgtctcaactgcgacagacggacagttgttaatctacgagttacggatataacaatttaatttctacgattgatattaggtaacacttaaaagaaccagtcaccttttgttgcatcatttagtaaaatttgggtcaaaggagccattgatttttctatcattcgttagactcattcgttaacatcaaaatcagtcagacctctctgaaatcaaaaatttgttacacctaaatttttcaatccgtttttacatttagctacaatatgttttctggtgatttaaagacatcgcgtaagtacgaaacaatagagaatgtaagaaactgctgaatatatgagatacagtgatataccaccaacgtgttcttcgattcataagaatacatattgattaagcctaaatattatattgctaaagatattgctcttaatcctaagcagctatctactttgcgtttgtacacttggcaacatggtctagggcgttggtaaagcaccaagacttggagttttagttttcaccaaatttcctaacaatatgggtttttttgttgacaagaaattacagaaatatttgttatatacttttgattaaaccttagtttctacttccacaccaccaattggaatacgttacaatcggtaaagagtataatttcagtgtttaagattaagatcgcataataagataatcatactgtattttatttttaatatacaactcacttccatgcttgcatggaactaaactatatacttatactcttaagaataatgaaaatgttatatctaattttagaagtccgacgtttagcgaagtcggttacttttctttgccgcaacgcttcggaatattcctggaagaattcaggattcgaggtacgctcgggcgtagcttctgcatgcaggcttcccaagtgcccaacactccagaggattccaaccaatcgtgacgtcaatgagagggagaaaccctattccacattcaaaatagaacacgatcgaacacgaatccaggaaatgtggcaaaggtccagaataggggccagagagcaggtgtgttacattgtttgccaattagttatttaccacagatcaattgtaatgggcttaataatccggaaagcagaaaagcctccgcggctatcagcccgccaattctgacgtgaataccgattcaaaggaaaccatcaatgccctggacaaagtgaagcgcatagaggagcggcgtaaaatccaaaacaagatgcgcgccctcatggaagagcagcacatgaaggacgagcgaatccaggaggagaaggatcgtgtgatcaggaaggaggttctcgtcgagcgagatccggccaggaagcaaacattcgcggagtactctcctttccgcaaccgagagaagggcaaaccagaaacctgggtttcagccaccgttttggcggcaacgggaaaaatgcagcagcatagatacatgcagactcctccgaagaagatgaacccccttaaagtagaagtgagtagaagtccatcatattttaatggcaagttctatatgtacatgatagtaactaaaaatttgtatgtagaacttctagattaatcttttgaccatctttttataatcaatccctaggtcgtggttcaaaagccgagccaatcagttcgagagaaatcggccaccggcaccacatccggccaacccaatcatacccataccgacatgtccagtcgtgcgaaatgggccaaggccgccttggagttgcacaagaagcgcgccaaagaaatggacgatatcctatctctgggaggatactccaatgaatctgcctgcctgaaattgagtgaactatcttctatgcgcaaagcaagacgtcactaggcaatgagacatctacacattccgttttgaaaatatcccggagcttgaacgaatcgatcctgacttatagctttgaacctcattacattactctcttttaagtgtgacttttcggaggcaacgcatattcctacatcatgttgacattccgttttgaaaatatcccggaatgggagcaaacccctatagatccagactcaatcctgacttgtagcattgaacctcattacaggactctcttttaagtgtgactcttcggaggcatagcgaaagaaaaaaaaaaacccggaatgggagcaaatcacaccagatccagactcgatcctgacttgttggaccccattacaggactctcttttaattgtgacttttcggaaaagcgaactaaatcttataaatattatttataccatttctagaagatatatttttggataaatctaataaaaaaaaaacacacactttttaaagaaaaatatatttggatttatatctacagacttaaggaaaattacacgcatttcctttgccttaaaaccatctcttttgcttatgccagctatttattttcccgctcggttatgacccaagcactgggcaccggtgttcttaggggtcttgcatcagagtcacctgaagggaatagacaggattgatcaatataagctttcttctgatttcgaaactaagttccagactcgatcctgacttgtagcattggtggaccccattacaggactctcttttaattgtgacctttcggaaaagcgaactaaatcttataaatattatttataccatttctagaagatatatttttggataaatctaataaaaaaaaaacacacactttttaaagaaaaatatatttggatttatatctacagacttaagtaaaattacacgcatttccttgccttaaaaccatctcttctgcttatgccagctatttattttcccgctcggttatggcccaagcactgggcaccggtgttcttag

SEQ ID NO: 878 - DNA, 953 bp, DROSOPHILA
gttacacctaaatttttcaatccgtttttacatttagctacaatatgttttctggtgatttaaagacatcgcaagtccgacgtttagcgaagtcggttacttttctttgccgcaacgcttcggaatattcctggaagaattcaggattcgaggtacgctcgggcgtagcttctgcatgcaggcttcccaagtgcccaacactccagaggattccaaccaatcgtgacgtcaatgagagggagaaaccctattccacattcaaaatagaacacgatcgaacacgaatccaggaaatgtggcaaaggtccagaataggggccagagagcagaaaagcctccgcggctatcagcccgccaattctgacgtgaataccgattcaaaggaaaccatcaatgccctggacaaagtgaagcgcatagaggagcggcgtaaaatccaaaacaagatgcgcgccctcatggaagagcagcacatgaaggacgagcgaatccaggaggagaaggatcgtgtgatcaggaaggaggttctcgtcgagcgagatccggccaggaagcaaacattcgcggagtactctcctttccgcaaccgagagaagggcaaaccagaaacctgggtttcagccaccgttttggcggcaacgggaaaaatgcagcagcatagatacatgcagactcctccgaagaagatgaacccccttaaagtagaagtcgtggttcaaaagccgagccaatcagttcgagagaaatcggccaccggcaccacatccggccaacccaatcatacccataccgacatgtccagtcgtgcgaaatgggccaaggccgccttggagttgcacaagaagcgcgccaaagaaatggacgatatcctatctctgggaggatactccaatgaatctgcctgcctgaaattgagtgaactatcttctatgcgcaaagcaagacgtcactag

SEQ ID NO: 879 - protein, 302 aa, DROSOPHILA
MFSGDLKTSQVRRLAKSVTFLCRNASEYSWKNSGFEVRSGVASACRLPKCPTLQRIPTNRDVNEREKPYSTFKIEHDRTRIQEMWQRSRIGAREQKSLRGYQPANSDVNTDSKETINALDKVKRIEERRKIQNKMRALMEEQHMKDERIQEEKDRVIRKEVLVERDPARKQTFAEYSPFRNREKGKPETWVSATVLAATGKMQQHRYMQTPPKKMNPLKVEVVVQKPSQSVREKSATGTTSGQPNHTHTDMSSRAKWAKAALELHKKRAKEMDDILSLGGYSNESACLKLSELSSMRKARRH

SEQ ID NO: 880 - DNA, 8940 bp, DROSOPHILA
cgatttcctctttggcgtcgcgccgccttgttgttgccgctgcttgttaacccccagcctcatttccccatcttcccgtttccccagattttccaccatttccctttgtgtgacagtcgacggttattttgtgtacggtattttttcgtgccttttcttcagttcagtgttaatttttttcttttgttcgttggccaaaagtcaacccatgagctgtggcatttttaagtaatttttatcggtcagcaatgtgggtggaattgtggggaagaggaagtggcgggttcctcgcgatggtggcgatttttggtgcacactggaagcaatatacaatatctaatacatgccagcgagattaatttttaaggtatttttagatgaaatattacttgaaaataatacatggaaaaacatagaacaaatacaaacaaatgcaactcttatttatcttgaaaagaattgataataatatgagttcacaaaacacatcggttttactcagtcgttactaaatgttcgtgaacctttgcgattgcatctgtatctgcatgcagttgtgatccttgtgatttttgggtgctgcacgaatgtcgacaagtgacaaaatatgcaagtatcaaaccacaaattctcacccgtgagtccacaatcattttgacactggttacggtgacgtgtgcaggtccttcgcccatcgtccatcgtcctgccgccttcgtcctgggtcctggatcctggatcctgggtccctcgcacatggcacacagcagcgactagatttggatagtgttgcacggacgtcgagagtggtggtgatgaagtcctttgccggaaattgaaaagtgcaacgcaaattgcgttccgctgggatgtgaatctgcatcccatccccatccccattcccattcccataaccagtgccactcccgttgccaatccgagtcctgccagtcgtctgaagtccttcccccgtcgagtggttgacaattgatttgtgtttatggtgggcatgcccatggacatgcctgcatcctgccatgccgccatcccgtcgtccttcacttctgcagctcccatcacttccttctggtggtcccatgtaatatgccattttggtgccgtgatttaaagacattaacaggcgttggccaaagtgggaaactttatggtgtggcaggcgcaagtttagcattgaagttaccgcccttagctcgaggagattgatgacctaatcggatgcggaaacctgacactgggtgattcggtttgtggcagaatgctattgaaacaagaatcacgaagtgggttttacttcaagtcacttaggtgtgccattttcataatttcgtaacatatttactgcagtgtccaataaaaactatgtttataacatcctgctatgcttttatttattatttgcgtataataacgtttatctatttttaaaagttataacaaaaaaaaaaaacaggtattttatcaacttatatttaagaagcgatcgaagggagctacatataaaataaacatttaaatgcaaaattcgttatttaataaatgttaaatgtaaactcttcttgcaggacattgggtaaacccgcgggcaaatcctgaactttgattgttttccgaggcaggtgcgattaaaggacgacaaaattgtgcggttaaaaaaagtgcaggctcacgctcaagggcaactggagcagttcgagcagcagcagcaacaacagcagcaacagcagcagcagcagcagcagcagcaacagcatctgcagcagcaacagttgcaacagcagcagcagcaacactatcaccactacagcgccaatagcaacaactacaaaatgcatttgactaccacatcgagcaattcaacggcatccaatgccaataataacaacaacaatacggcaaacaacaacaacacaagcagcaacaacaacacgaccaatacgaacggcagcagcaacaacaacacgagtggcaacaacaacaacagcagcggcaacaacagcaacacggagcaaaacacaccgcccacgcccgcccaactcctaaatgaggcctacacgaagatgacctcggacatcctggcggagcggacgctgggcgacttcctcaccgagcatccgggcgagctgatccgcacgagcagtccgctcttcgtctgcacggtgctcccgccccactggcggagcaacaagacgctgccggtggccttcaaggtcgtctcgctgggcgacattatggacggaacgatggtcaccgtgcgggcgggcaacgatgagaactactgtgcggagctgcgcaactgcacggcggtgatgaagaaccaggtggccaagttcaatgacctcaggttcgtcgggcggagcggcagaggtgagtccaaaagtcagcttcccatttttcatccaaatagatagcagtgcgacacgttcgattcagttagatgcaagtgttctttccatattttctatttagtttttagtcgaataagaaagtgtatacacagtatttactaagtaaatacatcaattagaattgatgaattgagaatgtacgtatatgatgataaatggaatcatggttggtgtaaccatgtcttgtatttcccacgatcaagtcgatttgcccgggtgccatcttcagtttatctcagtccttaaaacttgttccccttaagtatgcaactcttattggctcttgaaaagctccacaaaaccctccactttcgccccgccgactgcactcgaaacaatttgttcaattatcgcccaaaagttttgccagctcctgctttccctcctcctcctcctcctcatttttggccattgtattattcgggggcactttttgtgccttttgcatcgctgtcatcctttttcagttcatttttttggtgcccattcgtatccttttgtatcctttcaaccgcttgttaagcgctgcacaaattgtcagcagttcatcagcagtaaccatcgccttcgtcatcgttttcattcaccgaatagaagcggattacccggtaggtcgttccatttttttgtagtcagcatttgtgtgggcattgtcttaaagtgtttaataaactgtcgggacggaagtgaagtgaactgtggaatgacttttggttgttaatggtgagtttttgggtttagcgggatatctttttattccctgatgatcttcgaggcattttgcaaggagaatcgggaataatagcgtagtcattattataataataaagtgttcaattcgcccaagtagtctttggattttgaaacatggaaacccgcagcctaccatcaatcacacaagccataattcaatcagcaaggactggccgaaaaagattttcgccaggggtgtatgctttcccaacggtggaaggctaagcccgattccactggtccttttggcctggtcaggaaaagggggtgtggcagttacgcatccgctgcggtggaaccgcaaaaaccaaagcctccaccagcgaaagggggaacagaagcggtgtttctgtggcatggtgtggtggtggttctttgggggcggcggttgcgaatggggttcatgtgtgtttctcgccgaggacgcagtcattgtcatcatttgcccaatgccaaatggatgcgtgtccgcgtccgtcactgccttccggactccggaccatctttcgcttttcactttaacattttcccgcgtcccacttgtccgcattgagtcgccttaattgggaatttcccattcatttaggccgactatggaatgcaaagcgagagccataaatgcattttccgtcccgattcttaaagtcactaaagacaagcagggtaactttaataattagcttatagctgaggtttaatatactttagtatggcaatgaattgtaaaaagtgtacatattaaggtccctttaaggtcccattgctaaaactcgtctaactccgcttaaggacacaattgtcaacgcttgtctctggcgcccgaagtccttgtggtccgtcatgtttcatttcacccatcaaatgcctgccccacatccccacagtcgagttatgataagcgagcatttttacaattgtctgcctgttgctcgggccgaaaagttcccaaggcctctgggaaattccccacccaaggatcgaacaattaccaactttggagcgaaaaacaaagccccgccgttggagagagggatgtggaatggtaagggcagggaaaattgaaaggaacagaaggcaggccaaaagcaaattgtgcacaatttggcacgacttcgttgcccggatggtttccttgatttccctccttttttcacaggcaggcgtgtccttttcacaggacgaggtgtcagttgctggcagaaagttgcctttttccttgcctttttaacgcctcgacttttgctcggcatttatctttgagggggtgtacatgttttttttttttcctgccaggggttgttgtcttttctgtcgccaagatttggggaatgtttatctttctcggcggtggaaacggaggcttgggatttctggcgtttttggctcagttcattctgcggctgttttcggtcgtattaaatggctcgagagttgtgtaaataaaaacctcaaaggggatggccctcgattaggggtaagcttttttcctggccaaggactaaggaccgagtactgggggcggggtgtcgtaactggcggaaactggcaccggctttaaccccttaaagcccccagcaccgcaaccccccgcccctcaccaaaatcaacatcgccgtcatcgtcatcgtcatcgtcatcgtcggcggcgttgtcgtcatcatcatgcgtgcatgtgcatggcactttgctaattaaaagtgtagcctagcgttgggccaaataaatcgatggccgggtaattaaattgcatgacaggaagggggatggtgatggttggtgggggagggggcggtgttggggtctgcgcctatgtgccatgcatttgttattgtaattagacgggagctgcagcagcgacggcagttaaacaaaatggcgacagcggccacggtggcggatgatatgtaaatcactcatacgccccatgggtgtggtgccgatttactgcaacttagaagcgataaaaaacacagccagagcccccaaatgcaattaaatgcaattttgccagactaaatttacttctagtaaaataaatattacaattcgaatcgagaatatttagtgtgcttaattcgaattatccaaaaaaaaggctttcaagtcaatatcatcactgcgtggaaaattacaacacatttaaagcgctctaattgtttgcttgagattttagccaaaacatcgaaaactatttctagaacatatttaaaaagcctatccctgcttcatcgtgtgcctctttcaaaaatgccacacctgcaatcaatcattcgagcatatatccaccctcaggtaaacacaaacaagaaatcaacaagcaatcaaaataagcaaacataaaaagatgataaccaaagaagccgcaaaatgtttttattttggtgttggagcggcttactgcctggctttcgaagctttcaagggcttagtctttttttggccaagaagtgaagtggaacaatgacttatggggaagccactcagaataagggttgcctctcttattctcagataaaacggtttagcaatattgaaaacgatacttctgttcggccaactcgaagttgaatatcgcaatacaaaggctatgccgtaaataagcaacacattattttaggggtaagttaaaataacttaatacttgttttgccgaatcaaaagatattttgtgtttcatttgaaatggtgaaaaatcaaacaaaatatgtgtacttcctcgacgtttttacaaggacaaatttataaaaactagtttcctatctttttgatcaataaacgagtatattttaaatattcatctattgacagacgtctttgtgtgcgtatgtatctatgtcttgggcgacacgtgggtgtgtgcgttcgtgtgcgtgtgtgtgtgtgtgtgtatgctttcattacccccaaattgatttatgacgcctgtgcaacggtaaattgccggggatttgccagctaggatttcaggttatttgtcaacaggatttgattttaaatgccgccacacccgcacggaaatgttttgctcctcaagtgttgacatttccatttgtcgcactttcggtggagattaagatgaatgcttttcgggtttggggcgggaattattgtgggattagcaatcaattgggtcaaagccgccactccgattataattgaatcgcccaagaaaagggtgaattctcacttaaacttctgtgaatatcatagcgttctgaaagctgtttatagccttccaacatttcctaacatttgtaatgtaacatttactttaagatttaaattcatctgtgcattaagaaaactccagctgtctgctgcgaaaatggattaacagcagcttcttcaacttctgacaagtgtgatttcccatcgaaaaaatcgtctcattctactttttctgtaaattgctcgcgttaatgatcgattatccattgccaattgaaaaacttttcaggcagtacccacttttcggccgggaaaaccccacgaaaagtgtcaaagaattgcgcaacaatgaactgcacttgctggcaaatgaacacaaaagtgttttcacatctttgggctgccacttgagacttcgttttttaagaaagcggagaggaagatattgtcctggttcagtgaaatgtgcacaggacatatgtaagcctcgtcgtctgcgtttatacatcatatgtatatatacatacacatacacataggggtttggggacgtcggcggtttatttgtatgtgccgaaatgatttacgctttgtttgtcaacttaaaaagcaaacctccagcccccagatcgcgttgtcataggacaaggcgggaaaacacaggaaggcggcggctcaaggagcctgaaatgcttttaattgaatcctgggagacaaaaaatggcaggagctgcggacaaagaggccttggcaacacttgacaatgactgggtgaaacaagttaattaaaagaaaactgcggcgcaaacgaaataaatcttggggagcgatatacgcatatgtgaagggttttttagggaggtcgacagactaaatcagtttaaattgtaattaattcagcatttcgaaaggtgaaaagggaacggaatcgaattttagcaagggagcacaactgagaaattacatggagtttaagaagactgcatagcactaaaaatgtgtacatacataaatttaatttctaagcaaaatgaaatattactgaagagttaaaagaaatattattgttattatcaacctgaaagatgttcatagttttggtgcccccccaatacataaatttgcttttgcaactgtcatcataaaaccgtaggcatcgattaagaaactagtaaaagaagccccgaaaaaaggaaaacctcctgccaaaacgattattgttttatggccaacacatttacgatgtgacaataccccccaaaaaaaaacaccaaaagaaaaccccaaaaatatgtttatcgatttgcatgtctggcaggcattagctagaaaaatctcataaatttgtttgtttcgctttcccttgtttttccagggaaaagcttcacgctaaccatcaccgtgtcaacgaatccaccgcacatagccacctacaacaaggcgatcaaagtgactgtcgatgggccacgcgaaccccgttccaagacaagtaagtatgtcctgcaggaaaggacgatctggggtgggtcctcctcctcctcctccaagaacccttttggggcccagctatttcatttgcaggacaatgcatagcaatttattagttgccaaatagataaattgttctgcaacagcaggcaattctcaggatgcagacaagctagaggtcttgtagttttggtagctggagtttcggagctggggcatttggattttactgctgtcagtgatgacaggctatctgcctattgtgtaacctaactaaagaaaaacaatttattgtgtaaatctccatagatccttcggctaattaaagatgtatccttctttctagactttagttcaaagcctatttcgatttccgcaagtaatacatctgagtttctgttttgcataaaaatagctgactgaagaatagctcatcgctgaacggaaagttggagggcacttctgagatattaccacctcacactgcaggacattcgagcacttgaagtccttactcgggattttgctgatgcagcaaggacacttccttgctaatacttcacttcatttcacttcacttcagaatgccgaatatcttgaaggaatattcattagacagctctatcacacactctgcctgcccgttacatatttataaggatgcaaatacattactttgcatatgtttgttccaggactcagacgtttggcaggagagagcaaagttttgctggtctgtgtaatctggtttcggtccgaatacaaatccatgaaatgatttatatgccctgaatgccagacagagtccaaaaaaaggggagttgggtggatggatagtgcgcacacaagactctaagctgcagacaaagggttattattttataatgaatacaagctggcagataactgcagccgccgcaggattttagtgcgtgccaaaaatttagccaaaagcgtcgccggttggcagaaagttttttgggccattgtcatttcactttcacataccccgtgcatatacatacaaaatccattctcgatagtggtctttggggtcttggaaatccggggaggcccgtccctagatcttaagtgattcgaaagc

SEQ ID NO: 881 - DNA, 1107 bp, DROSOPHILA
atggtgggcatgcccatggacatgcctgcatcctgccatgccgccatcccgtcgtccttcacttctgcagctcccatcacttccttctggtggtcccatctcgaggagattgatgacctaatcggatgcggaaacctgacactgggtgattcggacgacaaaattgtgcggttaaaaaaagtgcaggctcacgctcaagggcaactggagcagttcgagcagcagcagcaacaacagcagcaacagcagcagcagcagcagcagcagcaacagcatctgcagcagcaacagttgcaacagcagcagcagcaacactatcaccactacagcgccaatagcaacaactacaaaatgcatttgactaccacatcgagcaattcaacggcatccaatgccaataataacaacaacaatacggcaaacaacaacaacacaagcagcaacaacaacacgaccaatacgaacggcagcagcaacaacaacacgagtggcaacaacaacaacagcagcggcaacaacagcaacacggagcaaaacacaccgcccacgcccgcccaactcctaaatgaggcctacacgaagatgacctcggacatcctggcggagcggacgctgggcgacttcctcaccgagcatccgggcgagctgatccgcacgagcagtccgctcttcgtctgcacggtgctcccgccccactggcggagcaacaagacgctgccggtggccttcaaggtcgtctcgctgggcgacattatggacggaacgatggtcaccgtgcgggcgggcaacgatgagaactactgtgcggagctgcgcaactgcacggcggtgatgaagaaccaggtggccaagttcaatgacctcaggttcgtcgggcggagcggcagagggaaaagcttcacgctaaccatcaccgtgtcaacgaatccaccgcacatagccacctacaacaaggcgatcaaagtgactgtcgatgggccacgcgaaccccgttccaagacaagtaagtatgtcctgcaggaaaggacgatctggggtgggtcctcctcctcctcctccaagaacccttttggggcccagctatttcatttgcaggacaatgcatag

SEQ ID NO: 882 - protein, 368 aa, DROSOPHILA
MVGMPMDMPASCHAAIPSSFTSAAPITSFWWSHLEEIDDLIGCGNLTLGDSDDKIVRLKKVQAHAQGQLEQFEQQQQQQQQQQQQQQQQQQHLQQQQLQQQQQQHYHHYSANSNNYKMHLTTTSSNSTASNANNNNNNTANNNNTSSNNNTTNTNGSSNNNTSGNNNNSSGNNSNTEQNTPPTPAQLLNEAYTKMTSDILAERTLGDFLTEHPGELIRTSSPLFVCTVLPPHWRSNKTLPVAFKVVSLGDIMDGTMVTVRAGNDENYCAELRNCTAVMKNQVAKFNDLRFVGRSGRGKSFTLTITVSTNPPHIATYNKAIKVTVDGPREPRSKTSKYVLQERTIWGGSSSSSSKNPFGAQLFHLQDNA

SEQ ID NO: 883 - DNA, 6804 bp, DROSOPHILA
agtatttattctactttttactcagccaatgcatcttaagccttcgggacctactctcgaaaagaatccgtctagaaacctgcgacatgttcaggaaaaacgtaaacgtacgcccattagagaaaagatggcttcgcttgagaagttgaggaatctccaaaatagcaagtttgttctctcccgcgacgcttttcaaaaaattcaaaaaattactagtggcggtccctattacttgacaaaaacaaagattagaccataggccttgatttgaatatctcaaaataaaaaaatgcaatgcaaacacatttgaatcgatttttcgctttattacatttcttgtatcataatcgttttgtttttctggttttgccattttttaaatattgacgttttatataacaattcataattttagcttacaatatttttgttttgtattcttagaatcgtttatgccttttgccatgaaaacacttctctctctagcaaatatacaattttcgaaacttgtgattttgcaattatttattatgtatattatatatattatatgtatataactaaaaatgcgtaaattaatttttttttgtttgttacgtggtttgtgggcacattccttttatcaaaaggaacaaaacatgaaaatgtacataagtgttattggcaaatagtttaccatctgttttagatcttgatacacatacgtgcatcatcgatataaagaacctgaattgtttttaaatttcgaagcggcagttgcagttctgtatttgcgcctcatgaattgctcgtttaacgtgtctctctaaaaggcaggagcagctgtgaagtgctcgaaggcaagggtcgatccgtccgccgttggatctttatccttcctgaccgtccattgattggccattgtcctattatcgagagcccgccgcttattggttggttgattattttttctctcatctatttttatgaaatggctgttaaaaattttggtttgaacgcatcattcccattcggtggtgcccggcggcttggctgtcaagtcgtacagcaccctcgagattccatccagcttggatatatcgcgtacaatttgatttaggacctttgagcaggaaaagattaaatatacatttttcagaaagattgaaaactgactcacttgcaaaggcatttgcacggatccgggctcagccggcacaccagtcataaagtcgttcgttatgaacggacgcagcactaccgaccttctgcacgagggtgtgcggttaatgggatcgcggtcaaagtgcacgggtatgagaacaacaggcatctgcgagatcttccggtatagtccagcttgcattatgatctaaaacggttatgatataatacattttatttatttctatgacaaatccacttacttcattggcaatatcatcggcttgcctcagctgcgaaagaactacagtattcagtgtggtgtgcgtaatatccgtcactagatactgtacgggttcgccgaagatatagcacaccctgttcacgttgtgcagaattcgcggtatgattttggcgaggaagagaagatcctgccagttgggctcctggctcgtggataggcctactacgtagctatatgaccgtttatcaccttgcacgcccactgatcggatgggcagcaaagttgcctggatctgcgagttcgatgagatacgcataaggtctttctgttccgcctcgctcgtggccgccgttacgcggttgatcaaagcatggttcttctgcagtttattcttgtagtctacaatcacgcggataataacctacaattaaatagtatatttattataataactttgacagcaattaattgttaacatgcctgagtttctgagtagtccttttccatgtatgcctcctcagcgcaaaggacgcggattgccaggccaggacccggaaagggttgcctctccacaagctcttgaggcaggccaagatcattgccaaggtcgcgcacttcatccttatgaaagtcgcaaaggggctcaaccacacgtcctgcgttacgaagctctctgaagaaatgaattacaaaaaataagctgatcactaaaatttggttaggaatttagacttttgcttttttacctgatcagatccgtgtcattgtggtgcgttttgattgtttctgcattcgtgctcaccatgctagaggcggactcgatcagatctggtcggagggttccctgggccaacataacttcttcgggctttagtttcaattcggctactacatcattggtcaccttgacgaatatatcaccaattatcttgcgtttttcctccggattgtatgtctgacataacatcggcgtttccaccacggagtactgtccgggcctcttgacctgcgtggtgcctttaaggaacgtgtagccttcttttcggacgattaaatcaatgccaatatcgcgcagtgaacgctccaccttttcactttccttcttgcgcatgaaaccttgaagtaagggataaaatattaggttttaaagtacaaatgatataaattcggtattcaccgagttaatgaattatttgacgtagaaaaaatataaatgaataaatttcgctaatctgtctactgtcataccattatctacatgcacggcaattatctgatgagggtacaaagcacggcggagcaaagctgcacagacactcgaatccacgccgccgctgaccaggagctgtaaaatgtagattgtattgagatattcatgtcttgattgaaaatttattttcccaaactcaccaacaccttattgttgcccactttctcacggatatagcgtatgcactcctcctttcgactacccatggtaaagttaggtgtcagttcgcagatttcgtacaggaagttcgatagcatctgtttgccattgatagtgaggtccacctcaggatggaactgtacgccgtagatgcgtagtacttcattgtaaatggctgtcacaatgcggtttgtagaccagccaccaatcttcagattctcgcctaccctctcaacgctatctccgtgggttaacagcacggactgtgtgcgactgaggcgactgcgggaaacgaagatgttatgtttgttaattgcatgtattagaataattaatggtaatgatagataatatgttaggccacgtgtagatcagtttataaactactctaaactaaactgttcttggctttaaaattgttctggcagcattgtatcagcgcttaggtaaacgcatttaagcctaagcactttcttgttgctgcttgttttgggaatcaatatttcctggctcacctaaagagcgggcacgaggtctcgatctcgatattttgttggccatcctctcgaacatccttcttgagcactgtgcccccgaactctttgttgattagctgcatgccgtagcagatgcccagcataggtatttttagcttgaacagatcgggatcatagctgggcgcatcctcagcgtagactgagttgggtccgccggagatgatgatgcctcgatagccattgttgcgtatcgtggcagctggcgtatccagaggaaggatatccgtctcaacgaagagttcgcgtaccttacggtcgataacctgcggagaaaccaggaccattttaagaagaggttaaaactactcttggttttaagcttaccttgccgtactgtgctcccgcatcaagtataacaatcttatcatgccgcaggccattctctgctgtgcccagaaaaatgtttgagttcatttctttatcgttgcagcactgaaaagagcaaagatttgagtgtcagtcaagcaatcgcagaaacaaacaccgaatctcgactggctggtaaacgcgcttctgctgcttatttatactccaattgtggctgcaatcgacgctacagaaacaaggctaaaagctggctaggaggtggggaaaataggtttcggattggggcaatcgcggagattgagatttgtggtacagaaggctcacataccggcaatatcttgtggagcactcgcagaaacattcaacatgcagctggccaggacgctctacgatagacaataaacattggcaaatattttcttgtcacagaaagatgatttgtgcaatgtggaaagaaatttacaagcgacgaaaaacaaggccgagagacgcctaccaaaaatgattcgctgtgcatcgcgacgattacgttctgtgggtattatttatttgaccaaatataaaacatttacgtatatgaataagcctataacttaatcttaataatacctgtttatttaaccgtggttagaatttaagacagagtgtattcacagccagcataaaatcatagataccataggaaaaagtgctccaaatgatcatagtttggttttttaaaataatattaaatagatataatttttgtataattttggtcaacagactgaatttggattaacaacatgaaaaacgaatttttgtgccaggagtatctgtcaatgctatatacttctacatactaaagtagattatcaaagcatggaagttaacatttaattttatagacacatttgtcccatcaaagaatttagaaaaacagcaggtcaggaacatgcttttcgaattcccgaagtaatcggcgacttagtacatatattttaaaatacaaatttcgatgcatgaggatgaggatgtgaggaggaaacggaacgtaatggtgatggggtcaggggggagggcgccggctactgaccgccagatgacaggcgaaaatactaagaggagagtggcagcggaagcgagagagagcgaaagatgagcggagaaaaatggcaggtaaacgaaaacagagctgaaaagtgcacaagtaaaatagaaaacaaaaataaacaacaacaatccaggagacaaatcgacggtagcaagtcttcttgtttgccatttattttctcttgaagtgtgtaaaaacgcagcagcagcaatatgaaaagcctctccgaaggttaggagtgcattaggtcactgaagcgatgcgatgtctgtgatgtaagccgtgctcctcctttggctctctctcatttttgataacaacatgcaagaggttatcagaaacggcacaaaccacagcaacaacaactaaagagggcggccgcgtggttgtaatttaatacacatgcagaaggcacgcacacttacacacgtggagccgccaacaagcggcgcttataaccacaaaatggccacgggatatatttgcaaaacatttaaaaaattgcaaatgcggagaacaaaaaatcgcaacaaaagcaaaggcaaatgcggttgaagctaatttgcgaattcaacgggcggggtgcggaattgtgggcggagcagcaccgcatggcgatttggctgggatcggggatctttttcgccatattgcgactctcaccttctctcgttttagcctggctgcggttttccagaaccgggaagtccgtcggcaaggccgtggaataccgtgacaagcagcgcaagactttgtcttaagacgaaattcgcgatccgttgtttgcggtcccccgttttccttcctcacgcacacactcaaaatttcttcggctgctgcagcttcttttccgcgtatccagggctgctcgacacagctggcgatgaaatccctgtgattttcacggctgcgttattatggccgcttccagggactttccttttggatttcctgcagttttttcgcgaattaaagccgaaagatgacttattgacgagcggatgaccatatttcggatttgggaaaaatccagctgtgctgcaaacgaaaaataccagctgtgaacgtttttggtattaatatttaccaaataaataaatttatatttatttcgaaaacaatgaaaattccttaataacattacattacttctttattaggagtgcttaagtattcttttaaataatgaattataattaaaattataatctgtttgtacagtgttgacaaacgagcactttttgtagaaccatatacattacccggtcacactgagcccgccaaaacagatatgttattgcgcttatttagaaaaccaagaaaaaacacgagaacacgtgaaaatacaaatctacccaaatgaaatgggtcctgctcagaaatccggaacagatattagtatcgatgatgaggaggaaatactggctctggaaaaactactgggtgcagcagaaaacgaaaatacaaaatctgcagagtcagaaaaagcaaaacccaccgcacccattttggtgccaaaactacgagaagacaacagttttgctaatgccttcaccttcgagaagatcgtgaaaccggaaaagcagaagaatgctgctatcattaaggaaccagagctggactcgtccgacgacgaggaggtaaagaacttcctggaacgaaagtacaatgagtacggcagtgatataaacaagagactgaagcagcagcaggagaacgcctacgagtccaaggtggcgagggaggtggatcaggagcttaagaagtctatccacgtggttacatccaccccgcaacccctgaaaaatccgcataatcctattaaacggcaatcggcggtgagcaccacgtttcaacgtcctccgccagtcgctgccgccgtggcatctacatcccagtcaagtgctcccgtatctgctgtttttacggatccagtcttcggactgcgcatgatcaatccgctagtctccagctcactgctgcaggagcgcatgacgggcaggaaacctgt

SEQ ID NO: 884 - DNA, 2418 bp, DROSOPHILA
atatggtcatccgctcgtcaataagtcatctttcggctttaattcgcgaaaaaactgcaggaaatccaaaaggaaagtccctggaagcggccataataacgcagccgtgaaaatcacagggatttcatcgccagctgtgtcgagcagccctggatacgcggaaaagaagctgcagcagccgaagaaattttgagtgtgtgcgtgaggaaggaaaacgggggaccgcaaacaacggatcgcgaatttcgtcttaagacaaagtcttgcgctgcttgtcacggtattccacggccttgccgacggacttcccggttctggaaaaccgcagccaggctaaaacgagagaagtgctgcaacgataaagaaatgaactcaaacatttttctgggcacagcagagaatggcctgcggcatgataagattgttatacttgatgcgggagcacagtacggcaaggttatcgaccgtaaggtacgcgaactcttcgttgagacggatatccttcctctggatacgccagctgccacgatacgcaacaatggctatcgaggcatcatcatctccggcggacccaactcagtctacgctgaggatgcgcccagctatgatcccgatctgttcaagctaaaaatacctatgctgggcatctgctacggcatgcagctaatcaacaaagagttcgggggcacagtgctcaagaaggatgttcgagaggatggccaacaaaatatcgagatcgagacctcgtgcccgctctttagtcgcctcagtcgcacacagtccgtgctgttaacccacggagatagcgttgagagggtaggcgagaatctgaagattggtggctggtctacaaaccgcattgtgacagccatttacaatgaagtactacgcatctacggcgtacagttccatcctgaggtggacctcactatcaatggcaaacagatgctatcgaacttcctgtacgaaatctgcgaactgacacctaactttaccatgggtagtcgaaaggaggagtgcatacgctatatccgtgagaaagtgggcaacaataaggtgttgctcctggtcagcggcggcgtggattcgagtgtctgtgcagctttgctccgccgtgctttgtaccctcatcagataattgccgtgcatgtagataatggtttcatgcgcaagaaggaaagtgaaaaggtggagcgttcactgcgcgatattggcattgatttaatcgtccgaaaagaaggctacacgttccttaaaggcaccacgcaggtcaagaggcccggacagtactccgtggtggaaacgccgatgttatgtcagacatacaatccggaggaaaaacgcaagataattggtgatatattcgtcaaggtgaccaatgatgtagtagccgaattgaaactaaagcccgaagaagttatgttggcccagggaaccctccgaccagatctgatcgagtccgcctctagcatggtgagcacgaatgcagaaacaatcaaaacgcaccacaatgacacggatctgatcagagagcttcgtaacgcaggacgtgtggttgagcccctttgcgactttcataaggatgaagtgcgcgaccttggcaatgatcttggcctgcctcaagagcttgtggagaggcaaccctttccgggtcctggcctggcaatccgcgtcctttgcgctgaggaggcatacatggaaaaggactactcagaaactcaggttattatccgcgtgattgtagactacaagaataaactgcagaagaaccatgctttgatcaaccgcgtaacggcggccacgagcgaggcggaacagaaagaccttatgcgtatctcatcgaactcgcagatccaggcaactttgctgcccatccgatcagtgggcgtgcaaggtgataaacggtcatatagctacgtagtaggcctatccacgagccaggagcccaactggcaggatcttctcttcctcgccaaaatcataccgcgaattctgcacaacgtgaacagggtgtgctatatcttcggcgaacccgtacagtatctagtgacggatattacgcacaccacactgaatactgtagttctttcgcagctgaggcaagccgatgatattgccaatgaaatcataatgcaagctggactataccggaagatctcgcagatgcctgttgttctcatacccgtgcactttgaccgcgatcccattaaccgcacaccctcgtgcagaaggtcggtagtgctgcgtccgttcataacgaacgactttatgactggtgtgccggctgagcccggatccgtgcaaatgcctttgcaagtcctaaatcaaattgtacgcgatatatccaagctggatggaatctcgagggtgctgtacgacttgacagccaagccgccgggcaccaccgaatgggaatga

SEQ ID NO: 885 - protein, 683 aa, DROSOPHILA
MNSNIFLGTAENGLRHDKIVILDAGAQYGKVIDRKVRELFVETDILPLDTPAATIRNNGYRGIIISGGPNSVYAEDAPSYDPDLFKLKIPMLGICYGMQLINKEFGGTVLKKDVREDGQQNIEIETSCPLFSRLSRTQSVLLTHGDSVERVGENLKIGGWSTNRIVTAIYNEVLRIYGVQFHPEVDLTINGKQMLSNFLYEICELTPNFTMGSRKEECIRYIREKVGNNKVLLLVSGGVDSSVCAALLRRALYPHQIIAVHVDNGFMRKKESEKVERSLRDIGIDLIVRKEGYTFLKGTTQVKRPGQYSVVETPMLCQTYNPEEKRKIIGDIFVKVTNDVVAELKLKPEEVMLAQGTLRPDLIESASSMVSTNAETIKTHHNDTDLIRELRNAGRVVEPLCDFHKDEVRDLGNDLGLPQELVERQPFPGPGLAIRVLCAEEAYMEKDYSETQVIIRVIVDYKNKLQKNHALINRVTAATSEAEQKDLMRISSNSQIQATLLPIRSVGVQGDKRSYSYVVGLSTSQEPNWQDLLFLAKIIPRILHNVNRVCYIFGEPVQYLVTDITHTTLNTVVLSQLRQADDIANEIIMQAGLYRKISQMPVVLIPVHFDRDPINRTPSCRRSVVLRPFITNDFMTGVPAEPGSVQMPLQVLNQIVRDISKLDGISRVLYDLTAKPPGTTEWE

SEQ ID NO: 886 - DNA, 4097 bp, DROSOPHILA
tttgatgatctcccgacgggcattctcgcacttcttcatgtcccgacaagccatgtacacggtagctcccctgcgggccagctccagaacggtctccttgccaatcccctggttgcagccggtcacaatcgccactctgccggtctcattcgttttcgtggtgaactgacctccctgcatatattgtctaactggctgaggttaaagggccatcactgagagtggacaaaactcaccggagcagatagattccgatggccgaaagagctgacccatatgccagcgggcagaacaggtaatccgtgggtgcactcatctttccgctccgaatgctaccagctccaagtggcgactggccagatccagtccccttacacatttctttatacgagcaatatcaaaacctcggaatgtccatacttgaaacattaacgtggaccggtataaaacatcgttttaagtttaaggttggagggtttacgattgccgcgtcgccgagggaaacggatgcttccgtaagtttttatcgtccggccaaagtttattatgtaagctgtatagatagaatcataataaccgtcgatcatagggtaatgtagatatagctaaagtgtattactagaatgagtttcagacctaggctttcagatcgtcttaaatgatgaatgtgggaaagctctctataaatacaccttatttaaggctctgttttcacagcaatcgatttgtaaaaattacatttaatgaccagcttctgcgatgacgaggggaagtagttagtcttccatgttattagcttgcataaattaaatgaaatgataatttttgggcagcagctccgtttatttttggattgagcaatacttacttaatttaccatgtaatttgttggagagccttttgttttgtttgggccttttactttcatttggccattttcgttaatgcgaatagtactaacacccgaattcgattcgattaacatactggccggaatacaatgagcacaggctcgcattcacccggagccatgtggtccgccaccaactttcgcaggcatcaaagaaagccaaaccaagttctccatcggtggtttttcaagggcagtgcctggatcatctacgagcaatatcaaaacctcggaatgtccatacttgaaacattaacgtggaccggtataaaacatcgttttaagtttaaggttggagggtttacgattgccgcgtcgccgagggaaacggatgcttccgtaagtttttatcgtccggccaaagtttattatgtaagctgtatagatagaatcataataaccgtcgatcatagggtaatgtagatatagctaaagtgtattactagaatgagtttcagacctaggctttcagatcgtcttaaatgatgaatgtgggaaagctctctataaatacaccttatttaaggctctgttttcacagcaatcgatttgtaaaaattacatttaatgaccagcttctgcgatgacgaggggaagtagttagtcttccatgttattaccttgcataaattaaatgaaatgataatttttgggcagcagctccgtttatttttggattgagcaatacttacttaatttaccatgtaatttgttggagagccttttgttttgtttgggccttttactttcatttggccattttcgttaatgcgaatagtactaacacccgaattcgattcgattaacatactggtcggaatccaatgagcacaggctcgcattcacccgaagccatgtggtccgccaccaactttcgcaggcatcaaagaaagccaaaccaagttctccatcggtggtttttcaagggcagtgcctggatcatctacgcaatcgcctgcggactccacttcttcaagctgcactacaacgagcgcaccaatcaagtggaggagtcgcagtaccatcgaatatggtccaagatcgtggttgtcctcaaggtcatactgctggccagcccgtatctacagtacttcgtactcggactgggcatatacatccacatcacactggtgcaggacagcaaggcgcagaacttcctaatgagtctcattgtgctcggaatcgtgataggcgtcctgcggcgcctactaatcttcctgcacctgaagagggatcgcaggttcctgaagcatactgtgaacgagatcctgcatataaccagcgcgctggagcaaaagttcggtatggagtataagtgcgactccacattgctagtggtgtacctggctaagctgtggatactcaccgtcatgctggattccttgtggtacaagccctacttcctctcgtccatcttcctctactgggtgctgttggagtactgctttgctggctatttcatttaccaactcatcctgctcagctggtaccacaccattattctgttcctgcagcgcttcatcgaggaccatgcgaatcggttggatattgagcttcactaccatcggcgcctgatcccgctctttgagctccatttgcgcatcaacaatctgcataagcacgttagggacaacgtctcctggctctcgacctctgtttacctgatgatcttcacctgcatcttcaacgccgaactgctcattgaatgcagtctgttcgccggagacgagctggagaacaagatctacatcatcacggacggttgcttgggacccgtctgcgttccgatactgtatgtgcttatcctgggcatgtgcaccgatcgatttcgcgatgctgaagtacagcttcagcaactgttcgtaatcgttcagggcttgtatatgaggaaggtcaggccacaccttctaatcgcaatggttctcgaaaacgaggtgagatctgcttcggcagctggcttccctggccgacttctccaattcattcccaattacatttccgcagcacacctcgttgataattcaccagaagctgaaaccgctcgaaaatatgatcatcctagacatcacttgcgacagggagttcgtcatggactacattgtcacggtgatccttacagcattgtctcttgtgcagtacaccatatcaactggaggaaatataagcgagtgcgtgacccataaatagcaacccatctggaccacactattaggaggatgagatcattatataactgtggagctggacacagttatcgtataattgcgtgggtcaaaagaacttccttagcgcctacaaaagtgtatcttttgaaagcagaactcagagctcgtaattataaagcactaaatgcttactatttaaatgctacaaatggttttattgtttttatacaaaattaaggtttattgactgtagtagtaaacttgtcagatacgtggttttacgcactgcgattcaacaacacaggatttcccgtttgcatagagaattatgagaattcgttcgtttcaagaaaatcccgtgactctaatgagaacaagaaaatgctgtcactgtcgatttatccctttagtttcgatttcacgtgatgcttaaggtcctgttctcgtttcctcggcagacaagagatgctcaattgtgcataagatttgccacactggagcccagttttatttagcttacatatagtttaaattttatttagtaaatatgacacatgttcctatctaacatattacctgaactaactatacgatttacttgtaaagtaacaatcaacctaaattattgtagttaaggtccacgtaacaggtaggatatatgaatcaggatatcatgttcctcgactagcaaatcctttaattgttcttattacctagtacaggccattgaatctggtatatcctattatactaagagtgcgtacttcaataaccacggctgttgtgaaatttaagtggctttaattgcgactagcccaatcacactattccagtagcccatttacagcgcaattttcgcccacttctcggactgcgcccacaaccactgggccatctggtcgtcgagggcagcgggagctaccggagccagagcgcaatcgctgaagtactgacccgacactctttcgagatcaggatccaaggcagcatacaaggtggtctgggccccgttcttaggcgtc

SEQ ID NO: 887 - DNA, 1440 bp, DROSOPHILA
atgagcacaggctcgcattcacccggagccatgtggtccgccaccaactttcgcaggcatcaaagaaagccaaaccaagttctccatcggtggtttttcaagggcagtgcctggatcatctacgagcaatatcaaaacctcggaatgtccatacttgaaacattaacgtggaccggtataaaacatcgttttaagtttaaggttggagggtttacgattgccgcgtcgccgagggaaacggatgcttccggcagtgcctggatcatctacgcaatcgcctgcggactccacttcttcaagctgcactacaacgagcgcaccaatcaagtggaggagtcgcagtaccatcgaatatggtccaagatcgtggttgtcctcaaggtcatactgctggccagcccgtatctacagtacttcgtactcggactgggcatatacatccacatcacactggtgcaggacagcaaggcgcagaacttcctaatgagtctcattgtgctcggaatcgtgataggcgtcctgcggcgcctactaatcttcctgcacctgaagagggatcgcaggttcctgaagcatactgtgaacgagatcctgcatataaccagcgcgctggagcaaaagttcggtatggagtataagtgcgactccacattgctagtggtgtacctggctaagctgtggatactcaccgtcatgctggattccttgtggtacaagccctacttcctctcgtccatcttcctctactgggtgctgttggagtactgctttgctggctatttcatttaccaactcatcctgctcagctggtaccacaccattattctgttcctgcagcgcttcatcgaggaccatgcgaatcggttggatattgagcttcactaccatcggcgcctgatcccgctctttgagctccatttgcgcatcaacaatctgcataagcacgttagggacaacgtctcctggctctcgacctctgtttacctgatgatcttcacctgcatcttcaacgccgaactgctcattgaatgcagtctgttcgccggagacgagctggagaacaagatctacatcatcacggacggttgcttgggacccgtctgcgttccgatactgtatgtgcttatcctgggcatgtgcaccgatcgatttcgcgatgctgaagtacagcttcagcaactgttcgtaatcgttcagggcttgtatatgaggaaggtcaggccacaccttctaatcgcaatggttctcgaaaacgagcacacctcgttgataattcaccagaagctgaaaccgctcgaaaatatgatcatcctagacatcacttgcgacagggagttcgtcatggactacattgtcacggtgatccttacagcattgtctcttgtgcagtacaccatatcaactggaggaaatataagcgagtgcgtgacccataaatag

SEQ ID NO: 888 - protein, 479 aa, DROSOPHILA
MSTGSHSPGAMWSATNFRRHQRKPNQVLHRWFFKGSAWIIYEQYQNLGMSILETLTWTGIKHRFKFKVGGFTIAASPRETDASGSAWIIYAIACGLHFFKLHYNERTNQVEESQYHRIWSKIVVVLKVILLASPYLQYFVLGLGIYIHITLVQDSKAQNFLMSLIVLGIVIGVLRRLLIFLHLKRDRRFLKHTVNEILHITSALEQKFGMEYKCDSTLLVVYLAKLWILTVMLDSLWYKPYFLSSIFLYWVLLEYCFAGYFIYQLILLSWYHTIILFLQRFIEDHANRLDIELHYHRRLIPLFELHLRINNLHKHVRDNVSWLSTSVYLMIFTCIFNAELLIECSLFAGDELENKIYIITDGCLGPVCVPILYVLILGMCTDRFRDAEVQLQQLFVIVQGLYMRKVRPHLLIAMVLENEHTSLIIHQKLKPLENMIILDITCDREFVMDYIVTVILTALSLVQYTISTGGNISECVTHK

SEQ ID NO: 889 - DNA, 3662 bp, DROSOPHILA
atagaaccattcgaacgtctcctctgcaacttgttagttaaatattgccagaagctgcgactcttcctccagatgcactgggagaaatgcaaggcaataaatcgatttcacgtatataaaacttcgtttgaaattgcgatgctatggtaatgtaacaaaacaattttaagaacttcctaaaacaaagaagaccgaatatagattctgaaaaacaaatgaagtaaccatattattgaactttttgtataataagcaatagtacttattgctaaactagggtattaagagtgcttattacatttctgagtgcactgcctgcaagtgataaattaatcgctacatcagtttttaattccgtgttgctggcgatttatcttggactccatgcgttgagtctttcgaagcactgggacaaggttttcctgaatagagagagagagatggctcggaaaagtggaacgggacgggtctttcaatgaaagccaggctgtggctaaaacacagtgatccctcactctgcgcaacctttatccctcccccaggctgcactgtttaaaatgatgtatggcacacattttgacaaatgtacaaaaatgagtcatgagttcgcggggcaaacagaaagcgcttctttggttcttttgctgctgctgcctggctgcactattttctgttgactttttcatgtactggctgttgctgcttttgttggcattatccataaaacaaacacaaactggcgcagaagatggagctgctgcttacacatgtttttgcgaaaatggggaatgggtctgcagcctggcgccgtaattaatcatttatggtttaccttaactgagagctctgtgctcagaatgcagcagatttaattccagcttggctgtaaacagagctcttccattttgtttcgcacaagttgtactatagacattatgagaagaaaaaacaactttaatggaaattttggagggaacttcatataaacatttctatcgagtgggattgaaattagtgtctccgggctgttagaaatcatttggaaacctttagctccgactccagtcccttgtctcgcgtagacttatcaacagcgtctggaatatcaagctccggacttttctttaagcgcttggtgctccgtgtgtccgtggttagaggttttgcttggctacggctaggtgtatatattttagtaggattgggactaggacctaagagcatggccaatcgctccagccagcgggaccgagagttcaatcgtgataatacttacaataacaatcgcgacaatcgagaccataatcgggacaatcgcgataatcgggagaatcgcagtaatttccaaaactatcgcaatcgtgacagggatcgcgataggcagcgtcaggtgcccacggaacctccgttcatcgcttatgtgggcaaccttcccaagggtctcgtccagggcgatgtgatgaagatattttcggacttcgaggtgaagaatgtgcgcctgatcaaggaccgtgagacggatgaattcaaaggctatggctacgtagagttcgagactctggcacaactgaagagtgctctcaactgcaacggacgcatcaagctagacaacttttcggcccccctgcgtatcgatatagccgaccatcgccggcagaacccgggtgctcccagcggtgttggcggagctcctccagccggagtgggccacgaaagaggtggtggcgtcggaagaggaggcagcacgggtgcagcaaacggtaacaatccctactaccagaggcgcaactatcggcgggacgacagtgtgggatcccatcagtttagaaggagggaaccgcgcagcaacagcagcaaccaccaaatgtccaatagcagccccacacaaagcaccacgtccattaattacaaccgcaccactcgaggtggtttcaatagccgtgttgctgtaggtggaaatggcaatcgttaccaaggaggagctccacgtaacttcaatgaccgcgaggatcagcaatcgaccggcagcggaggattccaacgcaatcgcacctacaactttaaccggtaagaagtgaattgccaatgcagcactcaaatggccttgagtacacattcattttccagatccatgaacaacagcgtcggcggaggaggtgctggagtaggtaggggcgggcatccgcagcggaacttcaatggaaatggaggcggcggtggattcggggtcgtaaatggaggcggcaactataccaattttgtgcagaatcgcaatcgcgatcgccgtggacactacaatccaaatcactctggaagttctggcggctacaataacaatgggaacaacacctttggcggggagaacaatcatcctgtgcacggagcatccgagtcggcatcatctggaacaggtcctagttcgagcaatcaattcgccgtacgcgacgatgatgatcggcccaagctagtgctcaagcccaggactgtgactgcacccatcaactctctggctgaaaccaaacaggctgctctcatcttcggaaaggccaagccccgtgatgatagctccacgcccgtctcctcgccacgccaggatttggacgcaggatcgtcaggtgctccaagtgatcatgatcatgatccaggcttgggcgacaactagatcggatcatacgatgttgatggcagtctagaccggtggggttcagcatggcgagatctttcaataaacttttcataggcctcttatattattattagatttgtatccactgatgttcgtgcacttcgtcctcgaaatcaagactgcaatctctttactatttaaacgtattcaaaattcacattgtgcaatccattggcttgttttttcgcttgtgttaaattcagtgataaggcaaggaaataaataaataaatcattgaccttggatacaaaatccatgttcatgaagggaatcacgaataatacttttaaatattttcagatcttattcacgagccagcaaccaggaaaggttatttctctaattagggcctgatcagccccggataaccataaacatcaggacgccagccattccgctgggagtagccataaatcgccaaagttaatgctcggtgacaaagtcggggcaggaagataactcacctccggcggacaaaaaggacattcgcggacacttggagcggcattaactagtcaacttgaactaattgaattgaacaagattaaagaattttacgccggaataaagacgtttgggaagtgaggcgaaaaggagcagaaggccctggtatttatgggccaagatttacgagccacaacaagtcgcggccacttttggccacggctcctgaaattgagccgcacatcctggcttgtacaggcaaattggcttaatttctttttaatttgctgccggttttcccggcttttccttgctttccactttcactttccgcttggccttctcaggagctctcgaaacgaaattcaatttgaaaaagtggcaggcacaacggatgcgaggtgacctggccacgcctgtttccatttaaatttctggccgatatggagaacatccccgacccagaagccaatttacgcacgaacattttttcaatttgcgcggcagaaaccacagtgaccccccccccccc

SEQ ID NO: 890 - DNA, 1602 bp, DROSOPHILA
tgggattgaaattagtgtctccgggctgttagaaatcatttggaaacctttagctccgactccagtcccttgtctcgcgtagacttatcaacagcgtctggaatatcaagctccggacttttctttaagcgcttggtgctccgtgtgtccgtggttagaggttttgcttggctacggctaggtgtatatattttagtaggattgggactaggacctaagagcatggccaatcgctccagccagcgggaccgagagttcaatcgtgataatacttacaataacaatcgcgacaatcgagaccataatcgggacaatcgcgataatcgggagaatcgcagtaatttccaaaactatcgcaatcgtgacagggatcgcgataggcagcgtcaggtgcccacggaacctccgttcatcgcttatgtgggcaaccttcccaagggtctcgtccagggcgatgtgatgaagatattttcggacttcgaggtgaagaatgtgcgcctgatcaaggaccgtgagacggatgaattcaaaggctatggctacgtagagttcgagactctggcacaactgaagagtgctctcaactgcaacggacgcatcaagctagacaacttttcggcccccctgcgtatcgatatagccgaccatcgccggcagaacccgggtgctcccagcggtgttggcggagctcctccagccggagtgggccacgaaagaggtggtggcgtcggaagaggaggcagcacgggtgcagcaaacggtaacaatccctactaccagaggcgcaactatcggcgggacgacagtgtgggatcccatcagtttagaaggagggaaccgcgcagcaacagcagcaaccaccaaatgtccaatagcagccccacacaaagcaccacgtccattaattacaaccgcaccactcgaggtggtttcaatagccgtgttgctgtaggtggaaatggcaatcgttaccaaggaggagctccacgtaacttcaatgaccgcgaggatcagcaatcgaccggcagcggaggattccaacgcaatcgcacctacaactttaaccgatccatgaacaacagcgtcggcggaggaggtgctggagtaggtaggggcgggcatccgcagcggaacttcaatggaaatggaggcggcggtggattcggggtcgtaaatggaggcggcaactataccaattttgtgcagaatcgcaatcgcgatcgccgtggacactacaatccaaatcactctggaagttctggcggctacaataacaatgggaacaacacctttggcggggagaacaatcatcctgtgcacggagcatccgagtcggcatcatctggaacaggtcctagttcgagcaatcaattcgccgtacgcgacgatgatgatcggcccaagctagtgctcaagcccaggactgtgactgcacccatcaactctctggctgaaaccaaacaggctgctctcatcttcggaaaggccaagccccgtgatgatagctccacgcccgtctcctcgccacgccaggatttggacgcaggatcgtcaggtgctccaagtgatcatgatcatgatccaggcttgggcgacaactag

SEQ ID NO: 891 - protein, 459 aa, DROSOPHILA
MANRSSQRDREFNRDNTYNNNRDNRDHNRDNRDNRENRSNFQNYRNRDRDRDRQRQVPTEPPFIAYVGNLPKGLVQGDVMKIFSDFEVKNVRLIKDRETDEFKGYGYVEFETLAQLKSALNCNGRIKLDNFSAPLRIDIADHRRQNPGAPSGVGGAPPAGVGHERGGGVGRGGSTGAANGNNPYYQRRNYRRDDSVGSHQFRRREPRSNSSNHQMSNSSPTQSTTSINYNRTTRGGFNSRVAVGGNGNRYQGGAPRNFNDREDQQSTGSGGFQRNRTYNFNRSMNNSVGGGGAGVGRGGHPQRNFNGNGGGGGFGVVNGGGNYTNFVQNRNRDRRGHYNPNHSGSSGGYNNNGNNTFGGENNHPVHGASESASSGTGPSSSNQFAVRDDDDRPKLVLKPRTVTAPINSLAETKQAALIFGKAKPRDDSSTPVSSPRQDLDAGSSGAPSDHDHDPGLGDN

SEQ ID NO: 892 - DNA, 4246 bp, DROSOPHILA
gaattaataaggatgcttacttttatacacatttcgctacgctttttaattcaagtattgcaatacaaattagttttcattatcttggcctttaaaattacatataggtgttttgtaagggccactgcgatttttactgacgtcacaaatatattagtcgtctaccgtctttgatgagtacgtaaatcagcagcaacatgtctgcgaagagtaagaaatcacagagggctttcaaaaacaatctcatataacctgtattctatgggtccttggtaaaaagttgaaagatttaaaagaaacattggtcctgatttgtatgcgattaaattaacacagcaataacagattgtttgtcatattcatacccgaggctgtatgagaaagctattaacatgaagcaaaggaaataggtataacctgatcatactataattgaaatttaatcatttttggtcccattttgttacgtaaaatttccaaggcttttggagggcaagtcttgtttaaatgtatgaacacagaataaagacgattgaatagttgaaattaatattattttaatttggtgggtatattcctatatatccttgcagagggttcattttaattttaatcaaaagtaacaacgcagagaaattggaccctataaattagcactaattaaattactagtacatttatccatttcattttcatccgtttctacgcaagtttaaattacgattacaattctattactaagtcttaatcaaaaacaaaaataccgaggtgtcgattttttataatacaaaagtaagcaagcatttatttgttaggacaaaaaaaggaacaaacaagagaaaactttacagtctagttctccgactacccattacaatcagctggtgggagtgcgaacgagaaacgtacgtgggcgtggcagttgtaggtctgcgctatttttgtcacatttacggcaagtacgacaaaaacaaagaaaatgttgaaaaaattcaattagtttttttttttttttttttgcatatacacagagtatgttaggtatttttaaaaacatctccaaagtttcctgatacaatttaattacatttatggcttttattgtttagctaacagtaaaaaatacctcgattttgtattaaagcgttgatacattcgtcacgccccagacaatatcgtccttatcatcctgttcatcatgaccccaaccctgatcggcacacagctcattacagttcacggctgacgcagcagcagcaaaacggctgcttatttgctccggtgtctcacaggtactagtccggatttcgatgatcggttccatatctttgaagaaatcaaattcgttgaactcagacctttgaatcaccgtttgcacttttatgtccagctcactgagatcatcgataactttctgttctgtctgggatattgtctcgtttactccaactgataaattacattttccagtgcgatatgagggcgataaagatttgccagtttggatctctctagcaaatgaattactgtttgtttcagagtcggttacagcgtgatccacttggtagccctgttgaaggtggtctgtattgtcccaatcaagccaagtcccctcctcatcaatgttggccactctttcatgctctgtgccagatatatacgagtccttctcggggtctatattatgttttatacttatggatttttcatttgaatttaaccgaagtttctcgtcctccccaccgtccgggctaaggcgaatagataaaggtgaggcattgctttcttgtggcaatgggctcccagaaaccataaagtcttctacgtcgaaggatctagtattcattaaaggactaatagaccgcggttcgggataaggattgttgctgtctctggaaacagcagcgtgtggacggccatcagaaaaacatcgtgcacgatcaccgcccaaaactttgttagctcctaatatggaaactaaatcagccatgcaccttagtgttttgcctaccaagacgtcgttagtatcgttcataccaagctgtaaatgaggaagaatttcgctctctagttgctcatcgcttaagagacgaacatagtccataaaatagtcaagaagtattaatcgaatctgtgcatcacgcaagcggaacatcttgagtatgtgtggcattaagtattgtacgtagatttgcggagaaaatagcgatgccggtgctttatcagtaacttttgtacggagtatatgcggagtcacaaattcttgtgcagcaggatccagcagaaccattctagagagtaagtcacatgccagctgcgaagccactacttcctcgtcgaaatatcgcaatcgatcaatcaaacttctaaagaatttgtggcgctcgtgcactgacttcagtggcaactcaaagagaaaggaatgtataagcacgaattcatggttgaagtatggatgtagcaagatagcagaaagtcttggccttagctttgtattttgatgctttaggtgtgtgctgcaatactcacggaactcatgaacgtgtggagtgctatcagtaatacaactatcagttcctttcctgcttagcactttctcgcacaaaatggagaagaaaaattgttcgaagttctctccgtgaatagtcaagtctataaaagaatgtgccaagtcgagcagttgtttgttgacatccgtggccctccaaacgtactcgaagccagcgaggcgccagcttccactctccgttacgtaaatagactgcgtgttaatatttaagtgccgagccagggccttctcaaccaaaaatattagagcgcataaaatggttcgcagccctaggcagacttcaatgtcagtctgctgggccagcacctcatctagaggtctgactctctctgtagcaagatacttccgtcccgacttctcccaggtagctatatattttaagatgtacgggtggcggtagaccatcaggttctaggggaaaacatttggtaaacagttgatttctttaaccctacaagtatacttttattgctctttcaatcgggcccactccatttgaccatacatgtgccttgacaaagacttttccttcgaatacggagagcatctggctgcaacgttcatcgttggttgtctctggcgtcttagcgttataaactgtccaaaattgattagtctccaccgcattttcctcaacaagtattccttttagtttgctgccttcattgcccatagctctagatgctgttatctactacgaagcgcttaaatttatttcttatttcgggcacataatttattgcaataatagcatgttcagacagggttgcgtctacactaacagttgaaaacaatgttcgaaaaaagggaacaaggaattcatttatacatagatatatctatatcaacttcgtatggtcaaaaaaccccatttacacattgaattctatttgaatatcattatttgtatagcctttatacacatagtgagtataagaacctgtttagcaatgaaaatagctaaaataaacttcatatatataaaacataaaaaacatgtttcgttattcaaagagattttaaaattaaagcgaatggttaattataggtcatattttcacacttttcagtccctaattttgtttctcccaaaacatcttttttaagtgttgtttaagaacctgggcatgcccgtctgtatgtccatccgtataaacgtcgagatcccgggaactataaagctagattaagcatacacattgcagcgcaaattagttgacccatttaacacccaaaatatatgccgccaagaagttcaaatttcagttgagctcgtaccctttcagtcaccgatcgtggaatggattcccgactaaactcacctatggaaggtagctgtagagcacgctaagatgataaattattgttaaactcacttaaataggatggtaatcgtataatgaatgtgtttttaagtatgagtgtacacgagggttaccaaataattcaacgacctaaaccacaatggcagtaattgaaaaaacatgcttagcatgtgaaaactgcatcacattattcaacacattataaactttttcatttttgtctttttgtttgctcatgtttcggtcacactggacgtacgtgaaaacaagtgacaatcttttgtttttcacattttgtttttgtatatattttgaaaaaatacataaaactaataagtgtaacataaagtcg

SEQ ID NO: 893 - DNA, 2194 bp, DROSOPHILA
agctatgggcaatgaaggcagcaaactaaaaggaatacttgttgaggaaaatgcggtggagactaatcaattttggacagtttataacgctaagacgccagagacaaccaacgatgaacgttgcagccagatgctctccgtattcgaaggaaaagtctttgtcaaggcacatgtatggtcaaatggagtgggcccgattgaaagagcaataaaaaacctgatggtctaccgccacccgtacatcttaaaatatatagctacctgggagaagtcgggacggaagtatcttgctacagagagagtcagacctctagatgaggtgctggcccagcagactgacattgaagtctgcctagggctgcgaaccattttatgcgctctaatatttttggttgagaaggccctggctcggcacttaaatattaacacgcagtctatttacgtaacggagagtggaagctggcgcctcgctggcttcgagtacgtttggagggccacggatgtcaacaaacaactgctcgacttggcacattcttttatagacttgactattcacggagagaacttcgaacaatttttcttctccattttgtgcgagaaagtgctaagcaggaaaggaactgatagttgtattactgatagcactccacacgttcatgagttccgtgagtattgcagcacacacctaaagcatcaaaatacaaagctaaggccaagactttctgctatcttgctacatccatacttcaaccatgaattcgtgcttatacattcctttctctttgagttgccactgaagtcagtgcacgagcgccacaaattctttagaagtttgattgatcgattgcgatatttcgacgaggaagtagtggcttcgcagctggcatgtgacttactctctagaatggttctgctggatcctgctgcacaagaatttgtgactccgcatatactccgtacaaaagttactgataaagcaccggcatcgctattttctccgcaaatctacgtacaatacttaatgccacacatactcaagatgttccgcttgcgtgatgcacagattcgattaatacttcttgactattttatggactatgttcgtctcttaagcgatgagcaactagagagcgaaattcttcctcatttacagcttggtatgaacgatactaacgacgtcttggtaggcaaaacactaaggtgcatggctgatttagtttccatattaggagctaacaaagttttgggcggtgatcgtgcacgatgtttttctgatggccgtccacacgctgctgtttccagagacagcaacaatccttatcccgaaccgcggtctattagtcctttaatgaatactagatccttcgacgtagaagactttatggtttctgggagcccattgccacaagaaagcaatgcctcacctttatctattcgccttagcccggacggtggggaggacgagaaacttcggttaaattcaaatgaaaaatccataagtataaaacataatatagaccccgagaaggactcgtatatatctggcacagagcatgaaagagtggccaacattgatgaggaggggacttggcttgattgggacaatacagaccaccttcaacagggctaccaagtggatcacgctgtaaccgactctgaaacaaacagtaattcatttgctagagagatccaaactggcaaatctttatcgccctcatatcgcactggaaaatgtaatttatcagttggagtaaacgagacaatatcccagacagaacagaaagttatcgatgatctcagtgagctggacataaaagtgcaaacggtgattcaaaggtctgagttcaacgaatttgatttcttcaaagatatggaaccgatcatcgaaatccggactagtacctgtgagacaccggagcaaataagcagccgttttgctgctgctgcgtcagccgtgaactgtaatgagctgtgtgccgatcagggttggggtcatgatgaacaggatgataaggacgatattgtctggggcgtgacgaatgtatcaacgctttaatacaaaatcgaggtattttttactgttagctaaacaataaaagccataaatgtaattaaattgtatcaggaaactttggagatgtttttaaaaatacctaacatactctgtgtatatgcaaaaaaaaaaaaaaaaaaa

SEQ ID NO: 894 - protein, 641 aa, DROSOPHILA
MLSVFEGKVFVKAHVWSNGVGPIERAIKNLMVYRHPYILKYIATWEKSGRKYLATERVRPLDEVLAQQTDIEVCLGLRTILCALIFLVEKALARHLNINTQSIYVTESGSWRLAGFEYVWRATDVNKQLLDLAHSFIDLTIHGENFEQFFFSILCEKVLSRKGTDSCITDSTPHVHEFREYCSTHLKHQNTKLRPRLSAILLHPYFNHEFVLIHSFLFELPLKSVHERHKFFRSLIDRLRYFDEEVVASQLACDLLSRMVLLDPAAQEFVTPHILRTKVTDKAPASLFSPQIYVQYLMPHILKMFRLRDAQIRLILLDYFMDYVRLLSDEQLESEILPHLQLGMNDTNDVLVGKTLRCMADLVSILGANKVLGGDRARCFSDGRPHAAVSRDSNNPYPEPRSISPLMNTRSFDVEDFMVSGSPLPQESNASPLSIRLSPDGGEDEKLRLNSNEKSISIKHNIDPEKDSYISGTEHERVANIDEEGTWLDWDNTDHLQQGYQVDHAVTDSETNSNSFAREIQTGKSLSPSYRTGKCNLSVGVNETISQTEQKVIDDLSELDIKVQTVIQRSEFNEFDFFKDMEPIIEIRTSTCETPEQISSRFAAAASAVNCNELCADQGWGHDEQDDKDDIVWGVTNVSTL

SEQ ID NO: 895 - DNA, 3047 bp, DROSOPHILA
tccgataatattggcgacaacttttaaatgaaattgggtcttttttaggtttcaaattaaaagcattaaccctttgaaggcgcctgtgctagtcttgatcgtttacagagcatgtatagcacagctggaagttttcttaagagtgcccatgaagatggagttgagcttgtttgtcagtagggtgaatttaaaattttaaaaagatcaacttgataacgaaggattgttttaactttcaacagtaatttaaatatttactttaaacatcgcataaacacgagggcgcgccacgttttctagctaggctgaacgatgatttgcagcactggctttccccatttgttgtgctcggtcattctgcttttgaaaaaaattaaatgtgcctgatggtttcgccctagtttttaaactcaaaggacttctactatattagattcaaaaataaataaggaaaatgccatccaaatcaaagccgagactttcgcgtggtgtcctggacatgaagttcatgcagcgcacaaaagttaaagtggaaaaggaggcagacgatgagcagagcagggcactgtactccaacgagatcaaccagaagatgctcaattccacctcgaattttgtggtggagtccagctactcgatatgcgccggcctgatagacggacgcctcagtttccgcggcatgaatccggagctagaacttctcatggagcaggatctggcggaaaagcagggccgcacaaggccggagcagcccaaggaggtatccgaccaagacatggtaaaggcttattatgccaacaaggcgcccacggtctccggcagcatgagcaagaagtttaacaccaaaaaggactttaaaaggaagcaaatcggcggagatagtgatagtccgcatgccatgaagaagcagtactttaagaaaccacgctcgggtgacgaatagtttactacttagttgttacactcgtgacttagcttttagttaaataaatatacgaattcaattgtactcgcgctgtgcttgtttcaccgcctgcaaggcgtagcacatctggttgttgttgatccatcgccaggtgttgctccaaaagtcgtaggtgcttccatttaccaacaccgtctgacagttcactgcagatgaacgagagaataaagaatagcctaatctgaatataaagcctgagataaacttactcgtatccaagatgcgctgaacgtccaagggcgaaatcattttgtcccagtggtgcgttcccctgggcaccagattgagaacatactcgctgagtaacacgccaccgaaccaactgggtatggttttgttcaaagtggtgataaagatggatcctccaggctttaggctgcgtacactggcctccagcagggacactttatctttgacgtgctccagaacttcagacactatcaccgcatcatagcattcgcaattggccttggcatgctgatccaccggctcaattttgtacaccacattgctggccaactccggactggagcatttgagatgctcgcgagcagcttctattaacttctcgccaagatctatgccagccacctgggcacccaggcgcgccaagtgttccgtaagcaatcctccgccacatccgacctccagaatattttgacccaacaacactttggtggtatttacgtaacctggcttcacagtgccacgcgaaacgatgccatctctgataaagggaaccctgaaaggtggaaaggaacttagctataaacctttggaacatcaaatctgtatagcttacctaatctcattcagggcatgtagagcacccatggttccattttgattccaccactccgaggcgtgattctcatggtgccgcacttccttttgggtgccggcatccaacgacttcgctgtgctgctgcttctagtcgaatttcgcccgatagaacaggatagcaaatgtctcagtttgctggaatgcaaaactgtaatgtaatctacttttgcagtctattttttgacttacccgcttactaacaaggcatttcgcatcatttttgcgagaaaaacaaacgttgataaacaaaaacagctgactttgttttgctgcccggcgaaagcatgggcgtagccaggtgcattaagggggattgacaattcttgaatattaaacaataactattatttgtcatttttaaacacccatattgtaaggcattatagtactttcaggtacttttgttcaggtaaaaatttaaatattaataaagaaaatgaatataaagaaaataaaggagatggggttctccacacacgtcagttcccagttgtgaaatgtaatgactgtcagcaggaaccaatggaatggagcactcttttcagttccgatcaggttagttctttccattgttctagcgcctatcaaacagagagccgcgagcactatcaatcacctcccgtatcgataaggataatcaatttcttcttgctatttttagacatgccggaatacaagaagctagaggaccaggagtcagatgtggagaacgcaaatagaaccaccgtccagaacactgctaccgttcaggacgccggggagggacagaggcaggcggctggccagcaggcgggacaaatggtgacggtgtccttgttcatgcttcttttcctcggcagctcctacttccaagtatgtacttcatatgagatttcagccatatgtgcatatttgatttatttataccactaattcctttactacagccgcgaccacgactgcatcagtacaaggggggcaggggccatggactgctggagaagttcgactgcaacatacaactggtggaatccatacccattggcctaacatatcctgacggcagtccacgattcctaagcacttacgaagcttggctggagttattggagagcgccacgacctcactagacatagcatccttctattggactctgaaggccgaggatacgcccggggtgtcggacaacagcactcggccgggcgaggacgtcttcgcaagactcttagccaacggaa

SEQ ID NO: 896 - DNA, 870 bp, DROSOPHILA
atgatgcgaaatgccttgttagtaagcggcaaactgagacatttgctatcctgttctatcgggcgaaattcgactagaagcagcagcacagcgaagtcgttggatgccggcacccaaaaggaagtgcggcaccatgagaatcacgcctcggagtggtggaatcaaaatggaaccatgggtgctctacatgccctgaatgagattagggttccctttatcagagatggcatcgtttcgcgtggcactgtgaagccaggttacgtaaataccaccaaagtgttgttgggtcaaaatattctggaggtcggatgtggcggaggattgcttacggaacacttggcgcgcctgggtgcccaggtggctggcatagatcttggcgagaagttaatagaagctgctcgcgagcatctcaaatgctccagtccggagttggccagcaatgtggtgtacaaaattgagccggtggatcagcatgccaaggccaattgcgaatgctatgatgcggtgatagtgtctgaagttctggagcacgtcaaagataaagtgtccctgctggaggccagtgtacgcagcctaaagcctggaggatccatctttatcaccactttgaacaaaaccatacccagttggttcggtggcgtgttactcagcgagtatgttctcaatctggtgcccaggggaacgcaccactgggacaaaatgatttcgcccttggacgttcagcgcatcttggatacgatgaactgtcagacggtgttggtaaatggaagcacctacgacttttggagcaacacctggcgatggatcaacaacaaccagatgtgctacgccttgcaggcggtgaaacaagcacagcgcgagtacaattga

SEQ ID NO: 897 - protein, 289 aa, DROSOPHILA
MMRNALLVSGKLRHLLSCSIGRNSTRSSSTAKSLDAGTQKEVRHHENHASEWWNQNGTMGALHALNEIRVPFIRDGIVSRGTVKPGYVNTTKVLLGQNILEVGCGGGLLTEHLARLGAQVAGIDLGEKLIEAAREHLKCSSPELASNVVYKIEPVDQHAKANCECYDAVIVSEVLEHVKDKVSLLEASVRSLKPGGSIFITTLNKTIPSWFGGVLLSEYVLNLVPRGTHHWDKMISPLDVQRILDTMNCQTVLVNGSTYDFWSNTWRWINNNQMCYALQAVKQAQREYN

SEQ ID NO: 898 - DNA, 3395 bp, DROSOPHILA
ccaggaggcccaatggccacgcccgactcggccgctacgagaacactctggaggtaaaggtccaagagggagacacactccaggcgctggccctgcgctttcactcctctgtggcggacatcaagcgcctgaacaagatcgaccgcgaaaatgaaatccacgcacatcgggttattcgcattccggttacagtgcacaacgtcctgctgggcaacgggggcctcgaagcccttcctgcggtccaccgcagcgggaacaacagtcctagacacaatattgagcgggaaccagctcccgaacgcaatcccctcgaggatgcgcggcaaatgctggatgagcgactcctggtggcggcggtaaatgcttcaggcgccgtggatcacgagaaaccatcgacgagcagagctgctggacaattctacgagggagcccagggtgcgccgaatgacgaaggtgagtacagaagatgcagttgggaatgaaagcccacagttcgccgcggttttaaaaatttctgaaatactttcactgttggtgaagaaaggtcagtgctgatttcagtgcgagtgtacatatatattatttaatttaaaaataaaagtacaggtaaggtaaagggtgcagaatgtatgtttacttatcaatcaagcaatatcagtactttaaaaataacaaagtttcttatctatttcaattcaaatatctaccaattttgaactaaaacacatgcatggaaattcgcaacatgctctaagataagataagaaatataacagcatttagacattttatgtgttaaaaatttaagctccagttactaattagtatatttccaattgaaataccataaaataattttgggaaaagtttaagatttgtattttaacagtagaagttaaaagtggctacacatcgatagttcccagtgttaaagtcagtgttgggaaagcatgtatcgattcgtcgatagcgctagcggtgcttctcccatctctatgccaaattgttcagtcattctcgccgtaaaacaaaaggaaaacatcgcataaactcattttttgccttaaaaaccgtacaattgcaatcgaataagatgccggactacctgggcgacgaccagcgcaaggtgaagcacgatgagaaggaggacaaggagatcaagtccctcgacgaaggcgacattgagcttctaaagacttatgggcagagccagtatcacaaatccatcaagagcatcgaggaggacattcaaaaggctgtgaagcaggtgaacgagctgactggaatcaaggaaagcgacacgggtctggcgccaccagcgctctgggatttggccgccgacaagcagatcctgcaaaacgagcaaccgctgcaggttgcccgatgcaccaagatcatcaacgcggattccgacgaccccaagtatatcatcaatgttaagcagttcgccaagttcgtggtggacctagctgactcggtggcccctactgacatagaagagggaatgcgtgtgggtgtcgaccgcaacaagtaccagatccacattccgctgcctcccaagattgatcctacggttaccatgatgcaggttgaggacaagccggacgtcacctacagcgatgtgggcggctgcaaggaacaaatcgaaaagctgcgcgaggtggtggagacgccactgctgcacccggaaaagttcgtcaatctgggtattgagccgcccaaaggtgtgctactgtttggcccaccgggaacgggaaagaccctgtgtgcccgcgccgttgccaaccgcacggacgcttgctttatccgcgtcattggctctgagctggtgcaaaagtacgtgggtgagggcgctcgtatggtgcgcgagctcttcgaaatggcgcgttccaaaaaggcttgtctcatcttcttcgacgaaattgatgctatcggtggtgcccgattcgacgatggggccggcggcgacaacgaggtgcagcgcaccatgttggagctgattaaccaactggatggcttcgatccgcgcggaaatatcaaggtgctgatggccaccaaccgacccgacacgttggatccggcgctcatgcgtcccggtcgtctggaccgaaaggtggagttcggcctgcctgaccaggacggtcgctcgcacatctttaagattcacgcccgctccatgtccgtggagcgagatattcgcttcgatctgctggcgcgtctatgtcccaactcgactggtgctgagatccggtcagtatgcacggaagcgggcatgttcgccattcgggcgcgtcgcaaggtggccacagagaaggatttcctcgaagccgtcaagaaggttatcaagagctacgccaagttcagcgccactccacgctacatgacctacaactaagttacatttattggcactattctgtatcctctgcaaactgtaacactgcagctggcaatttattaaataaagcgaaatctatacctccaccaactgaaaactgaggtgttttatatattttataaatcttgtttgcaatgtcttttaattgcgtaatcatgatctcttaactttgtctacagccaatatggagcaaccctacgaggaaaatgccgctctgcttaaccacatggtggacaggcacgctccgctagtgcgtcccatccctggaccctctttgagtgccatcgactggtccggatcggactgcgacttgtcttggatatgtctgctgatcttcatactcgccttgtgtgtcgtcatacccttggtctacgtcatctacctagcagagcatccacatcacaaccatagtgcccagtagttgggtaatgtctgcacccgaagtggtcatcattccaaacggcaccccctcacccggcaccctgtcaatctctcagatgagcctggcgcatttcaaatgcaaccccaggcgacggaatttatttttatacctatgcgcgtaactttgtattgactcttgataaaaaaaataaggtctttgtcgacagaacttttaaattaccacgatttgggtgcttcccagatgcataggcttgtctatgcgccacataacttctggcagcaccaattgcaggattctaagatccgattgtgctgtgaatataaatcgtaaccccgccgttttgcttttctatatgttttattgagtacaattatgtaacatttaaactacaatagtacgggtaaggtgtaacattattcagctgaagttgggatagtttctcttacgccaaaaaagtacgtaatacatatcttagagctaaataaatagtatccatggatataagaattatgtaatactaaatacgaactacaattaacaatggcgcatgctaacggccaactgaacttaagtactttttttccgtgatgtttc

SEQ ID NO: 899 - DNA, 1395 bp, DROSOPHILA
aaattgttcagtcattctcgccgtaaaacaaaaggaaaacatcgcataaactcattttttgccttaaaaaccgtacaattgcaatcgaataagatgccggactacctgggcgacgaccagcgcaaggtgaagcacgatgagaaggaggacaaggagatcaagtccctcgacgaaggcgacattgagcttctaaagacttatgggcagagccagtatcacaaatccatcaagagcatcgaggaggacattcaaaaggctgtgaagcaggtgaacgagctgactggaatcaaggaaagcgacacgggtctggcgccaccagcgctctgggatttggccgccgacaagcagatcctgcaaaacgagcaaccgctgcaggttgcccgatgcaccaagatcatcaacgcggattccgacgaccccaagtatatcatcaatgttaagcagttcgccaagttcgtggtggacctagctgactcggtggcccctactgacatagaagagggaatgcgtgtgggtgtcgaccgcaacaagtaccagatccacattccgctgcctcccaagattgatcctacggttaccatgatgcaggttgaggacaagccggacgtcacctacagcgatgtgggcggctgcaaggaacaaatcgaaaagctgcgcgaggtggtggagacgccactgctgcacccggaaaagttcgtcaatctgggtattgagccgcccaaaggtgtgctactgtttggcccaccgggaacgggaaagaccctgtgtgcccgcgccgttgccaaccgcacggacgcttgctttatccgcgtcattggctctgagctggtgcaaaagtacgtgggtgagggcgctcgtatggtgcgcgagctcttcgaaatggcgcgttccaaaaaggcttgtctcatcttcttcgacgaaattgatgctatcggtggtgcccgattcgacgatggggccggcggcgacaacgaggtgcagcgcaccatgttggagctgattaaccaactggatggcttcgatccgcgcggaaatatcaaggtgctgatggccaccaaccgacccgacacgttggatccggcgctcatgcgtcccggtcgtctggaccgaaaggtggagttcggcctgcctgaccaggacggtcgctcgcacatctttaagattcacgcccgctccatgtccgtggagcgagatattcgcttcgatctgctggcgcgtctatgtcccaactcgactggtgctgagatccggtcagtatgcacggaagcgggcatgttcgccattcgggcgcgtcgcaaggtggccacagagaaggatttcctcgaagccgtcaagaaggttatcaagagctacgccaagttcagcgccactccacgctacatgacctacaactaa

SEQ ID NO: 900 - protein, 433 aa, DROSOPHILA
MPDYLGDDQRKVKHDEKEDKEIKSLDEGDIELLKTYGQSQYHKSIKSIEEDIQKAVKQVNELTGIKESDTGLAPPALWDLAADKQILQNEQPLQVARCTKIINADSDDPKYIINVKQFAKFVVDLADSVAPTDIEEGMRVGVDRNKYQIHIPLPPKIDPTVTMMQVEDKPDVTYSDVGGCKEQIEKLREVVETPLLHPEKFVNLGIEPPKGVLLFGPPGTGKTLCARAVANRTDACFIRVIGSELVQKYVGEGARMVRELFEMARSKKACLIFFDEIDAIGGARFDDGAGGDNEVQRTMLELINQLDGFDPRGNIKVLMATNRPDTLDPALMRPGRLDRKVEFGLPDQDGRSHIFKIHARSMSVERDIRFDLLARLCPNSTGAEIRSVCTEAGMFAIRARRKVATEKDFLEAVKKVIKSYAKFSATPRYMTYN

SEQ ID NO: 901 - DNA, 4040 bp, DROSOPHILA
ctccaaaaagaatcagtttgtgtaagctttgctttaatttagcacttttattagcaagtatagcgtcacacctggtaccttccgatgcacttgaagaaaataaaagcaatagtttggttaaatatgtgaatatttctgcttaagaaattttacatatttcggacaacggaatatattcagaactatcgaccatagttttaggtcgattattataattttaaatttttggttaatttttcctctgtgttcggtacttgcttcccagcgaattctcgattctggccgctttcgcgcggccatcgtatttggtaatcggcggcagaggcagcaacaactgcgatggccaagttcagtggcctccaagtgtgttggaattgttttcgcccgcattttgtgattgggctatgatttgttcttgtgcctcgccactcgatgggcctgaaaaactgggttaagcgtggtcaggtaaacccgcagatcccaagattgccaaacttcatagctctgcgaggctgtgaggcaatgtacatcccgtcttcaaacgcaagcccacctgagtttcggggaaacgggattgccacactataaactacgaggagtacaagaaaatgcaattaaccggccagaaaatcaaatgtcaatcacgtagtgagtcgctgatggaaacctgttgtgggctctctaacatttcaatgactttgaacttttgtttgcgctggtttcggtcggttgttgtgcagcatttacatattgattgttggcatgacccatttgtttgggccctcgagagcggcccacgccacttccactttcgttgactttctttgtccgtcgtccactgatcggtcgcttaatcaaataaagcctcccttctcaggccccctgggatcgccaagatttcctaaccagtttggagcttcgttctcgccggttctcggcgctggctttcataaaaagtctttggccaactttcttgggcttcattcgcgtttgtcgccaccatgaaagcggttctctgcgcgatttttgtaactttgctggccgctattggccagggattgcccactcagttggaggatgagaatcatggatcctttgccggccaagtttcccagctgattgctctgcagctgctgaagttcaacaaggacatcgatgccaatcaggtgcattctccattgggagtagcttctattctggccatgctggcggaggcttccgaaggcgatacctactcggagtttgagcaagtcttcggttaccccaaggatcgcaccaagttgagggatgcctacaagaggatcctgggaagctaccagaacagagatgctgccgtggccctgccctccttccaaacctggttgtacatctaccggaataacagtgcccgcgaggagttcaaggatctgctcgagaaacactactatgtggatgtgaaggatatcagtcggcaggagtacgactggaatgagcccaacacctcgctgcaactttcagaggaaaaggacaacacggattccacagagggaagcaccgaacaaagcaacagcaaggacgtcataggattcgagaccctaaagagaattaagctggatgacgaggacatccctgccattccatccgatggctatggccaggaaatcatcgacaaagaggcctccaagttcgatcgcgacgtggacgacaagcaatatgtggaaaaaccagttgcccaggctgaggccgagctactgcagaaagaacagaagcagcaggccaccacagaatctgaattggaatcccagcccgaggaaaccaccactctttctgtggaaaaacaggaaaaaccagacatggcagccgaggaaaatccagcagaaaagcagcagaacaagcgcagcgaccaggaggagagccagatcaagaacctcgaggagaacgagactgtgcaagaggaggagaagctggccaagatcatggcagctcccgctttgaccgccggtgaacccgagaaggtgcgtctgcccctccagaagttggagaatgccgtgaagacggcggccaaggatggcgctgatgaaatcatgctcgctctggagtcgcacctaccttctgtcagtcgggtgagttgaaatctttagctaattctaataatttgcttgaaattagttttcatctattttgatctacatatcccttactttacccttaggtcaatggcgcacgaagtttgttccagcaggatgacatcacgtctgccctaagtgccaactccatcacgggacgatcggcaggatcaaagtccaagatgctcctctttaacggactctactaccgcggcagctgggccaatcccttctatcagctgcgagatggcagcgatgagtttttcttcatgaccaacgaggacgccgtgaaggctccaatgatgcatgcccgtggcaaattccaggtagcagatcttccacaggtcaaagcccgagttctaagcctgccctacgaaacctcccgatatgccttgtgcattgtcctgccggacgaaacggagggacttagtgatgtgatttcccagctgcagacgagtgacttcctgttggccaagaagcagttccaaatgaaggagctgcatatttcgatgcccaaattccaagtggaggagacctcacgctccgaggcaatgctcaagcagatgggcttaaagaaggtcttctcgaggaccgaagctcagttgagcttgctgtccgaggatcccgatgtccacgtggatgagatagtccagttcgtaaatgttcgcgtggacgagggaggcagcagtgccaattccctgtcagctgccaccatgcaggccagaactcccagcgtggagtccacagttctcccagttccggaacctgaacccgaattgccaggagtggaacgcttcgaggtgaatcgtccttttgcctacttcatcgtcgactgccaggagcagttcgtcctggcctccggaaaaatctacacgcccgagtttaaggaagatctgccctcagtctccatcgaagtggagctggagcagtcttagtctgctagcttagtaacgaattttcaccgatccatgcaataaacgtacacaattcattttccaaaacaagtaccgagtcgcagcattttcccagcgcaatcaaaacagcaattaattcacttacagatgagcagcagcaacccccgggattcaattgtccgtccgtaatgtgaaatgtatctgagcagggcatcgctaattttcgaaatttgtcttcgggtgacgagttgcggattcgatactctcgaaattctcagggcatccgagcatgaagcgcatccgtgccacgtgtcctgcgaactcctcgccggaacgaaagctgacaggactcttcaagtggtcaatgggctgcaattaaaattctcattagaatgcatgatgtcttactatctgattctgattcgcagtctggccaggaagtgcgagccccttgtttcctgcgaaaaccaccgaaaacgcatgcgaaaagcaaaacacaacacggagaaaatgtgtctggatgcctgaagccatagaagaaatgtatatgtactatatctgaggaggggaggggatatctgggggaccgaaggtctggagctgaaagtggcgccggcctggcgggcgccaaaaagcagaggtaaaaacaggagtaaatgcgtgccatgattacagcgatgacgacttccaccccgaaggaaaagcaaggaaagctgcgacgcagacgatgatgtttcatcttttccacatgaaaactcacgtaacaaaaattatgataatcataacttttccccccacgcatcctctgcccacgagtgcctttgttttgttagccggacaaaggacccatggaaaggtagaccttggaccatagaatggcgtctagtttttctgccgtctggccattgctctatttttattaagtctttgcatataaatcaatgtgccccgatatgcagaagagcagaaaaaggtataaaagatttatgactctggtccgccggcgagagagctcgtttaa

SEQ ID NO: 902 - DNA, 1951 bp, DROSOPHILA
catgaaagcggttctctgcgcgatttttgtaactttgctggccgctattggccagggattgcccactcagttggaggatgagaatcatggatcctttgccggccaagtttcccagctgattgctctgcagctgctgaagttcaacaaggacatcgatgccaatcaggtgcattctccattgggagtagcttctattctggccatgctggcggaggcttccgaaggcgatacctactcggagtttgagcaagtcttcggttaccccaaggatcgcaccaagttgagggatgcctacaagaggatcctgggaagctaccagaacagagatgctgccgtggccctgccctccttccaaacctggttgtacatctaccggaataacagtgcccgcgaggagttcaaggatctgctcgagaaacactactatgtggatgtgaaggatatcagtcggcaggagtacgactggaatgagcccaacacctcgctgcaactttcagaggaaaaggacaacacggattccacagagggaagcaccgaacaaagcaacagcaaggacgtcataggattcgagaccctaaagagaattaagctggatgacgaggacatccctgccattccatccgatggctatggccaggaaatcatcgacaaagaggcctccaagttcgatcgcgacgtggacgacaagcaatatgtggaaaaaccagttgcccaggctgaggccgagctactgcagaaagaacagaagcagcaggccaccacagaatctgaattggaatcccagcccgaggaaaccaccactctttctgtggaaaaacaggaaaaaccagacatggcagccgaggaaaatccagcagaaaagcagcagaacaagcgcagcgaccaggaggagagccagatcaagaacctcgaggagaacgagactgtgcaagaggaggagaagctggccaagatcatggcagctcccgctttgaccgccggtgaacccgagaaggtgcgtctgcccctccagaagttggagaatgccgtgaagacggcggccaaggatggcgctgatgaaatcatgctcgctctggagtcgcacctaccttctgtcagtcgggtcaatggcgcacgaagtttgttccagcaggatgacatcacgtctgccctaagtgccaactccatcacgggacgatcggcaggatcaaagtccaagatgctcctctttaacggactctactaccgcggcagctgggccaatcccttctatcagctgcgagatggcagcgatgagtttttcttcatgaccaacgaggacgccgtgaaggctccaatgatgcatgcccgtggcaaattccaggtagcagatcttccacaggtcaaagcccgagttctaagcctgccctacgaaacctcccgatatgccttgtgcattgtcctgccggacgaaacggagggacttagtgatgtgatttcccagctgcagacgagtgacttcctgttggccaagaagcagttccaaatgaaggagctgcatatttcgatgcccaaattccaagtggaggagacctcacgctccgaggcaatgctcaagcagatgggcttaaagaaggtcttctcgaggaccgaagctcagttgagcttgctgtccgaggatcccgatgtccacgtggatgagatagtccagttcgtaaatgttcgcgtggacgagggaggcagcagtgccaattccctgtcagctgccaccatgcaggccagaactcccagcgtggagtccacagttctcccagttccggaacctgaacccgaattgccaggagtggaacgcttcgaggtgaatcgtccttttgcctacttcatcgtcgactgccaggagcagttcgtcctggcctccggaaaaatctacacgcccgagtttaaggaagatctgccctcagtctccatcgaagtggagctggagcagtcttag

SEQ ID NO: 903 - protein, 649 aa, DROSOPHILA
MKAVLCAIFVTLLAAIGQGLPTQLEDENHGSFAGQVSQLIALQLLKFNKDIDANQVHSPLGVASILAMLAEASEGDTYSEFEQVFGYPKDRTKLRDAYKRILGSYQNRDAAVALPSFQTWLYIYRNNSAREEFKDLLEKHYYVDVKDISRQEYDWNEPNTSLQLSEEKDNTDSTEGSTEQSNSKDVIGFETLKRIKLDDEDIPAIPSDGYGQEIIDKEASKFDRDVDDKQYVEKPVAQAEAELLQKEQKQQATTESELESQPEETTTLSVEKQEKPDMAAEENPAEKQQNKRSDQEESQIKNLEENETVQEEEKLAKIMAAPALTAGEPEKVRLPLQKLENAVKTAAKDGADEIMLALESHLPSVSRVNGARSLFQQDDITSALSANSITGRSAGSKSKMLLFNGLYYRGSWANPFYQLRDGSDEFFFMTNEDAVKAPMMHARGKFQVADLPQVKARVLSLPYETSRYALCIVLPDETEGLSDVISQLQTSDFLLAKKQFQMKELHISMPKFQVEETSRSEAMLKQMGLKKVFSRTEAQLSLLSEDPDVHVDEIVQFVNVRVDEGGSSANSLSAATMQARTPSVESTVLPVPEPEPELPGVERFEVNRPFAYFIVDCQEQFVLASGKIYTPEFKEDLPSVSIEVELEQS

SEQ ID NO: 904 - DNA, 2765 bp, DROSOPHILA
acacacacatggggcgcacaccagcgcagccacacacgcactggcttacacacacacacactcgcacacattcaacagatattgcattttctttttggactggaagatacgcaaattccagctgcaaacgttgcattttcaccaggcattttccgcaattaccttcttcgcgttttccacgttttccacgcaatttcctcgcttttcgcctctttgttctcgcctttttcgcgtttcccacacacggcacttattgcttttcctctttttctccgtttttccttgccttttgacgacaattcgctgatatttgccgacgtattttcacttgattcactcgcgttcgcaacccatcacttttcgcgtgcattcaatcgcatttttcaggcatttccgatgcgcgtttggcttaaatttagtaaaattaattcgtggttttgttgctgccgtcgtgctagatatgttcacatatcgatagaccgatatcgatagacagagatctagggaggagcagctgtacttggtctggcaaccacatcaggtatcgataggatttgaccgtggtatataaacatcgatattatactgaaaacaaatataaaaatatttcagtgatcagtttatataaatttatgtaatacgacagaatatagagagcaagtaaatgttatcggttttaacttaaagaacaagacttgttagaattgttaatgaggtttcaaaccatttctgtgtagcacgtagcatagacgcaatccttttctcatataaataaaatcaactgatttcaaagtcttaatattttaaaatataatgcagaacattgttttgagtaagaatgaaaatattaacttcctgtgaaaaacagaagttttaaatgcatcaaattagtcgcctaactgcaagtcaaaccaaattatacaagtgttttagtttgccgctcagtttttgaaacctcgataaggaaaactcaaagctgcgttccagaacagcgctatcgataagctatcgtatctgcatggttttctttggatttcctcaaatttcaaggcacttttctaagtttaccaagatgtcgaaaagcgcgctggtgattttggctcccggagcggaggagatggagttcatcatagccgccgacgttctgagaagggcgggcgtaagtgctctcaacctttccattaaatcactctgttctatacttatacttactatatgatagatcaaggtcaccgtagccggtttgaatggcggggaagcggtgaagtgctcgcgggatgtgcagatcctgccggacacctcgctggcccaggttgcctcggataagttcgatgtggtggtgctgcccggcggactgggtggctccaatgccatgggggagtcctcgctggtcggtgacttgctgcgcagccaggagtctggtggcggactcatcgccgccatctgtgccgcgcccaccgttttggccaagcacggcgtcgcctccgggaaatccctcacctcgtatccctcaatgaagccccagctggtgaataactataggtataccacctcttaagtttattttcccatgatcttcatcccatttcttttgattatttctttaagctatgtggacgacaagacggtggtcaaggatggcaatctgatcaccagtcgaggtcctggcaccgcctacgagttcgccctcaaaatcgccgaggagctggcgggcaaggagaaagtccaggaggtggccaagggtcttcttgtggcctacaactaacatatttacacttatttatgaaaacagattgtttcaagagcaactcatgcaaacaacaactgaattaaaataaaattattcaagacagaagttgtgattcaattttatatttgctatttgaaagaagtttaaatggagagctaggaaatggcatgttgttaaagatatattaaagaaatttatttaagtgaatttaaatgtcattatttgaagcaaacggttttcatttaattagttttgagcgaagtataattctatcataatgaatcaactgaactgcgttaaaataaattgttcaatgggctttaatttaatttgtcatgaaatataaatgcatatatggcatgaaaaaagaaacatctatattatttcatttggttatgactggactataaatgaaattaaaaatgcatatattaaaatgggatgtgaagccaaatggaagtattgctgacgatatatttacaaaatagtacattattaatatatttagttatattcaatatttacattgattaaacattctgctgcatttaattgtaaaattttaaaaatagctgaaagtaatggcctacggtggaatacccctactgggttggagtccctgcacaccacaacccgtgccgcgaaccgtggttgccgtctccgctcgcgccaaaagggactaagtatttcgtcgctagccgccgctggtcccactctcgcagccgcagcgaacggttgttgtggttgttgtagttgtagtgggagttcgtcggcgtgtttgcgtttcgctcgctcgtttggcgatttgctgggattatatttgcccgtttattttgtggcaaaagcgcatttaattcgaaggaagtgagtagtgagtggcgaaaagcggagacgcactgccgcgctggaaaggcggagtgaattgagtgcatgcgaatgcgtgtggagagcaaatcgaagtgcaagtgcgtgccagcgaataagaagaagtgcgaagccgaaaaggaagcgaagc

SEQ ID NO: 905 - DNA, 636 bp, DROSOPHILA
ataagctatcgtatctgcatggttttctttggatttcctcaaatttcaaggcacttttctaagtttaccaagatgtcgaaaagcgcgctggtgattttggctcccggagcggaggagatggagttcatcatagccgccgacgttctgagaagggcgggcatcaaggtcaccgtagccggtttgaatggcggggaagcggtgaagtgctcgcgggatgtgcagatcctgccggacacctcgctggcccaggttgcctcggataagttcgatgtggtggtgctgcccggcggactgggtggctccaatgccatgggggagtcctcgctggtcggtgacttgctgcgcagccaggagtctggtggcggactcatcgccgccatctgtgccgcgcccaccgttttggccaagcacggcgtcgcctccgggaaatccctcacctcgtatccctcaatgaagccccagctggtgaataactatagctatgtggacgacaagacggtggtcaaggatggcaatctgatcaccagtcgaggtcctggcaccgcctacgagttcgccctcaaaatcgccgaggagctggcgggcaaggagaaagtccaggaggtggccaagggtcttcttgtggcctacaactaa

SEQ ID NO: 906 - protein, 187 aa, DROSOPHILA
MSKSALVILAPGAEEMEFIIAADVLRRAGIKVTVAGLNGGEAVKCSRDVQILPDTSLAQVASDKFDVVVLPGGLGGSNAMGESSLVGDLLRSQESGGGLIAAICAAPTVLAKHGVASGKSLTSYPSMKPQLVNNYSYVDDKTVVKDGNLITSRGPGTAYEFALKIAEELAGKEKVQEVAKGLLVAYN

SEQ ID NO: 907 - DNA, 2747 bp, DROSOPHILA
gcggttgaaacaagaaaaatggttgctccggtgtataatgtgttaaattgaatgttaattaagtggaacccccttagtttttttcccccttttttttgggctttgtgcggcacaaaccccccccccccccctccctccctccattccccttgagtccgacgctaataagccagattgaagagaccacaaaaaggtgtcccaaagtagttcacccgccgcaaacccgttgcgtggatggaaaaaaatataatatcgtaaatgagccaaacccgtttgcatgtgcgatttcgttcgatttttatgttgaatttaattttaatgtgattttccgtttggtagtttagccagccccctccctatatatgctttttaacctccgccctgattagtgttgccattttagccattttattgccaaaaccatctaactaagtaagctctgccaatgatctatgctagttaacgtttcaagttaccatttttttttcaaaactcagtttttaagaagtaagtaaatatttaacaagtcggcagttttaagttgtaaataggtgattagctcaaatgttagtatctaaatcttttatattattacttattttgcattgtgctaccactactacttaattgaacattgcaaacggtctggtgtacataaacaattataagtgaagcatattcttaattgaaaatacttaaactttttaacagttttcacaattagctgccaacttatgtggctatgtcccctcagcccctcagcaccagtcagccgtttgtttgtcttgatttcatggtgacgtcttttgcggcggcttcttcttggtccgctggccgcttaagcctgctcttcttcttgcccggcgtctgccgttagtgccggtgtgccaccgctgcagttggaacgggctctccaaaaccggggcttttcttcgaagacggccggcagctataaattgactggcggctggtagggaccggcatcagtcgcagcctctagctcatccagcacagtcgcttgaaaacgcagaaacctcaactcaagatggtcagtgaaggattacaagttcagcttgaaacaaggatacatcgatttaacaatattatttgacaaaattttttttttttttgcggtgcttaaaaaatttgctgtgtttgtaatgtgtgaagtgtgttgtcctacttgcagaaattccttattgccttcgccctgttcgcctgcgtggccgccgatgttagccacctgagcaacgagtacctgccccccgtccagagctcgtacgccgctccctcggtgagctactccgcaccagccgtgcagcagacctacgccgctccagccatccagcagtcgtatgtcgcccccagcaacgagtacctgcctcctgtgcagacctactccgcaccggccgtccagaggacctactccgcaccagctgtccagaggacctactccgccccctctgttagctactcggcaccctctgtgagctactcggctccatcggtcagctactccgctcctgctgtccagcagtcgtactccgctccatcggtcagctactccgcccctgctgtccagcagtcgtactccgctccatcggtcagctactccgcccctgctgtccagcagtcgtactccgctcctgccgtcagctactccgccccatcggtgagctactctgcaccctccgtggatgtgggcacccagtacgcctccaacggtggctacgtctacaggaagtagggatcttcaacgaagaggcctgcaactgaacacgaaacagtgtccataactacatactgcccaaattaaccatatattttttttttttgttttgtaaacttttgtttacaacgaaataaaccgaaacatcaataatccaaataaatacttttgtttttaaaatgggtttcagagttataaaaacaagcgtctaatattaatattaataaaatttttaacaagtgtatccctattcactttatatcaaaattccggaccaggataccaaaatagcgtactaaaaaccacgcgcgacttgagtgcggtttggttgcggtttaggtgcggttttgttgcggttttgatgcggtttgagtgcggttcgttttcaaaatcgaacgtcaaaagcaagtgcttgttggtgcttaatacttcagagtagacaaaaggtggcactttataagccaataaaaatataataaagtatacgaatgatatgtccatacaaagtaaagaagatttattggcattagtctataatggtaattttcaaaattaaaaagcttaattcttcgactagttaacactaaaacctgtaggacaagaacataaacatttaacatacatcaatgttttaactaagtattagcgttaaaaaatataatataaagctttaattaagttgggctttttataaacagcttgcagctttgattaaacttggaagctgcgactattttaagcattttcaaagagcttttagtttaaatatagcatgaaactttatggttttcctagttttaacactaagcttttgagtatttcaaaactatgacttgcagatacattttctgagagtgcttggcatttctgaaaaattatttactcaagactttttgaaatcattcaaaaccattatttagtatattacagtaaataaaacgaacctcctcgacgtttttcctgtttttaattaacacccttttgctttcaggtagtaatttttaaaatttaatattca

SEQ ID NO: 908 - DNA, 606 bp, DROSOPHILA
ctcatccagcacagtcgcttgaaaacgcagaaacctcaactcaagatgaaattccttattgccttcgccctgttcgcctgcgtggccgccgatgttagccacctgagcaacgagtacctgccccccgtccagagctcgtacgccgctccctcggtgagctactccgcaccagccgtgcagcagacctacgccgctccagccatccagcagtcgtatgtcgcccccagcaacgagtacctgcctcctgtgcagacctactccgcaccggccgtccagaggacctactccgcaccagctgtccagaggacctactccgccccctctgttagctactcggcaccctctgtgagctactcggctccatcggtcagctactccgctcctgctgtccagcagtcgtactccgctccatcggtcagctactccgcccctgctgtccagcagtcgtactccgctccatcggtcagctactccgcccctgctgtccagcagtcgtactccgctcctgccgtcagctactccgccccatcggtgagctactctgcaccctccgtggatgtgggcacccagtacgcctccaacggtggctacgtctacaggaagtag

SEQ ID NO: 909 - protein, 186 aa, DROSOPHILA
MKFLIAFALFACVAADVSHLSNEYLPPVQSSYAAPSVSYSAPAVQQTYAAPAIQQSYVAPSNEYLPPVQTYSAPAVQRTYSAPAVQRTYSAPSVSYSAPSVSYSAPSVSYSAPAVQQSYSAPSVSYSAPAVQQSYSAPSVSYSAPAVQQSYSAPAVSYSAPSVSYSAPSVDVGTQYASNGGYVYRK

SEQ ID NO: 910 - DNA, 3214 bp, DROSOPHILA
catcgggaatcaaaaaaaaaaaaaaaaaaaaaagaacgctgaaattgacagcagatgcgggcaattgaaaattggggaaattggggaatcggccgacgaggaggagtgtggttaaatgcaattatgcgataaaagcgaaataaaaaattgtgttaattgttgagaaggaggcttgcaacgaaatttcggtacgatccactccggcgaacggcgatgtcttgtttgtctttcgatcttttacggccacatcaatcttttcgtgatgtccgagtggcctgagtgctgatagccggaatggtgttcactgtacagtaataacagcaacgcagacgcactgagtgagtggcacttggctgtcgcctccaactgattgagtgatgcatcttcccgtggctcctgttcacttatgattcctgttcatcttgctgagtggccagggcaataaattcgtttaatatgcaaatcaaatgcaaattgatcgggaatgcaaatctggaagaggggggtaaggtgccacagactaattaaaaatcacaaattggcccgctgactttgcgccattggctaattagccatagatcagagatctctcaacatggcccgtgtccataagacaggtttcgctatctggccaagtctcctccaaattcaaatggccaactggttgcaaatccacagtcagttggcaatagtttggggttattaatctccgctgtcaaggacacttcctcgtgtaatttgatttaaattgcttgttttgctcactaatttcgcaacttcttacaccgatcatatcaattgatttgaccaaagcaagccattaatcgccacgccgccgatttcaacatttgcaaccaaactcgattttgtggggagtgtccttctatgaataataatgcaagcagttggtgtaaaaattcaaaacttggaatgccaaagatttctgtcaaaagataaaagcatccacatattacctttcgattaaatatcaatacagatttaatggtaaaacacattgaactgaagtttattaagtaaaatccttcacacatagataaatagatactcctatgcagacatggtcaaattaaaacaatgataaaactgaaattgcgccagataagacatcttaaagcgaaagcagctccacgcggtgggttgatggggtttggaacccgcgaaaagtcaaggatccagcctaccacatagtcgatgtctgcgaaggaaaaatgttactatagaggtccttttcaggatatacaaattgcagaacacaccacgacgactgcgtaggtcagtccgatgccagatcctgccaagacatcggaccaatggtgcttgtagtcggaaactctggtgagagccgtataccaggcgaacatgagcagcaggaactgaagcaggtggcacagcattctcaactgcttccattgcattctacgatgtaggtaaatctggaggagacaatgattgctttacctattcccatggcattggattgacccgaacttaccaccaagtagagcatggagtagcaggcgaagctagcatgtccactgggaaaggacaggcgcatgtcctttagctgcttcgatgtaatgtccaccgccgcacaggtgaactcctcgatgtaacgagcagcgttaatgggatcactgcaagtggtgccatctttcatgacgggctgacagagctgcgagcataacaattgtgttaattaatcacctttaaggaaactaaatatgtacatcagttccttagcttactgtgtagaagtgaggtctcagccgtccaatggaatacttggcgatgttcgtggatagctgctctacgcccaatccgaagataaagatacccatcctgtggtagcactccaccagccaagtgggcagctccaagtggcacagatgatagccactgcacatcgtgctcttcggaaatggactgtgcaatcgcttgtcctgtcccctaaagaactccaccacaagcatctgcaggggataaatgtattagccctataagatagttaagttaaaagtaggcccaacttaccacagtaagaggcaaggcgccacacatcaagtagagaatccaactgggcatggtggagtctcgatatggatgcctcaaggaggaatcatcgcagaagaatccgcgcttaaccgcttcgccccaaagcgaaaatcccagcataggtagaccaactgaaaggataggaatatcagaagcacgcttaaagatatatgccccacatttttatctcttgcaactcgagtggggctttttgggtggcccagcacagttgtggtgtccaattcatttatgggcaaggtctgctgatccagccttaattggaccagtataaacacaacgatagcaacgacgatgatgttggggaaatgagttcagcacaatcaaatgaaaaatgctcccctcacaaaaagaacctgccacaaattgaataaaataaatcagtccgaactcgatgatgcgcgaataaataatatatgtatatatcttttggggttcgctcgggtgagaagtgcctattcaccattgaaacattgaaacgcacagcagaatgccacaaaggagtccagcacatcaacatcacacagttggaaacattttggggcaatttggaaatgtttttgtttgaaaacaaggcgggcgctaggcgctagcctacctatggtctatatgtactatgaatatattgttcgggggctttgttgcctagatagcggaaccctctatctggctgatggattcagatgtggaatgggtttatgactggcaagtgcagcagatcaattgctgccacatgataacagatcataaaacgtgtgaaaggccgtcgggaaaaagtgtgataatacttttcccaaagttttcatttcgttgaagaggaacgcagagctttacgaatttaaatgatatagtactatgatttatttcagactttgattaggagcagctattctcaacggttgagtgcaagggaaatgggatcatttcgaagacaattcgggcgttttgagtttagttttggggcatgctgcaataccatgtttttgaaaaaatatagaattttcctttgtggagaactgagaacatcttggaaaggaagtgtacttttcttgttaccatcaattgttttaatgctatttactttgttgtttatttattttgaatgggttcgtttgttctgcaa

SEQ ID NO: 911 - DNA, 960 bp, DROSOPHILA
atcctttcagttggtctacctatgctgggattttcgctttggggcgaagcggttaagcgcggattcttctgcgatgattcctccttgaggcatccatatcgagactccaccatgcccagttggattctctacttgatgtgtggcgccttgcctcttactgtgatgcttgtggtggagttctttaggggacaggacaagcgattgcacagtccatttccgaagagcacgatgtgcagtggctatcatctgtgccacttggagctgcccacttggctggtggagtgctaccacaggatgggtatctttatcttcggattgggcgtagagcagctatccacgaacatcgccaagtattccattggacggctgagacctcacttctacacactctgtcagcccgtcatgaaagatggcaccacttgcagtgatcccattaacgctgctcgttacatcgaggagttcacctgtgcggcggtggacattacatcgaagcagctaaaggacatgcgcctgtcctttcccagtggacatgctagcttcgcctgctactccatgctctacttggtgatttacctacatcgtagaatgcaatggaagcagttgagaatgctgtgccacctgcttcagttcctgctgctcatgttcgcctggtatacggctctcaccagagtttccgactacaagcaccattggtccgatgtcttggcaggatctggcatcggactgacctacgcagtcgtcgtgacatcgactatgtggtaggctggatccttgacttttcgcgggttccaaaccccatcaacccaccgcgtggagctgctttcgctttaagatgtcttatctggcgcaatttcagttttatcattgttttaatttgaccatgtctgcataggagtatctatttatctatgtgtgaaggattttacttaataaacttcagttcaatgtgttttaccatta

SEQ ID NO: 912 - protein, 246 aa, DROSOPHILA
MLGFSLWGEAVKRGFFCDDSSLRHPYRDSTMPSWILYLMCGALPLTVMLVVEFFRGQDKRLHSPFPKSTMCSGYHLCHLELPTWLVECYHRMGIFIFGLGVEQLSTNIAKYSIGRLRPHFYTLCQPVMKDGTTCSDPINAARYIEEFTCAAVDITSKQLKDMRLSFPSGHASFACYSMLYLVIYLHRRMQWKQLRMLCHLLQFLLLMFAWYTALTRVSDYKHHWSDVLAGSGIGLTYAVVVTSTMW

SEQ ID NO: 913 - DNA, 4421 bp, DROSOPHILA
ctcgccgccggtgccgttgcccgcagagaagtcgcccgcctggaccatgaagtccttgaccacccggtggaatatcacacccttgtactgcagcttcttgccggtgattaggccaaatcccttttcgcccgtgcagagtgcgcggaaattttcggccgttttgggcgccacatcgttgaagagctcgaagacaatgcggcccatgcccaggccgcccagggaaatgtcaaagaagcaccgcggtcgcgtggcacccgcgtcgcgtttgtttaccgtcattatatgcgccgatttctgccaataaatgctgtttaatacgtatttcacgccgttttcgagttgcacaatgtcggcgttgccagctctactcagaactagggatgtcaaaaacatacagttagaaatatcgatgtgcaatatgcttagcatattttcgggtatcgatatattaattttaatatatatattttcttaaatttgttaatacatacatatgtacgctcaaataaacggtaaactttgagctatatatagtcaaaatacaccattgattactctcagcaaccaataatcattttatgctttttggtataacttccaaaacctttagaacatgggttgaaaatattatcttcaatgctcatatttttgggaaaaacagaatgtcgtttaaaccaactatgaaatgagatctggcctttatggtcatattatattaagctttttcagacaatttacacagttaacatctttgtatatagctttaaaagtttattatattattcaatacatagtaaaaaaataatttattaaattaccgttccatccctggctgcaatacggtcacacaaagccaatgtttacatggcagctcgcgtgtggctgtagctgtgtgcgtgagcgagagcgcaagagcggcgcgtgtgtgcgtgcgagcgggagagcagggcgaagacgtgttcttttcgccgaaaaagcaaataattgggttggtttatcagagaaaaacaaaaaaaattccagccagtgtcgcgataaaaacacgacaatcgcattgcagccgcctcagaagtgtaagatcagcctcagctgaccggaaagttaacattgcgacgtggaaaaccacgaatcaccagcaaatttcagcaaaagcaatcgcatttcagaatgtgtggcatattcgcgtacctaaactacttgacgcccaagtcgcgacaggaggtcctggatctcctgttgcagggactgaagcggctggagtaccgcggctacgactccacgggcatagccatcgatgcgctgaactctggcgaggcacagtccataatgctggtgaagcgcaccgggaaggtgaaggtgctggaggatgcggtggcggaggtgtgtcgcggccaggactactcgctgcccatcgacacccacataggcatagcacacacgcgctgggccacccacggtgtgccctccgaggtcaactcgcatccgcagcgatccgatgaggataatagctttgtggtggtgcacaatggcattataaccaactacaaggatgtgaagacgctgctggagaagcgcggatatgtatttgagtccgacacggacacggaggtgattgccaagctggtacaccacctgtggcagcagcatcctggctacactttcggcgagctcgtggagcaggccattcagcagctggagggcgccttcgccatcgccttcaagtcgaagcacttcccgggcgagtgcgtggcctccaggcgaggctcaccgcttctggtgggcatcaaggccaagaccaagctggccaccgatcacatacccatcctgtacgccaaggcccatcggccacatggtcagccgcagcagcaggcctatcaactattgccgcccggcgattgcaacgccgagtttcaaccgctggagcgcaaggaagtggagtacttcttcgcctcggacgcatcggctgttatagagcacacgaatcgggtgatttacctggaagatgacgacgtggccgccgtcaagagcgatggcacgctcagcattcatcgcctaaacaaatcatccgatgatccgcacgcccgcgagatcatcacgctgaaaatggagatccagcagatcatgaagggcaactacgactactttatgctgaaggagatcttcgagcagccggaatccgtggtcaacaccatgcgcggcaggatgaggttcgatacgcagaccgtggttctgggtggcatcaaggagtacataccggagatcaagcgctgccgccgcttgatgctaattgcgtgcggcacatcctaccacagtgcggtggccaccaggcagctgctggaggaactgaccgaactgcccgttatggtggaactggcctccgattttctggacagaaacacgcccattttccgggacgacgtgtgcttcttcatctcccaatcgggcgagacagcggacaccctgatggcgctcagatactgcaagcagcgaggagcgctcatcgtgggcgttaccaacacggtgggcagcagcatctgccgcgagtcgcactgtggcgtccacatcaacgctggacccgagatcggagtggcctccacgaaggcctacacctcccagttcatttcgctggttatgttcgccttggtcatgtcggaggatcgtctctcgctgcaacagcgccgcttggagatcatcgatggcctatcgcagctggacgagcacattaggactgtcctcaagctgaactcgcaggtgcagcagcttgccaaggagttgtacgagcacaagtcgctgctcattatgggcaggggcttcaacttcgccacctgtttggagggcgcactggtaatccatttgataatttgagctataatttaatcgaatctcatttatgcatcgtaatgcatgcatgggaacgtaatgatggaaaataaccgatgtcaacaattcacttaacttgtttatttgccaagtgcacttaaattaattattatgtttgtcccacgcttcatgagctgaatttaatcaattaacttgctcattgcagaaagtcaaggagctgacgtacatgcacagcgaaggaatcctggctggagaactgaaacacggaccactggccctggtggacaaggagatgcccgtgctgatgatcgtgctgcgggatccggtgtacaccaagtgcatgaatgcactgcagcaggtgacgtcccgcaagggcagaccgatcctaatctgcgaggagggcgacaacgagaccatgtccttctccacgcgttcgctgcagatcccgaggaccgtggactgcctgcagggcgtgctcacggtgattccgctccagctgctgtcctaccacatcgccgtgctccgcggctgcgacgtggactgccccaggaacctggccaagtcggtgaccgtggagtaggcgccccaactatctggctaactggctcgcaccgtctcaagaattccattttagtatctgcctgagaaaaacaaaacaaaccctagcacttaagttaaaattttctggtattttgtcggatcaaaatccgaacccttaacccatttgtgctccttctggctgaagccacatatgtttaacccctacatttgtagctgtactgaccctttgtgttgtggacccactactttttgtgaatgtgcaattgaaatataattatttccagtttttctttaaaagtgttttgctgctttcaattaaaaatggattggaaaatgtttaaccagtaaatttgtttgaaaacgggaaaaaccaaacaaagatctatatgtacctcactttacaaaaaatgcttatctgacattaaacatttgtttcaaatgtttaaaaaacgagggccacgtcacgttattgcttacgttatgttaatcacgttgtaaattttagaaaaagaaaaattacatatatatttaattctgataaaactaaataaaaataaattctgataaaaataaatgatattccgagcacttaagtagtgtgaaatcgataagccgcataaatttgaatgtcctattttcaatttcaaatcaagtggtaaatggggaaaaaataagtttgttctcgaaaagtaattctttctggaagatatttcaaaatcatatttaaaaacaacattaaataaattaaatcagttgcgagccggttgggacatctctattaaccgtagctatcacatcggtcgatatctatcgcaacgcaacgcaaacgaattgaacaacaaccctgctctttttcttttggacccgtagaaccacatgtctggtaaccgattttgattttcgtttcggcggtataatgctccaattaattgactaattgcggttaattgacaagacaagtgaacggcgcaagtacggtgcaaccaataacgcagcgagtgtgtgtgcaattgcgaaaa

SEQ ID NO: 914 - DNA, 2219 bp, DROSOPHILA
gagaaaaacaaaaaaaattccagccagtgtcgcgataaaaacacgacaatcgcattgcagccgcctcagaagtgtaagatcagcctcagctgaccggaaagttaacattgcgacgtggaaaaccacgaatcaccagcaaatttcagcaaaagcaatcgcatttcagaatgtgtggcatattcgcgtacctaaactacttgacgcccaagtcgcgacaggaggtcctggatctcctgttgcagggactgaagcggctggagtaccgcggctacgactccacgggcatagccatcgatgcgctgaactctggcgaggcacagtccataatgctggtgaagcgcaccgggaaggtgaaggtgctggaggatgcggtggcggaggtgtgtcgcggccaggactactcgctgcccatcgacacccacataggcatagcacacacgcgctgggccacccacggtgtgccctccgaggtcaactcgcatccgcagcgatccgatgaggataatagctttgtggtggtgcacaatggcattataaccaactacaaggatgtgaagacgctgctggagaagcgcggatatgtatttgagtccgacacggacacggaggtgattgccaagctggtacaccacctgtggcagcagcatcctggctacactttcggcgagctcgtggagcaggccattcagcagctggagggcgccttcgccatcgccttcaagtcgaagcacttcccgggcgagtgcgtggcctccaggcgaggctcaccgcttctggtgggcatcaaggccaagaccaagctggccaccgatcacatacccatcctgtacgccaaggcccatcggccacatggtcagccgcagcagcaggcctatcaactattgccgcccggcgattgcaacgccgagtttcaaccgctggagcgcaaggaagtggagtacttcttcgcctcggacgcatcggctgttatagagcacacgaatcgggtgatttacctggaagatgacgacgtggccgccgtcaagagcgatggcacgctcagcattcatcgcctaaacaaatcatccgatgatccgcacgcccgcgagatcatcacgctgaaaatggagatccagcagatcatgaagggcaactacgactactttatgctgaaggagatcttcgagcagccggaatccgtggtcaacaccatgcgcggcaggatgaggttcgatacgcagaccgtggttctgggtggcatcaaggagtacataccggagatcaagcgctgccgccgcttgatgctaattgcgtgcggcacatcctaccacagtgcggtggccaccaggcagctgctggaggaactgaccgaactgcccgttatggtggaactggcctccgattttctggacagaaacacgcccattttccgggacgacgtgtgcttcttcatctcccaatcgggcgagacagcggacaccctgatggcgctcagatactgcaagcagcgaggagcgctcatcgtgggcgttaccaacacggtgggcagcagcatctgccgcgagtcgcactgtggcgtccacatcaacgctggacccgagatcggagtggcctccacgaaggcctacacctcccagttcatttcgctggttatgttcgccttggtcatgtcggaggatcgtctctcgctgcaacagcgccgcttggagatcatcgatggcctatcgcagctggacgagcacattaggactgtcctcaagctgaactcgcaggtgcagcagcttgccaaggagttgtacgagcacaagtcgctgctcattatgggcaggggcttcaacttcgccacctgtttggagggcgcactgaaagtcaaggagctgacgtacatgcacagcgaaggaatcctggctggagaactgaaacacggaccactggccctggtggacaaggagatgcccgtgctgatgatcgtgctgcgggatccggtgtacaccaagtgcatgaatgcactgcagcaggtgacgtcccgcaagggcagaccgatcctaatctgcgaggagggcgacaacgagaccatgtccttctccacgcgttcgctgcagatcccgaggaccgtggactgcctgcagggcgtgctcacggtgattccgctccagctgctgtcctaccacatcgccgtgctccgcggctgcgacgtggactgccccaggaacctggccaagtcggtgaccgtggagtag

SEQ ID NO: 915 - protein, 683 aa, DROSOPHILA
MCGIFAYLNYLTPKSRQEVLDLLLQGLKRLEYRGYDSTGIAIDALNSGEAQSIMLVKRTGKVKVLEDAVAEVCRGQDYSLPIDTHIGIAHTRWATHGVPSEVNSHPQRSDEDNSFVVVHNGIITNYKDVKTLLEKRGYVFESDTDTEVIAKLVHHLWQQHPGYTFGELVEQAIQQLEGAFAIAFKSKHFPGECVASRRGSPLLVGIKAKTKLATDHIPILYAKAHRPHGQPQQQAYQLLPPGDCNAEFQPLERKEVEYFFASDASAVIEHTNRVIYLEDDDVAAVKSDGTLSIHRLNKSSDDPHAREIITLKMEIQQIMKGNYDYFMLKEIFEQPESVVNTMRGRMRFDTQTVVLGGIKEYIPEIKRCRRLMLIACGTSYHSAVATRQLLEELTELPVMVELASDFLDRNTPIFRDDVCFFISQSGETADTLMALRYCKQRGALIVGVTNTVGSSICRESHCGVHINAGPEIGVASTKAYTSQFISLVMFALVMSEDRLSLQQRRLEIIDGLSQLDEHIRTVLKLNSQVQQLAKELYEHKSLLIMGRGFNFATCLEGALKVKELTYMHSEGILAGELKHGPLALVDKEMPVLMIVLRDPVYTKCMNALQQVTSRKGRPILICEEGDNETMSFSTRSLQIPRTVDCLQGVLTVIPLQLLSYHIAVLRGCDVDCPRNLAKSVTVE

SEQ ID NO: 916 - DNA, 5259 bp, DROSOPHILA
tcgacggaacctcgtcaccaaacataaatgggctttgcatggaattattaagggggggtctaatgggctcgggtggtgggcggcactcgagtggtccttcaaactttcgctttcaatgcaggagctttcgaagtgcgcccgtccggagaaccgagagatgtgcaaggtcaaggacgaagctttgtgtgctgcgtcttggttccactttctgcgtttagatagagcatccgcaatgcacacatatacatatttcgcataatttctatattatcaatgaagcttaagaccgtgagattcctgaattccagaacctgcgctacttacgaactgcccgaaatcgttcattgcggccgtaattagtgcaaattacaactattagagagggttaaaaaaaaatccgagccagccaagctgcactttcacacgatgcgagcgcggaatggaaaataaacaaaactatacagtgcccccccgaaaatgaaaacaatggaaaaagaacacgttgcgcacggtcggccaacgtcaataaactgaggcgtatcatatacattttcgattcgctggactgaaaagtttccgattgctggagagtgaaaagttttcagccggacatgtggtgtgcagcatatgcagcattctgcagatacggatatcccacagatacagatacagatacattttgcgggcccaggagggcagattgattatttcttacctttgccgtttggtggagagcgggaaactcggagagcgctgctcacgcaacaggttaattgagaattgaccgttgggcagagcttttccgccagcatcagaatgtatccgtgagatacactcatgcgcactcgctctccgctctccgctctctttgtatcttcaaaacaatgcaacaacctctgcacactttcacttgccaaagctttctccgcaaagcttggctggctccggactttttcgccaccttactgtggcccaaagttcattccgtttcggattgtggcatttttcaggcgtgcgaaaaaattcctcagcgctccaagaatttccacagcaattttggtcactgctttaaagtgagcataaagccaagaggccagcgaaagaatttttattttcttaaccaagtaagtgctagcccaaaagtatgctattgttaggcgttcgagtgtcccaagtggaaaaaccttgcttgattgagctggaaaattgtgtatccgtgggtgcttcctgcaggcaaatacacactcctgtagaaagcaggaggtggtgaaaattaaagctgaccagtgtgacacacatcgggcagcagcagctggcggggattggggcaggagcggagctcgtaaattatgcaaaacgaaattatggtaatgccactggccagaaagcacgagtgggatccttgccaagaacgaaataaagaaggactgccacacacttgacctccaaggagcaaagccacacaagacactgcagggactcgagcctatgtgggccaccagtgggtggtgcacgtagcaggccagccacccactcacacaagtgcacgttgaacttgagaaaagagcagagaaaagccccgggcggaaaatgcacgatacacatcgattagatgactgtatttccggagaaaacacacatctcaattataatttcacttgaattgattaaatgctcttaatgggtttttgaaagtattgaaaagtgttctttttatctcatacctcaaattatgcaataaaatgcaaacgcgtattttatcaagtttgattgatttgcgttcaataattgaattgttaaattgtataagccactaattgcaccacacaaatcccccaaaatagatcgaatagaggccacccgagaggcgagcacgcgacatggcgtgtcctttcttcaggcgtgcggactcgctgacacgccagccctcggtcatcgccgagcctggtggccactgggcgctcgaggacgaggagctctcggacgacgccctgaccctcacccacctccagatggccatccagctgctgacggcgccgtcgaacgaggatctcaacacggctgtaacgtctttggtggccaagtaccgccagaactggcccaatatccacaagctgtaagtaagcattataagaaattatatactagatataaactatatctaaatataccctagcaaactggatccgcaaaccttcaagagctgtgccaactatgactacttggcggacatccaggagctgctgctgaagatggacgaggccagcgccagcgagattctggtgctgctcggcgaggagctgatcacctgctgctgcacaggtatcattgaaagagccttccgctgcctgggcaccgatctgcaggaattcctgggctccctcgatggcgtttacgatgtgctgaagctgcaggaggtcagacttatagataatgttcctacctaaatgctaaactaagtccgctttgataaccaggaggacgtcaccgataccggattcgtgtgtgccggcgagggcgagctgatcttcacctcggagcgcccggtcattgcctggttgctcctgggctccctgaaggcgctcacccgcatgctctacaaggtggacgtgaacatcaagatcgagcccgtggagggcgatgcccggcggtatcgctacctcttctcgctggtcaaggacaactcccagaccatgctgatgggtcgtcccacttccgtgagcaaaaccatcccggaaacggtgcagcggagcaactcgagcaacgcctccgacctgcaaatgaactcgtccagcttctgcaagatgtttccctggcacttcatcatgaacgagcagctggaactggtgcagttgggcaggggattcagcaaattgtacaagccctacatggcggactttggttgccaggcgaccacctactttgatttcaaacgacccaagggattgaccatgaaattccgggacatcgtgaggcgcacctacacgcctttcctgatcggtttgaataatccgccgggcgctgtggatttcccggccattggactggagatcaagggacagatggtgcactgtcccgagtccaattcgttgctcttcattggatcccccttcctggacggcctggatgggttgacctgcaacggactcttcatctcggacataccgctgcacgacgccaccagggaggtgatcctggtgggcgaacaggctcgggcccaggatggactgcgccggcgcatggacaagatcaagaacagcattgaggaggccaactcggcggtgaccaaggagcggaagaagaacgtcagtctgctgcacctcatctttcccgcggagatcgccgagaagctttggctgggctcctccattgacgccaagacgtatcccgatgttacgatcctgttcagcgacatcgttggcttcactagcatctgctcgcgggccactcccttcatggtgatcagcatgctggaggggctgtacaaggacttcgacgagttctgcgacttcttcgacgtgtacaaggtggagaccatcggggatgcctactgcgtggccagtggactccaccgagcctccatctacgacgcccacaaggttgcctggatggccctgaagatgatcgacgcctgctcgaagcacattacccacgacggcgagcaaattaaaatgaggatcggcctgcacacgggcactgtcttggcgggagtggtgggcaggaagatgcccaggtattgcctcttcgggcacagcgtcaccatcgccaacaagttcgagtcgggcagcgaggcgctgaagattaatgttagcccaaccaccaaggagtaagtggtgtactctactgtccatctccacctctatatcatgttgctttccctactttcagttggctgaccaagcacgagggctttgagtttgagctgcagccgcgggatccatcgttcctgcccaaggaattccccaatcccggcggcaccgagacctgctacttcctggagagcttccgcaacccggctttggacagcgagctgccgctggtggagcacatcaatgtgtccatgaagaccatatccgagggcggcgatgcctagaccccccgtagctccaatccccccgtagaccacccacacgctcagtagtcctagttcggtgcacttgtattgtggttttgcctgttgcctgcttagcctagaatcaataaaatatcccattcgaatggttgcatttcagcatagagatgaacacattttattggttgagaccgaaaattcagacctaggcggccttctttttggcctcctccgccttggccttcacgaaggccctgaccttgtcgccgatcttactggccatcatgcactggtgtccgcgaaaggcccacacatccgtgggattcttctgcgcgttgtcgtccacgcagctctgggcgatctgaagggcctcctcctcggacaggtccatcttgaactgcttggccaggcggtcggcgtggtagccctgttggtcgcagaagatgcccagcttgatggccgagcaggtcaggtactggcgcacgtcgggctcattggggaagatcaggttcttcagctgggagatctggtcgttgctcagcggattctccttgaggcaatcaacgcggattttcctgatctcctcaccagtcttgggcgtccagtcatcggcatgggcctgtttcgaaagaggtttcacttagttagtacacagttcgagctatctactatctacttagataaaaaaactctgagctattgggcaataaattgtatttaaccttaagaaataaatatttatgattcatcgttttttgcttgactacaaattgttttgttaattcattttgtaaccccctatatcaaggtacacattgagtcaagcctgatcggaattttccggcctgcgttaaataaatgataaattatgcaaaactgtgagactttgtagcaatagacatcagcaataaatgtgagcacgttaaactttttattttatcagcacattctacaattttgaaattttttgaatacattttgaatttcttgcactggttggttttgagtttgggtatttcataaatcaagttccaattggatcagttcgttcacatttgattgatttgaaacatatatactatacacaccacagcacagagggccagagctacgatcagatacttgagcatattgagatatagttagttatagttgcacgatcgcggcgaagttgaggttctgaactg

SEQ ID NO: 917 - DNA, 2357 bp, DROSOPHILA
catttttcaggcgtgcgaaaaaattcctcagcgctccaagaatttccacagcaattttggtcactgctttaaagtgagcataaagccaagaggccagcgaaagaatttttattttcttaaccaaatcgaatagaggccacccgagaggcgagcacgcgacatggcgtgtcctttcttcaggcgtgcggactcgctgacacgccagccctcggtcatcgccgagcctggtggccactgggcgctcgaggacgaggagctctcggacgacgccctgaccctcacccacctccagatggccatccagctgctgacggcgccgtcgaacgaggatctcaacacggctgtaacgtctttggtggccaagtaccgccagaactggcccaatatccacaagctcaaactggatccgcaaaccttcaagagctgtgccaactatgactacttggcggacatccaggagctgctgctgaagatggacgaggccagcgccagcgagattctggtgctgctcggcgaggagctgatcacctgctgctgcacaggtatcattgaaagagccttccgctgcctgggcaccgatctgcaggaattcctgggctccctcgatggcgtttacgatgtgctgaagctgcaggaggaggacgtcaccgataccggattcgtgtgtgccggcgagggcgagctgatcttcacctcggagcgcccggtcattgcctggttgctcctgggctccctgaaggcgctcacccgcatgctctacaaggtggacgtgaacatcaagatcgagcccgtggagggcgatgcccggcggtatcgctacctcttctcgctggtcaaggacaactcccagaccatgctgatgggtcgtcccacttccgtgagcaaaaccatcccggaaacggtgcagcggagcaactcgagcaacgcctccgacctgcaaatgaactcgtccagcttctgcaagatgtttccctggcacttcatcatgaacgagcagctggaactggtgcagttgggcaggggattcagcaaattgtacaagccctacatggcggactttggttgccaggcgaccacctactttgatttcaaacgacccaagggattgaccatgaaattccgggacatcgtgaggcgcacctacacgcctttcctgatcggtttgaataatccgccgggcgctgtggatttcccggccattggactggagatcaagggacagatggtgcactgtcccgagtccaattcgttgctcttcattggatcccccttcctggacggcctggatgggttgacctgcaacggactcttcatctcggacataccgctgcacgacgccaccagggaggtgatcctggtgggcgaacaggctcgggcccaggatggactgcgccggcgcatggacaagatcaagaacagcattgaggaggccaactcggcggtgaccaaggagcggaagaagaacgtcagtctgctgcacctcatctttcccgcggagatcgccgagaagctttggctgggctcctccattgacgccaagacgtatcccgatgttacgatcctgttcagcgacatcgttggcttcactagcatctgctcgcgggccactcccttcatggtgatcagcatgctggaggggctgtacaaggacttcgacgagttctgcgacttcttcgacgtgtacaaggtggagaccatcggggatgcctactgcgtggccagtggactccaccgagcctccatctacgacgcccacaaggttgcctggatggccctgaagatgatcgacgcctgctcgaagcacattacccacgacggcgagcaaattaaaatgaggatcggcctgcacacgggcactgtcttggcgggagtggtgggcaggaagatgcccaggtattgcctcttcgggcacagcgtcaccatcgccaacaagttcgagtcgggcagcgaggcgctgaagattaatgttagcccaaccaccaaggattggctgaccaagcacgagggctttgagtttgagctgcagccgcgggatccatcgttcctgcccaaggaattccccaatcccggcggcaccgagacctgctacttcctggagagcttccgcaacccggctttggacagcgagctgccgctggtggagcacatcaatgtgtccatgaagaccatatccgagggcggcgatgcctagaccccccgtagctccaatccccccgtagaccacccacacgctcagtagtcctagttcggtgcacttgtattgtggttttgcctgttgcctgcttagcctagaatcaataaaatatcccattcgaatggttgcatttcagcatagagatgaacacattttattggtt

SEQ ID NO: 918 - protein, 676 aa, DROSOPHILA
MACPFFRRADSLTRQPSVIAEPGGHWALEDEELSDDALTLTHLQMAIQLLTAPSNEDLNTAVTSLVAKYRQNWPNIHKLKLDPQTFKSCANYDYLADIQELLLKMDEASASEILVLLGEELITCCCTGIIERAFRCLGTDLQEFLGSLDGVYDVLKLQEEDVTDTGFVCAGEGELIFTSERPVIAWLLLGSLKALTRMLYKVDVNIKIEPVEGDARRYRYLFSLVKDNSQTMLMGRPTSVSKTIPETVQRSNSSNASDLQMNSSSFCKMFPWHFIMNEQLELVQLGRGFSKLYKPYMADFGCQATTYFDFKRPKGLTMKFRDIVRRTYTPFLIGLNNPPGAVDFPAIGLEIKGQMVHCPESNSLLFIGSPFLDGLDGLTCNGLFISDIPLHDATREVILVGEQARAQDGLRRRMDKIKNSIEEANSAVTKERKKNVSLLHLIFPAEIAEKLWLGSSIDAKTYPDVTILFSDIVGFTSICSRATPFMVISMLEGLYKDFDEFCDFFDVYKVETIGDAYCVASGLHRASIYDAHKVAWMALKMIDACSKHITHDGEQIKMRIGLHTGTVLAGVVGRKMPRYCLFGHSVTIANKFESGSEALKINVSPTTKDWLTKHEGFEFELQPRDPSFLPKEFPNPGGTETCYFLESFRNPALDSELPLVEHINVSMKTISEGGDA

SEQ ID NO: 919 - DNA, 4667 bp, DROSOPHILA
gtgcggattgcgtttcagttggccataaaggcagggaatcgatccgccgatcggttcgctaattatgcgaaattattgattattgcgggcttttcactaaaccgccaaattgcgtgtacgtgcgtcggcccgacgaccttgacagttaactcgatcgcatttacctgaaaacctggtcaaaactaaaggcgttgggaagaaggaacacgacctgtatatctagacaaaattaaaccatcaaattgatcgcattgctttcaagccttggcagttattgcatagttctcaataaaatagggtacaatattataacagcaatatatttcgtatattgtggcacttaatttgatagagttaattaggaagcaatataattatataaaggttttaaataggataaccttattaaccaattcgttttgagcaaaccagtaaagcacaagtaaacttatgcccgcacaacaattataatgtaagaagacgtcaaacctgttgaaaaatgctgaaattccagtgcgataataacatagccctcgagctaaattcaaattacgcgccctgcccgctggcgccccctaccgcctgcggtgctaagctacgacgcccatttcaaccgcccgggggcgctagtcggcatgcaaccctgcgcgtcaacagctgaccggcctatacccatctcgctcgctctctttccttccacgccgtcagccgcaaaaaacagcggacgcttaaattttcgtaaatatttgtaaataacaggggcttaagttcatttggcaataactaaccttaactcccatccacagctggagctgagttcagtggacagcatccacgcgtttagtgagctaggtgagctagcagccggcaatgtgaggttatgtccggcagcatataaaaatagttgacatctaaatgcatatacatatatgtatttacatacctgattaatcggatatatgtaactaacgacttgccatatcaccgcagatcaacgaagatgccgcccaagaagcacgacgaaccggagcgcaagccgctgatcggcagaattggaacgaatctgagaatcggtatcgttggcgttcccaacgtgggcaagtccacttttttcaacgttctgacccaaagtgccgcccccgcggagaacttccccttctgcaccatcaagccgaatgagaataagtattccccaacacacacatatatatatatttatatatatatatatctttacatacatatatctggccaattaccaggcgaacctgcgggcggtggcaatttcctcgatcattgtaatcatctcgtggaatataatttttatgccggcgatgcagcaatggcctccaggagcaaccgccgccgcttctaattccaaattgctctctcgactggaccttctaaaatagccacagtgcagcctcgataggtaacacaaatctctgagattcgcagctaagtgggggattcaatgtgtcaggaacttagatctaaacactatgctatggctagtataccttctggttattaaccattttatcatagaaatagtcttcaattgtagataattccaaatgttaaagcacgaaaacttcaattttagcaaacttcaagctataagcatttgatcttatagattatccttactatgtatctcatacagagtgttctcatgtttccattccttttggactacagaagtaacagatagtttcgcacacttaactctataaattagttaagaaaccatatttgtattcatttaaggcacctttaaaagttgagctaaccatgcttcactgtccttcgcgttgtgggcgtgtcgcggccttagcaattttatcagatccagttcccaatatgcaaattgcccccgccttcggttcgtttcggtttcattttcctgcgctttttatttgtgagcgacttcattttggtttcgctgcccctttgcggatggcgcaaaattatagaaaattgccatgattggccgccgatgctgccgggctaccaagccagtcagtcagtcaatcgtttttgttttttcatattcttgtatttttggatttctgcatttctgcgtccagccaagtcatcccgactaacatgcgtcttacctcttcttttcatctgctcctgctgatgctgccgccgatggcttttgccttacccacacgtcgtgttccggtgcccgatgagcgtttcgattacctggtggagtaccacaagccggccaggtgagttggagcatacaaatccattgcattttagttttccattgcttgtaacaaaaaaaaacatatacctgcatcacgaaacgcatttaaaacgcgtaacaagtttcgggacttgctattttcgttatttgcttgccatttgcttgttaagtttaatagaaaagttctgcacaatcgaaagtaataagtatttaaaaaaaaaaaactagtgtggttcctgcctatttgaacgtcgtggacattgctggcttggtgaagggagccgccgagggtcagggacttggcaacgacttcctctcgcacatcagcgcctgcgatgccattttccacttgtgccgcgccttcgaggatccggatgtgacccacgtggagggcgaggtggatccggtgcgcgatctggagatcatctccgaggagctgcgcctcaaggacgaggagaatctgctcaagaacttggacaaactggagaaggtggtggcccgcggcggcgacaagaagctcaagcccgaatacgattcgatgcttaagattaaggatatccttatcgatcagaagcgtcatctgcgcttcgaggactggaatgcccatgatgtaagtacgaaaacaatccacatccgctgggtggcactaacgcttattgttattcctttctacttaaaaacaaggggatatccataaaatattgtattgtaaatttgtttattaagaatgcatttgtattcgtgtttcattcattgttgttattatcgtctttatttgtttgccaacaaaacagcgaaatctgtggttttttttcgtgtgaccttgtgattttccctcccgttcttattgacgccaccactactttgctctttcagattgaggccttgaacaagtatctgttcctgacctccaaaccggtcatctacctggtgaacctttcggacaaggacttcatccgcaagaagaacaagtggctgccgaagatcaaggaatggatcgacaagaacgatcccggagcactgctcattcccttctccggcgccttcgagcaccagctgaccgaaaaggacgaactggagcgcaaggcctacgagacggagaccaagtgcaaaagtatgctggagaagatcgttgtgaccggctacaagggactgcagctggagtacttcttcaccgccgggccggatgaagtgaaggcctggaccatccagaagggcaccaaggctccccaggctgccggacgcattcacaccgacttcgagaagggcttcattatggccgaggtgatgcacttcgaggacttcaaggcggagggcagtgaggcgaatgccaaggccgctggcaaatatcgccaacagggacgcaactacaccgtcgaggatggcgacatcatattctttaagttcaacgccggcgctggcctcaaggatgccaagaagaaatgataccgtttggccatgatcatcgccatgtccaccgttttgtacattaacttgatcttgtactcccagatgtttcgcttcgccagaggctagctcctcattatcacatccctcactctcatgttcgaggcctgaaaatgcattttgaatttcctttttttttgtacgctatgtaaacacgcttatgacacacaatctcagtcgttgtttgttatggtaacaggcgggttaactggagcaccatttgaatccgcagtgatacttgaatattctataagaatttacctatgtatctttgtggctatatgatcatttgtcatgggattgagatttttaaacatgcaagtaataaaatcaggttgtagatttggcaagtactagtattgtgttgctatccctttgctcctagctagcaacaaacaataagaaatgacatatcccttgtcaggcattgacattgtggtaaccgaagtctcggatttctattgctgagccgtggcaaaactttttaatcatgctggcaaagttgctgttggaaacacctgtgcaaacctctttgccaccagagccaacaggaaaagcggccaagtgcaaggagctgtgccacaaagactcaaaaggagggagcaggggctgtgctgtgcgctggttgctctgtgcaaatgcagctgcatccagtacacaaaggatcgggtggttgaggtagctggctggttgcctggttggttggctggttggctggttccactgactctggtcgcagcggcaacttgctaagcacataatttggtttaccgcattgccaaacatgcgccgccagaaacacgcacattccccctaaatcccaatctcaaaccctttttcggttgcttctgggttctgttaatctttgccaaaagaaacttttcttgtgcaccgtgtgacgagctcgaaatgtggagcataattcaaaagtctgcaatgaaagtaaggaaaagtttcaaaaatgttctatacattttgg

SEQ ID NO: 920 - DNA, 1200 bp, DROSOPHILA
atgccgcccaagaagcacgacgaaccggagcgcaagccgctgatcggcagaattggaacgaatctgagaatcggtatcgttggcgttcccaacgtgggcaagtccacttttttcaacgttctgacccaaagtgccgcccccgcggagaacttccccttctgcaccatcaagccgaatgagaataaacgtcgtgttccggtgcccgatgagcgtttcgattacctggtggagtaccacaagccggccagtgtggttcctgcctatttgaacgtcgtggacattgctggcttggtgaagggagccgccgagggtcagggacttggcaacgacttcctctcgcacatcagcgcctgcgatgccattttccacttgtgccgcgccttcgaggatccggatgtgacccacgtggagggcgaggtggatccggtgcgcgatctggagatcatctccgaggagctgcgcctcaaggacgaggagaatctgctcaagaacttggacaaactggagaaggtggtggcccgcggcggcgacaagaagctcaagcccgaatacgattcgatgcttaagattaaggatatccttatcgatcagaagcgtcatctgcgcttcgaggactggaatgcccatgatattgaggccttgaacaagtatctgttcctgacctccaaaccggtcatctacctggtgaacctttcggacaaggacttcatccgcaagaagaacaagtggctgccgaagatcaaggaatggatcgacaagaacgatcccggagcactgctcattcccttctccggcgccttcgagcaccagctgaccgaaaaggacgaactggagcgcaaggcctacgagacggagaccaagtgcaaaagtatgctggagaagatcgttgtgaccggctacaagggactgcagctggagtacttcttcaccgccgggccggatgaagtgaaggcctggaccatccagaagggcaccaaggctccccaggctgccggacgcattcacaccgacttcgagaagggcttcattatggccgaggtgatgcacttcgaggacttcaaggcggagggcagtgaggcgaatgccaaggccgctggcaaatatcgccaacagggacgcaactacaccgtcgaggatggcgacatcatattctttaagttcaacgccggcgctggcctcaaggatgccaagaagaaatga

SEQ ID NO: 921 - protein, 399 aa, DROSOPHILA
MPPKKHDEPERKPLIGRIGTNLRIGIVGVPNVGKSTFFNVLTQSAAPAENFPFCTIKPNENKRRVPVPDERFDYLVEYHKPASVVPAYLNVVDIAGLVKGAAEGQGLGNDFLSHISACDAIFHLCRAFEDPDVTHVEGEVDPVRDLEIISEELRLKDEENLLKNLDKLEKVVARGGDKKLKPEYDSMLKIKDILIDQKRHLRFEDWNAHDIEALNKYLFLTSKPVIYLVNLSDKDFIRKKNKWLPKIKEWIDKNDPGALLIPFSGAFEHQLTEKDELERKAYETETKCKSMLEKIVVTGYKGLQLEYFFTAGPDEVKAWTIQKGTKAPQAAGRIHTDFEKGFIMAEVMHFEDFKAEGSEANAKAAGKYRQQGRNYTVEDGDIIFFKFNAGAGLKDAKKK

SEQ ID NO: 922 - DNA, 9342 bp, DROSOPHILA
aatgaatcgattactgtatagagccgaaatacgaggagaattaaagcaaaatgaacaatatttaatgttattgatgcaatatagagaaatattattattactattattattgtgtacgtaaagaataaaatgtagtgcctaaaagaaaactccgctgtttgatctttaacaaactgccgtgtttgtcatgcatccgttttatttcaaataacaacacgataactacacgtaactgccatgaatacaaatatgagttgcttccgttgctgctgcagtttgggaatgtttgcctagggctagtgatatatatcgcgatttaatatccaacaattgtttcctgaatagtcctctttgcttaacctgagtaacatttgctggagcacatccttcatgcgtcctgaagaaagtcgcagcgcttgggtgtggtggccgacaactggcgtgcgttcatatcggagctctagaagatcagagagtttggaaagcttaatggttaccctgtgtggcaataaatgaaaaccaataaactgcaaacgcgtctggatcaaatgcagtcctatgaattctttaaaaaaccatataaataacgccaacgattggaaaagttctgaaagaaatcatcagtggagagtatataagtaaagaaagaggtatttaaaaacaatagaaataaccatagacattaagttggaattaaactgttaataaaacaaatgaaagcaacagaggaaatgtaaatgaaattcggaattttcggggtgggcaaaaaatatcaaattataatacctttaaaaatttatgacaatagtggcattgttacaaataaaaatcaaacacaaacaaagaaatcgttccgattttggtgtatactttccagtttatttgtttaaaatttgtttgtcttaacgagtaaaattaaatagtgcgctcaaaaagataaatgtactataacattgcatgcagttcgggctttagcctaattaaaatccacaaattaaagctaatttcgtaaatgtttcaaaacatcagtttacttcagagtataaatgtttgtcgtgtatataggtttatataaatatgtatatatatatatagaatttaatggctacaaacgtaatattaaagccaagggcgctgcgccactcgctccccgcaaaatctaaacacagcttcagcccgctccaagatgggcaaaaatgtttgtggaatgtcaaatgttaaatgacaatatttcaaaaaattttcgaaaatcaaacgtgttaaggagtttggggcacatacaaacataggtagtatttaacattaacattacattaaacaataaataaacacttttcacttgactgggttgcggatgcgggatgagggttgcttgcttgcttgctgggattgggtttgattggattgaattcaattggtgcagggtggcgcaaactctttacacagccaggcggttcgcttcatttctcaactcatcacatctcatttcttttttatttatttttttttttttgctttgctctttggcattttcacacgtctactggttgacagcgctcgtcttcttctttttagcgtattttacctgattggaccagtcacccgtgggcacggtggcgcgatagaactttgagcttgtcttgttgaagatcggcagcaattcgtttgcttcgtcggacagagcctgcaaggaatggagttggtttggattagcttgcattgggaaatgtgcatgagtggaaaacccacctttagatagatgattgcatctgttccgaatccttcgcaggagagcagcacaatgtcgccatggaaatagcgggcgtaaagccttgagatcggcagaccgtatccatagcccgctaatggcaccgtatgcagatccgacttcgagggctgcggcgctgtgctgtacatatacttgaagagctgatcggtctgggagcggggaatgccgcctccctggtcagaaattttcacacagatgtcctccttgcccttgcaaatggctactttcaaggggggcaatgtgtcattgttgtcatggccatggtgctctacaacagctcgcatagagttcttgaagagctcgaaaagcatgtagtacaggtgcgagggcacgtaaacggtgcggatgggcaggttgtctccaggctcgctgctgtgctgctggatctccaatgccggactggtcaggtagtactgatcgcataggaatcgcgcattctcgtaagcatcgcgaaccacatccgacagatcacaggcgggatccaggcaaccaatatggcggccacccgcatgtggatttccgccaaagagaagggctttaaatagggatacgacatggtcagtaatgtgctcactggcatcatctgtagcttgtcttactgtgctgatttatcagcattcgaatgctgatgcgagacatgtagagcctgtcgagaaagtactgaatggaactctctgtaggcgcatccacctggccgccctcgttctccttcatttcgatcacaccctgggccatcgtttgcaccacatcgttgtgccgattcctaatgagatccaaatcggccacaaacctgaaaggcaaatgtgattagtgatatgctgatctactgaaattcgcattactcacttttgcagattgtcgtgggtgggctctgctttctcgtacaccagcacatcctcgaaactcttgacataccaggaactaacttcgcttacggatctggtgtgcaacaggttatccggcagaagggcgatctccttcatgatattcgccagtcgaacaggcagttccttgcgcaggaatatgtacgatttcttctcgcaggcattctgacctattaaatgaaattacaaagaaacgattaagaaaacatttaagaaaacgagagtcaatcaattcaaatatgccttatagatactttagagcatttcgttttgcttgagttatcgcttcatatttgtttgttgttctagattattcggtatattttcctgcgcttctagattatttaaaatattttcctcgcaagcttatcaatgcggctttaggcactccagtgatcatgagctcacgagtgaaaacctcatggggaggaacaaaccagctagaatatgaacagccttgacgtacacaaaaacgaaaacagttctgagctgcacataaattcaattggattaattatcagagaggcccaaagtacttgagctaaatacataactacacacttagtatgtatacatacagcctgtactttcttataaacaagctaagttcagagctccctggcaaatgcgaaataaatcaaccgcagaaaactttgccctcgtcaggcttttgaatatgcctgtgtatagtgttgtcattttgttgtttttttttttttgtatttgcttcttgattctcttagtgtatgtgcttgggttttttttttctgtttgttgtttgttgcgagtcaacagttttgtaacaaagagaaaatcaagaaactgccgtcgaggtgataacgatggatccgccttatcgacgaggccttgaccagccggcaaagacacgccttctttttcagcttcgattgctcgtcgccaaaatctaatggccacaattcgccaggctaaattaggattccagatacaacgcaaaaagcaactagatatacatatatgtatactagacgtggctatgccgaataaattggactggaaccgctttatgagtcaattgtaacgaattggccaaacaaaacagaatcaataaaacgagttataaagacgaacataaattcggaaagagaggcgatagcctgatgatattgttttcaagaacatgccagaaagcgatcgcaaacgcgagagatctccgctccgagatacagctatcaaaatgtgctcgaaagggggaggggggtgcggcaatcgccccaacacacacgcgcttcgttctgcccgctccgccccccaaacgctggggcggcgcaggtgacctcaaaacagagcttttatcgctttgtttttgtttacttgtttgccattttggaaccgctctacgccctatctctctcgctcagtgtattcacttgttttgactgtagtgtcgggtggtaaacagagcaaagaaacctccagactcgatcggatcgtcagtcatgtagaagcgtctggcactccacaatatgtatttagactttgatgcattgctcttggctgataatgataaggcgcaccctcgctttcatcggcgataaattcgcagtggcgttaagtgtcctaatcataagtgccttttatgcacttagataattgcccgctataaaaaaaggaagttagtttaagaggattaaagattagaagtgtgctaagtaagcactcttcatatttcattttgattttgtgccattcagttattattttattaataatcaatagcattgaatagttaataactacgtgctgtgtattagccaagctattaacaaatttgtgtgccccaacaggtttcgaaaaaaaaaaaaaaaacgatgatctaaagtattcaatgggtgttatgtaacaagaacttagctgctagtaggcgaaaaactgttgcgtgttctagcagtgaaattgaaaactggccaccgcacgaattcattaccggagctcagaatcgacaatgagctgcggtttcaattccattcccattatcagtgtgagccactcaattggcgatacaggctaattgggtcgttaatgttgcattcaataatttacaacgcatttggcacgcaatcagctgagcaaaggcgcaaagaaatccaatttctgaaaacgactcaatcgtccactcagtgaccccctcatgcaattacattagaatgggtggaatatcacatatgcatctatctttagaccaactgacgtcacacagctggcccctcctccaaaccatgaccatccccttttttgtaaaacagctgttcggtcgattcgcggagcacagcaatttgactcttgagctgcattagcccaccccacccattggcccccaaatgcgaggaagaatttgtgtgaaagtctttcgaatactttcgtatgtatatttgactcacattcgccctgtgacagaaatacaaaaatacggcgcgtgtgactacgactacgtctttattattattatcgccggggtgctcactcttcttctggccattctgtttctgtttttattttgaccaagtgttgacgtgcgcgtttctgcctttttttccgcaagcagttccaaagttcaggcccgaattgtgggcgaaatgaggtgacagcatcctggactttgcccgaaatggtcacggtggtctgatccatcgaaatgcatccattatacaatatacttttgaattgtctgacgctgtgttttcaattttcctaaccccgcattgccacagatataattgtggctctttgtcgcccggagaattggcacatgatcaaccatgatgaggttccaaattggacaccctatatatgccataagtattatatattttctattgatataaattcttggccttcggatattgtgaatttcgcataaacaatatagccgaaaaatattaaagactagtctgtataaaaaacgaggctcgtcactgaggcgcgaattttagaaccctctttccagttcttacaccccactcactcagtccacgaagcgctaatcgatggttaacctgaattatcataaactcgggtgcattataataacaatgtatgcgcatatataacaccgaaccaataacaagccatattctatagatataagcataattactccaagtttatggacccccacaaacggcagaaaaacacaattaagtgccgggtacagttgggtacaaaacaagcgcacaaagcagccttatctacagaccgacatcaaagttcaagtataggcaggtatatattagctatttatttataccccttcaccgaggggtgctggcctattggatggccataaatgcttgtaaactaatttagcccattttgtagcccataccagactgactaaaaaaaaaaaacaaaacaggaaaaagctcagcacaagtggtcttaaagggatagaaaacacgcgcaagcaaagcctgttgttttggtctaaatttagatgataatagctcagcctccggaggccaacctttttcacattttcctcctcttccagccgagctacttggcctggcttttatttctgctcacgtcgcatgccagtttttcaacgagaatgccctagaagttagcactcgagtctgctggttgcacagcaaaaaattgattttcgactagagcaggtctgaaatgaaaaggttatgtggaaacagtatctaaaggcatctgctgccgtttacttttatcaagatataatacaacttttagaatatacactgcaaacacagtttgacttctctggggacagaagccactcgaattggagagttgcgtgttcttttattggggcaggttgaagccgtggattttggagggtggtctgtagggggtgtttggttgacattgaaacgtcattgaaggccacgtgccggctattggcgctcaatgaagtgtgggcggaaaaaaggcgccttgctcgcgcccattctcgtgtttcattttcattgacgaaacttgtttatgaattctaaaacacggccttctcataaacaagttgagctattctgacttccgtttttgcaacaggcggttggctgggaagcggattgaaatggaaatagatggcaaggggaggaggggttgggtcgaggaaaagtcaaagctaagctgaattgaactgagcattcaattgtttatactgcctggttgtgtctgcctctctgtctagcgcacagtcgacaaaataatagatgtagatggaaatgcttaattgacaattcaatggaacgaaattgactattagataacgggatatttgcgcagtttattctaaactataaacgaaactttagacaacatgaaaatgttgctctctacataaaaggtctgcctattatagcttttctatgtcatctcgttatgcaacacagatgacgaataatagaaaacaaagggaagtaaaaagtgagttaatatttcccaaaacatatataacataacatacactttagagaaatatattaaaaatctatcgtaaacaattaaaattttaatccattttcgaagcgaacaactcaagtgttttaatcgcttttggaggcaaatcaaaacaaagtgagtgtcaaactttccatagaaacacgttcactaggcaatctctataatatcaatccgatcctcacccaaatcaacatgtacgattactcaatagcacttagataagatcgttgaaatatatatgttatagatgtatggaacaccttgggttcaagaaactgaggcccagttactcaccaaagtccatgaactgctttatcgagaggggcgaggggttgaagcccgagtaaaagtcgagcattttggccaaactcgccatcgacgaggaggcggctgagaatcggactggaaacaggcgcatgttggctatatttttctggttcgcgggggatttgggtgctgattacgtttgccggttgctttcgctgtgtctttatcttcaacaactttgtttgccacttttagaccagctttatattattgttgaattgcggtgagagggaagaggaagatgaagcggctgccggtgtcctttcgctcaccttcgcttttatcgcgctctcgctacccttctcactctcttcgcaggacgttgaccgcgctctcgctttcttcgaagcaaggaggcggggcggaggtgttctggttggcgggaggtgtgcgacgaagagcggcaacaacagctggcaacgtcttgaaaaactcgaaaactctggcagtgtgcgctcaataaatcaatggagcgttctgattagttttaaccatacaaaagcggtaccaaaaatatatattttattctatatatcttttttgtgttagctctgctccacgttgttgttgtttttgtgttgaaaggcgggggcggcggggcgcaaattctttctcttctcctggtgcgccataaacgcagccgatttgtacggtatttgcttcgctgtgtcttttgtgcacttttgtctcgcgatttcagctgcagttcttcgtgcgattaactatactcgcagttatttgtttttgcgcgactttgacgcgaacggttgggaattcggattaagaatgcgactccaggtggctctggattctccaatgttcgaaagaacgccgattttacctaaaagctgcgagcgcttttgcgtgggagagccgcagtgttggaaaccaacggaattgcgtcacggatccggtagcaccgggccagctgacttctgtataaaatatggcagccttggttataacgaatatttgcagagaaataatttaaaaccaattgaaaaatatatacaaatgaatcaaatagtacgcattaaaaaccgattaatattaacaattcattataaacaagctttactaaaaaattaaccgcccataacaataaaataaaataataaaaaaatgaatagatattataaatattacataaattgtataatataaatattataaattctgtaaacataaattcttttatgactagacccagttcaaagaaacagccgtacatttctaacagactaagtttattttaataactacacttttaaccactacaagtgttggttttcttatattttgataaaaatatacaacatattacatagcaataccaattttgacacggcttttcatttcctgctcttgacctaacagaatgatacataataatgtagtgcaaataagtaacgataaataatagaatttggtagcatgcaggaaatgtgttcagcaaattgtgtctccgttcagatcagccgtttgattcgcgcacacacggaatgaaatgcagcaaagtatgtagttggatttgctttggaataaatgtttaaaaacacccggcgacacgactcctccgctcgtcattctaattccgtcctggtcaaatccacaaactccttaactcccggagccgaaagcattaaaatcttcggtcccattcgacatctattccaaaaagtacagactagaagttcctcagttcttgacagaaaacagttgcgcaatcttggaggcatgactcttgaagaactcgtagcccacttttgcggcgctcttgagagctccttggttgttgagactgccgtttgttgtggatacggtgatggtcgttgcaggaagttctccagctggcgaagtcgtcgtcac

SEQ ID NO: 923 - DNA, 2560 bp, DROSOPHILA
cccacgcaaaagcgctcgcagcttttaggtaaaatcggcgttctttcgaacattggagaatccagagccacctggagtcgcattcttaatccgaattcccaaccgttcgcgtcaaagtcgcgcaaaaacaaataactgcgagtatagttaatcgcacgaagaactgcagctgaaatcgcgagacaaaagtgcacaaaagacacagcgaagcaaataccgtacaaatcggctgcgtttatggcgcaccaggagaagagaaagaatttgcgccccgccgcccccgcctttcaacacaaaaacaacaacaacgtggagcagagctaacacaaaaaagatatatagaataaaatatatatttttggtaccgcttttgtatggttaaaactaatcagaacgctccattgatttattgagcgcacactgccagagttttcgagtttttcaagacgttgccagctgttgttgccgctcttcgtcgcacacctcccgccaaccagaacacctccgccccgcctccttgcttcgaagaaagcgagagcgcggtcaacgtcctgcgaagagagtgagaagggtagcgagagcgcgataaaagcgaaggtgagcgaaaggacaccggcagccgcttcatcttcctcttccctctcaccgcaattcaacaataatataaagctggtctaaaagtggcaaacaaagttgttgaagataaagacacagcgaaagcaaccggcaaacgtaatcagcacccaaatcccccgcgaaccagaaaaatatagccaacatgcgcctgtttccagtccgattctcagccgcctcctcgtcgatggcgagtttggccaaaatgctcgacttttactcgggcttcaacccctcgcccctctcgataaagcagttcatggactttggtcagaatgcctgcgagaagaaatcgtacatattcctgcgcaaggaactgcctgttcgactggcgaatatcatgaaggagatcgcccttctgccggataacctgttgcacaccagatccgtaagcgaagttagttcctggtatgtcaagagtttcgaggatgtgctggtgtacgagaaagcagagcccacccacgacaatctgcaaaagtttgtggccgatttggatctcattaggaatcggcacaacgatgtggtgcaaacgatggcccagggtgtgatcgaaatgaaggagaacgagggcggccaggtggatgcgcctacagagagttccattcagtactttctcgacaggctctacatgtctcgcatcagcattcgaatgctgataaatcagcacacccttctctttggcggaaatccacatgcgggtggccgccatattggttgcctggatcccgcctgtgatctgtcggatgtggttcgcgatgcttacgagaatgcgcgattcctatgcgatcagtactacctgaccagtccggcattggagatccagcagcacagcagcgagcctggagacaacctgcccatccgcaccgtttacgtgccctcgcacctgtactacatgcttttcgagctcttcaagaactctatgcgagctgttgtagagcaccatggccatgacaacaatgacacattgccccccttgaaagtagccatttgcaagggcaaggaggacatctgtgtgaaaatttctgaccagggaggcggcattccccgctcccagaccgatcagctcttcaagtatatgtacagcacagcgccgcagccctcgaagtcggatctgcatacggtgccattagcgggctatggatacggtctgccgatctcaaggctttacgcccgctatttccatggcgacattgtgctgctctcctgcgaaggattcggaacagatgcaatcatctatctaaaggctctgtccgacgaagcaaacgaattgctgccgatcttcaacaagacaagctcaaagttctatcgcgccaccgtgcccacgggtgactggtccaatcaggtaaaatacgctaaaaagaagaagacgagcgctgtcaaccagtagacgtgtgaaaatgccaaagagcaaagcaaaaaaaaaaaaataaataaaaaagaaatgagatgtgatgagttgagaaatgaagcgaaccgcctggctgtgtaaagagtttgcgccaccctgcaccaattgaattcaatccaatcaaacccaatcccagcaagcaagcaagcaaccctcatcccgcatccgcaacccagtcaagtgaaaagtgtttatttattgtttaatgtaatgttaatgttaaatactacctatgtttgtatgtgccccaaactccttaacacgtttgattttcgaaaattttttgaaatattgtcatttaacatttgacattccacaaacatttttgcccatcttggagcgggctgaagctgtgtttagattttgcggggagcgagtggcgcagcgcccttggctttaatattacgtttgtagccattaaattctatatatatatatacatatttatataaacctatatacacgacaaacatttatactctgaagtaaactgatgttttgaaacatttacgaaattag

SEQ ID NO: 924 - protein, 413 aa, DROSOPHILA
MRLFPVRFSAASSSMASLAKMLDFYSGFNPSPLSIKQFMDFGQNACEKKSYIFLRKELPVRLANIMKEIALLPDNLLHTRSVSEVSSWYVKSFEDVLVYEKAEPTHDNLQKFVADLDLIRNRHNDVVQTMAQGVIEMKENEGGQVDAPTESSIQYFLDRLYMSRISIRMLINQHTLLFGGNPHAGGRHIGCLDPACDLSDVVRDAYENARFLCDQYYLTSPALEIQQHSSEPGDNLPIRTVYVPSHLYYMLFELFKNSMRAVVEHHGHDNNDTLPPLKVAICKGKEDICVKISDQGGGIPRSQTDQLFKYMYSTAPQPSKSDLHTVPLAGYGYGLPISRLYARYFHGDIVLLSCEGFGTDAIIYLKALSDEANELLPIFNKTSSKFYRATVPTGDWSNQVKYAKKKKTSAVNQ

SEQ ID NO: 925 - DNA, 10703 bp, DROSOPHILA
agaggaagattttgatgggtgcccgtatcggtttgttgtagggacttgggccaccttaactttcgaccgctgctaatgctacttaagtataataaatgctgtgactttttatgtgcggatgctgcgctatttgctaaaataaaaactctattgggttattttatttgcacttttcactagaggcggccgactttcgataggtttgatttacgaaacgaatagggatggactaaaaacagggttctctgggcagttgatggtattctcaagggctaaacagaatggtgtaagctggtgtaagaagcaaggtgcaacaaatacttaaccaaaattaatgttaatgcggggatatacacactaaataaacttttgaagccacaaatactaaatggagaccccaatattaacctgagatatttaaatttaatttaaataatgttcataaaaatcatttggacattttgtaactcttagaattaatacgtcgcactggaggccgggcatttaaaaacaagttggcagctattgagtatcgtttccgcaccagctctgttatcgatatcaacttgaaaatatgttgtcattctcacatcgcgaggcataagcaaagacaaaaaaaagtgagaacgaagtgcgttatttaatttttataccatttaatttaattagaaatctaagcaaagcaacaaaatgcgtgagtgaaattgtgtgactccaaatacctaaaaggctcccgtgcccgcatcgtgtaaatggcaaaaaactgacgcgaaaagtaaaactgccaacaacaacaagcagcagcaaacagaaagcataagcaagcactaacaacaacaacaacaacactcacagcagcagcagcagtagcaacaacaacgcaattgtgatagacaaagaaatagattaagaaaaggagggcaacagcgaagaacagaaggaaatgagaaaaacgaaaacagcataaattatttggaaaatatttccttgctcgaacatattgatagacattgggactaaaagaagagtcgagttaatgctttttgcacatttgatacgcaacgaaaatagtttttaaagtaataggtaatacgcaggcaagagaagaagcagagccatacaaaataaataagaagagcgtggaaggcgaggaagagaataaaacaacacagtggcgttgaaagagaggaagcagcagacgagcgaaaataaagaagaagcgatacaaatgttattgttgctgttgcaaataaaaacaatcacataaacacatttgaaaacagatacagctacagctgatgtaaaataatttgcagagcctgtgtgttcgtgcccgtttacaattgattaaagccaaaacacgaacacaccgcgcacacaaccaggcaacaataacacttcacacacgtacactcacacacacgcaacacagtcccactggagaccattgtggaaattgattaaagaatataaggtgagtgtgagtagggtatggtttaattaaccgttagttatagtttaaagcacaccaacgccaggggatccgacgacgcccttttcactgcagaaattccatccgtcttctttttccacccctttccccatccgcctttacaacaagtgcaactacatacacctgctgccattttctttattgtttttttaagaacgtcagcaaccctcacgctttggttgttttgtgcgtccgtttgagccaaattgcaattaattgccataatttacatattttacaagaataactcggtgtctgtgtgcatttgttcgtcattcgagagctttttcctgttaactgcactgcacccgaataagtgcaaaacaagaaggaacaaagcaaaacaacagctgagagagcgaaccagaaggaaagaagcggatggagtggggaaagggaacccgtagaatgagttgcagatcgaattatcgaatatcgataagatgcaggcgatcagctgaccatgtttactctactacactacaaccgatttttaggttttaattatctgctgttttaatggtctgctgttctttgtttttctcttttctgtttcttggcttaacttgtttactgcagttggagtttttgcgtgagtcatatgcagtttatacccctttaagatgatgtacatatatgtacataataattaagtgcaggggacacatactattaattgcagttagacactcacacaaacacacatgcataaccaaacgccagtccgccgctctcataatcgttctccctgagagaaagtgtttttattttgccccccacaaggacaaaaaaaagaagggagagctgataaactctgactgcgctgtaatcagtttgcagtgacagaggagttcagtttcagttgactcggcttggttcagggtttctgattgccgtcctcttctccctcttcgcctacaagtccgctgttcggcaccgtgacgtcacctagacttacacccctaatcaaagatccactagtttagatttcctgcatcaacgccatattaactttataagcagtcgttatatctcaagtaggcaaaaaagtgtaatagatatgtatctaaattgtcgtacattctatttattaaaattcgtttttacatccaacaggtgttatttttgaagtcttagataacaaacaatattcgaattatgtggtagaatacttagcaatatacgcacatacatatacatatgaacattatatccaatgctttaaaaccggaatatcaagacaacataatgcaacatctggttccgagctatccaggcaatcacatttttgaagttcccccggttatcacacatatatcgatacataccccgaaatgtgtaacacagatacagctcaccatccctctgataagatcttatcagttcggggcttgctcgctatcgtgatttgggttgaagggtccgcgataattgcattggggcatgccattggtaatcacaatttggctgattagtgctgtctgtctgtcaattccaacggctatgtatttcatcaatttgcttaagtgtacctggtaattttacctcggcattacagatgatcctgagctaatcgttcctggtatttcatcagatataaaagcggcgtaccgttacacatgttcgcaaactgtggacaattttgagaaaaccatccgtaataaaccgcgtcttggaaatttagaagtttagtttgacggaatggtgaaattggcttaggtaaaagaaggaccgcggggtcaggtaaacgctggtgcgtcggcgttggcattgactcatgatcggcgttggcatcgatctttaattctccgactaattatgattgaaacaaaagtaggtacaagaactttctcgaaattaacaaattaattaaatatggtttatttgtgattcacacgaggagctgaattggtgatgctgcttttgtttaattcaactgaatttacttgatgcaactcccttcttttagttgggaacttctagctaaaaaatagctaaatcatcgtcacacacgtgcggcgctctctcatccgctcaaatattctccgtctttagtcgtgcgctctctgcgatgatcatttgttttcgaaccacccgcaagtctagacgtgttcaaatcaaggtgcgttgataacacgtttcacgatgttgttgttctggtgcgctgctgtttacagctcgcaaataaataaatagtgtggggaagagtgaatgcgcgtgtgccgagtgtggagccatgctctttccgcttttccgctttccctgttatgcgccttatcgctaaaagccgtctgcgaggctaaattgtaaacaaaatataaaaataaaatttaataagcgtctgtgcacatgctcggcctgctattttttattgcgactcggaaatggcccagttagtcattaacatttgtactacctccctcaccgcgcgcctaccctcagattgtccctctgacgacacaaagagagcaaaaagcaccagcgacagtctgtctaacagctgttgggtatcacaagtgatccagtcaatggcttcaaagtagctaggctattctctgcctctgcggtggattactagtggatgcaatcgttgaaagcggtagagtgtggttttagggcttaaaacgacaaaaacgatacaattttttacaaatattctgaaattacactaacgttgttgtttgttgctaaatataaagtgcattaaaaattcgtaacgctaaaatgtcatattgtttgttacttctttgagcttcatttaaataaaaacaaaaacagctttactacatagtaatgaaacacacttaataagttaaatgcgtatcacaaataagactatctttactcattcgtattcgttgtttcttttctctggcagcttaacactaacaacacgagtataacaaaaccaaaagtacaagcacacgtgccgatgagggaataccattatatcgtctgaagcactgccaaaccattcgagagacgacaggaccaggattagagggaggcgaagcgggcgtgggagagggagaagcgggagtatccccgccagacagcggtagccaagtcgaggagacagtgaaaaaccaacggctccatgatgctgtacgtgttccacgtagatgtcggccgcatgctaagctttgacatgaacgttgcactgcagccagtggagcatctcaaggagacgatccagaagctgcacaacatcccggccgccaacattgttttgctagtgagcggaggcgaaatgctcacgcactccacccaagtgtcgtgctactcagctggcaccgacaccaatcccatctatatgtttctcacgggtgatgagcgcctaccgcccacgatatacaactcggacgcggacaacgagctccgtcgtcaggtagaggaaagtcaccggttacctccggccctggagacagtgcgtcagcgggcacagctggctcaacacatgcgagagctggccagaaaggaggaggatcagtgcgagcgtctggttcacgagcagcaccttcagcagcagggctggtcggctgtggtggccaatatggaggatctgacgaacgagttttgcgaccgcttccagaatttctgctccttctttgaccggcatctccagaaacgagaaagctttttggagctgctgcgtaactttcccgatgatctcaagcagctgggcaggattcccatactccctgatctaatgtctcttgccgaggccgatttccatggctttgacgaactgttggataacgacgacgtgtttactgcccagcaacaaccaacgccgcagcagcaggcgctcaccgaatcctcgcaagctgactcccccaataagaagctcaaaatgggcgacgaggtggaaacagaatctggtgagcaaacggagcgcggtgttcagactttgacgagcagcagttcgcttgcccgtcgcccaaacctgaacctgctgcagtggatcagttccaagggtaaccatagggctctgcagcttatgtcagatgagtgcatccagggactggacgtcttcagtgtggaaatttacgagaagctgaaagaggaagtcaatcagatcattaagttggccaaccaggccgatgttaaggagatcaagggcctcggcgaccgtctctgcaagctggaggagtttaagttccggatcaagaagatggtgcaggagcaaaaggaacaggcactagccctccagcagaatgaggcgcgcgcgcagaatttgcgcgacaactccgtcctcccggatctttgcctctcgcatcgctcccagctgcaggtaatgctggataatcacattaagatacgcgagtactgccgctgcatagccaactccaaggacgagctgggctggaatctgcacacacgtctgcgacggatcgtgtggattgagaatgggatgagtgagttcgacaacagattgctgtttaatcatcgctgcttgcggcgtgctgaacgtcacatatgcatcatcgagcagatccaccgggcgccgagcacctatgtttcggccgtggcggaggtggtgcgtcggaagatcttttcggatgagttccggcagtgggccactcgactttctgcggacttcgatcgcattcacagcgaggagttgagccgacggagggatttcaatgcaagcttcgaaggccattttctcaatattctgtttcctggcatgggtgacatgcccccagcttttgcaaatgagcaccccttgagctttgacacgcgtctcccttctttgagtcgatcggacatggagctgctctcctcgcagttgccagaactggccggacagctgcagttgcccgacatgaagcctgtgatagattttttcgccctgcggtcggataagaatgtggagccagaccaagagcaggagagggatatcccactaatggctccacgtttggccgagctccaggcgcaggcagctgcctctgactgcgaaaccgatacggaaacagaattcgagaagctcagcaccacctccaagtgtgttgcaacttcaatctcgaccagtttggtggagcaagtggcacagagtactgctaccgaggatctgctgatgctaagtgctggcaccctgaccgaagagaatgcaggcagttttgagaagatgcgtagcgacatggaaagtatgaccaagttggcaagagcatgcctcgctgaagctcgttccaatgtgggcgtctttcgcagtgacgtcgccaactaccaggatgaactccagtccgagttgcatcttctgcgagataaatgcaatgtgctgaaaatgatgtgtgaggaacgcgagcagaaattgcaagaaaagctggatgagatgagcttgaaactgcaattggcggagcaggagaagcaggctgcggtggcccaggcgcgggagcagcttatccacgagcacaaaacggagctggagtccctacgttgccggtttaagctgatgacctccatggagcggtcgccatcggacagcagccttgagaaaatagagcgaccgacaagcagcgctagcgtggtcagcgccaacgctggtgtggatatcgaccatctgctggcccagcagcgccaggagctgctggcccagagggagcgtgccattagcgaagccgttgattcggaacgatcgctatggcaatcacgtctcctccccctaaactctgaatctgtgatggccaacgtgggcatattaaaggacatgttggccgacaaggaacggcagctagatcagctgcgggagcagaataagattctcacccaagagacataccagctgaagacacgactggagatgatcaccaacgaggatggcaacagctggcttaaggagaagatcgactatcttaacaaggacaagtgccggctggaagaggagctcagccaggagaagagccggcgccaagagatggagtccagtgtggccgccatgagaaggtaagaacaggaactctacttcaggcttcattgccgagcaattatcagtgtgttaattttggtagagcctaatgattgtgaatcagatattcctaattatacccgttactcgcagagtaaaagggtatactagattcgttggaattacatacatttaggcagaaggaaacgtttccgactgtataaggtatatatattcttgattaggatcaatagccgagtcgatctagccatgtccacctgtccgtatgagcgtcgagatcacaggaactataaaagctagaaggttgagattcagcatacagattctagagacacagacgcagtgcatgtgggcgcaatgttgacccatgttgccacgccctctctaacttccacaaaccgaacaaaactgtcacgcccatgtgatgaaatttcacttctttattagtcttgtaaatttctatagatttcccaaaaaaaactaaaaccgcccaaagctgccaagaccacacttttggacaatttttaaaatttttctcattttgttccccaatatctatcgatatcccagaaaaattatgatatttcgcgttcgcattaaccctagctatgtaatgggtatctgaaagtcggggaactcgactatagctttctctctagcttaatatgtaatttgattgccttttcggttaaacgagtgctaacaataaccttttccactaatagctctgcctacgatctgaatgttggtggccccctgacccgatcgaagtctggcgtaagttccagtcaccgatctatcgccttggaaggatgtgctcgaggcgatctcgtcttcgtcgtttggagcatgcggcacgcgcaatttatggtcgtccaggactcgctcaccttgtacttcgtccatgccgacagtttggctagcctgcagttgacagctccgacctcacccacaccgtcattggacccttcgcagacagttgtggatatcaaccagatccctctgccctactacgccattggtcgggtcatcgacaaggagtactgccaggcgcgaaaggtgtgtgcatatttaaatatttcaccagcatgagtactcacccctgtgtggcttctttgcaggacgacaatcgttatcgcgtcagtaggggctccaagttctatcgcatcaagctggcccctttgccttctcgaaacgcttcgcggcgtgagcgtttagagtgtaagtaagaattgaggctggtgaatctttatgagcgtatcgaattttcatttgaggtcatcgtatcttattacgttttttaacacgcagctggtgttattttatcaaatgtcgagatagatactttctgatttagcttagtgggaaattgagtaatttaaagggtctgttcattcaaagatttaccaagacgttcatgactagctatgaagtaactgcaggaaactaacttacgatctccctttttagccagctcatccattgccgcagtcgtggcttcgcccagagatgtcatcgatgctcccagtagcaacacgagcgtctatcagagcttcaagcagcgcacggtgagcattacgagcgtaaatgaggaggatgacgagtcggcttcgctgctcagcgagcgttgtcgctacataagcgtaagcgaggaggatgagttgcatgctgctggtggctcaatgccggcagtaacagctgctgttgcaacaggcacatcgacagcagcatcatctgcaacaccaattacaactgctgcaccggtggcaggaggtccgacatcaactgcaccgacggcagcaactcaagcacagtctgtgataacagagcagccaacggcatcaagtaaacttaaattggatctactgttggcctctgctgatataataacacaacccctaacacaacaaccgcaccaacagcgacaggaacttgatcagccagctgaggctgagagtacagcgcctgtggctgaaacaagtccaaatcaaacaatccaacctgaggatccggatccggaaccggaaaccattaccatctatgtgccccccaacgccccagcagtattaactgcaacaccctctacaagagctagcatcctggccagcatcagtgcgaagcctatcatcagcacagactccatgctgcccatgtccattggcacggcggccataagcgaggactcggacgagtatcgttcgctggagggcaaggacgatggcgatggcgatgccgatgattttcccatttccgagtagtgtacgacagttgggactaacatataactacttatatacataaacggagtgtgtatctaggctaaatcttgtactctatgtaggaaccgcatcaaaaccaacaaccaatacccaaaaattgaaaaataagcctcagggcagacacacaacacacacaatacagtagcctcaaaaaacgacatcagccagcaacaaaaacagcaacgtgaaagttatatatagttaactgatttaaagttaaccaagtgcggaatatatattcaaaagaaagtgaaaacaaatgttctaatgtccgcataatgaaataatcttatcaaatttgaaagcgggatttaccccttcaaatgcaaacacaccgagacacagacacagctaggattttcaaaatctttatttcaaataaaaataatgtactttaacaaatttaccttataatcaaaatatttacatcggtaattttcggtttaaagttataatttgcttcatttagtgccaagaaaattatttccaagtcacattagtttcgtagcgtgtaaaattgagatgaggaacacaagaaatcatattttttataggcattttaaaaagactagaacacaaagagtttgcacacacacacacacagagacccaccctcacaaaacaaacaaaacacaacccaaacacacaaagaaacaagaaacacaatcttttgggctcagcctgcgaaaaacacagttttatgctcagcttttaccactctcttcccctgaccctccagaaatcgaactttctactctctctccttgcctatatctaagatattttgatttttcgactttgtgtaaataaataagaatggaaattgacgaatagttatttatgcctttattaatacaaggaaacacttgaaaattacaacaaaatagatatatacacatttaatgatttatgcgttgcgaagcgatagtttttcaacgcgcattgtaaatataaagaaagaaatattatatatttaaaa

SEQ ID NO: 926 - DNA, 4744 bp, DROSOPHILA
aaaaaagtgagaacgaagtgcgttatttaatttttataccatttaatttaattagaaatctaagcaaagcaacaaaatgcgtgagtgaaattgtgtgactccaaatacctaaaaggctcccgtgcccgcatcgtgtaaatggcaaaaaactgacgcgaaaagtaaaactgccaacaacaacaagcagcagcaaacagaaagcataagcaagcactaacaacaacaacaacaacactcacagcagcagcagcagtagcaacaacaacgcaattgtgatagacaaagaaatagattaagaaaaggagggcaacagcgaagaacagaaggaaatgagaaaaacgaaaacagcataaattatttggaaaatatttccttgctcgaacatattgatagacattgggactaaaagaagagtcgagttaatgctttttgcacatttgatacgcaacgaaaatagtttttaaagtaataggtaatacgcaggcaagagaagaagcagagccatacaaaataaataagaagagcgtggaaggcgaggaagagaataaaacaacacagtggcgttgaaagagaggaagcagcagacgagcgaaaataaagaagaagcgatacaaatgttattgttgctgttgcaaataaaaacaatcacataaacacatttgaaaacagatacagctacagctgatgtaaaataatttgcagagcctgtgtgttcgtgcccgtttacaattgattaaagccaaaacacgaacacaccgcgcacacaaccaggcaacaataacacttcacacacgtacactcacacacacgcaacacagtcccactggagaccattgtggaaattgattaaagaatcagcttaacactaacaacacgagtataacaaaaccaaaagtacaagcacacgtgccgatgagggaataccattatatcgtctgaagcactgccaaaccattcgagagacgacaggaccaggattagagggaggcgaagcgggcgtgggagagggagaagcgggagatgatgctgtacgtgttccacgtagatgtcggccgcatgctaagctttgacatgaacgttgcactgcagccagtggagcatctcaaggagacgatccagaagctgcacaacatcccggccgccaacattgttttgctagtgagcggaggcgaaatgctcacgcactccacccaagtgtcgtgctactcagctggcaccgacaccaatcccatctatatgtttctcacgggtgatgagcgcctaccgcccacgatatacaactcggacgcggacaacgagctccgtcgtcaggtagaggaaagtcaccggttacctccggccctggagacagtgcgtcagcgggcacagctggctcaacacatgcgagagctggccagaaaggaggaggatcagtgcgagcgtctggttcacgagcagcaccttcagcagcagggctggtcggctgtggtggccaatatggaggatctgacgaacgagttttgcgaccgcttccagaatttctgctccttctttgaccggcatctccagaaacgagaaagctttttggagctgctgcgccgatttccatggctttgacgaactgttggataacgacgacgtgtttactgcccagcaacaaccaacgccgcagcagcaggcgctcaccgaatcctcgcaagctgactcccccaataagaagctcaaaatgggcgacgaggtggaaacagaatctggtgagcaaacggagcgcggtgttcagactttgacgagcagcagttcgcttgcccgtcgcccaaacctgaacctgctgcagtggatcagttccaagggtaaccatagggctctgcagcttatgtcagatgagtgcatccagggactggacgtcttcagtgtggaaatttacgagaagctgaaagaggaagtcaatcagatcattaagttggccaaccaggccgatgttaaggagatcaagggcctcggcgaccgtctctgcaagctggaggagtttaagttccggatcaagaagatggtgcaggagcaaaaggaacaggcactagccctccagcagaatgaggcgcgcgcgcagaatttgcgcgacaactccgtcctcccggatctttgcctctcgcatcgctcccagctgcaggtaatgctggataatcacattaagatacgcgagtactgccgctgcatagccaactccaaggacgagctgggctggaatctgcacacacgtctgcgacggatcgtgtggattgagaatgggatgagtgagttcgacaacagattgctgtttaatcatcgctgcttgcggcgtgctgaacgtcacatatgcatcatcgagcagatccaccgggcgccgagcacctatgtttcggccgtggcggaggtggtgcgtcggaagatcttttcggatgagttccggcagtgggccactcgactttctgcggacttcgatcgcattcacagcgaggagttgagccgacggagggatttcaatgcaagcttcgaaggccattttctcaatattctgtttcctggcatgggtgacatgcccccagcttttgcaaatgagcaccccttgagctttgacacgcgtctcccttctttgagtcgatcggacatggagctgctctcctcgcagttgccagaactggccggacagctgcagttgcccgacatgaagcctgtgatagattttttcgccctgcggtcggataagaatgtggagccagaccaagagcaggagagggatatcccactaatggctccacgtttggccgagctccaggcgcaggcagctgcctctgactgcgaaaccgatacggaaacagaattcgagaagctcagcaccacctccaagtgtgttgcaacttcaatctcgaccagtttggtggagcaagtggcacagagtactgctaccgaggatctgctgatgctaagtgctggcaccctgaccgaagagaatgcaggcagttttgagaagatgcgtagcgacatggaaagtatgaccaagttggcaagagcatgcctcgctgaagctcgttccaatgtgggcgtctttcgcagtgacgtcgccaactaccaggatgaactccagtccgagttgcatcttctgcgagataaatgcaatgtgctgaaaatgatgtgtgaggaacgcgagcagaaattgcaagaaaagctggatgagatgagcttgaaactgcaattggcggagcaggagaagcaggctgcggtggcccaggcgcgggagcagcttatccacgagcacaaaacggagctggagtccctacgttgccggtttaagctgatgacctccatggagcggtcgccatcggacagcagccttgagaaaatagagcgaccgacaagcagcgctagcgtggtcagcgccaacgctggtgtggatatcgaccatctgctggcccagcagcgccaggagctgctggcccagagggagcgtgccattagcgaagccgttgattcggaacgatcgctatggcaatcacgtctcctccccctaaactctgaatctgtgatggccaacgtgggcatattaaaggacatgttggccgacaaggaacggcagctagatcagctgcgggagcagaataagattctcacccaagagacataccagctgaagacacgactggagatgatcaccaacgaggatggcaacagctggcttaaggagaagatcgactatcttaacaaggacaagtgccggctggaagaggagctcagccaggagaagagccggcgccaagagatggagtccagtgtggccgccatgagaagctctgcctacgatctgaatgttggtggccccctgacccgatcgaagtctggcgtaagttccagtcaccgatctatcgccttggaaggatgtgctcgaggcgatctcgtcttcgtcgtttggagcatgcggcacgcgcaatttatggtcgtccaggactcgctcaccttgtacttcgtccatgccgacagtttggctagcctgcagttgacagctccgacctcacccacaccgtcattggacccttcgcagacagttgtggatatcaaccagatccctctgccctactacgccattggtcgggtcatcgacaaggagtactgccaggcgcgaaaggacgacaatcgttatcgcgtcagtaggggctccaagttctatcgcatcaagctggcccctttgccttctcgaaacgcttcgcggcgtgagcgtttagagtccagctcatccattgccgcagtcgtggcttcgcccagagatgtcatcgatgctcccagtagcaacacgagcgtctatcagagcttcaagcagcgcacggtgagcattacgagcgtaaatgaggaggatgacgagtcggcttcgctgctcagcgagcgttgtcgctacataagccgacaggaacttgatcagccagctgaggctgagagtacagcgcctgtggctgaaacaagtccaaatcaaacaatccaacctgaggatccggatccggaaccggaaaccattaccatctatgtgccccccaacgccccagcagtattaactgcaacaccctctacaagagctagcatcctggccagcatcagtgcgaagcctatcatcagcacagactccatgctgcccatgtccattggcacggcggccataagcgaggactcggacgagtatcgttcgctggagggcaaggacgatggcgatggcgatgccgatgattttcccatttccgagtag

SEQ ID NO: 927 - protein, 190 aa, DROSOPHILA
MLYVFHVDVGRMLSFDMNVALQPVEHLKETIQKLHNIPAANIVLLVSGGEMLTHSTQVSCYSAGTDTNPIYMFLTGDERLPPTIYNSDADNELRRQVEESHRLPPALETVRQRAQLAQHMRELARKEEDQCERLVHEQHLQQQGWSAVVANMEDLTNEFCDRFQNFCSFFDRHLQKRESFLELLRRFPWL

SEQ ID NO: 928 - DNA, 14847 bp, DROSOPHILA
gacatccaggccacccccacggcgaatctctgcccaccgcgcggccggtgtctgtgctgatatttgcattataaataataaaacataataatttgccttaatcgaataatgacccccaaccacggcgatggcgtcgctaccacgctgcgtcggatccgctggtctccgtcgcccggactccgagaccagaatggtgagagggatggaacggggatgtggttagtgggaagtggaagttcccgcaggcaaattattcaataaaggccacaacaagagcaaagtgaaaaatatatagagacctgtcgcccggaagaagagaggtgcatacatatgtaaatagtggggggaagccagaaatccacgtgcttcagtcgcaaagagaacgcgagggaggggggtggtggggcggggggtgtgcgccaacgaataacagaaaatttaaaatgctttgcaaatgcaattgtgggccaggtacagtggggacagcggtaaagtgaactgctaagcggagcatttgccattcacgcataattaattttctacggtttgtccacggagtgttttctggcctttctgcatatttaagccgcactcttaataccctttagcttaggcggtatttgtaataacttccttttgttaacatcttttttttataaatatttaaacttctaatcttgtccataatatattcaaaatgattatgttcaaatataactacataattgattaaaataaatgggcttatttgttttcccaaacttagattttgtttctaatcaattatttcaactagatattttaatattttaactacctttattatactggcaagttatggtagtaagaaactaaaatggtgagaaagttccgcttaggaaggaaggccacctgtttaaaggtctgtttcatatagcgtgtgttccctgtgctgcgctgattcacaacagctggacttgttttcgatgcgaaggcgatgccagaaatgagtgtccgtgcgcccggcccagacgcagatcccacagtgcccgccaaaagtcggttaccctctcttcactccggatttacagctcaggtctggcaaaacgtggtggtgttccgaatgtgtcactagactcggcggcgataattcgaaaggaaaacagcaataaaccccgaatgccgaatgccctgctcgtctggcgaggcacggcactcgtaaaacaatcaaacgcctggcgagtcgcggctcttaaccagttcgcaatcatttatcactccgcgcctttggagctgaagcgcagggcactcgacgagacacggctgtttggcttactttgtcatcatcatcatcatcatcatcgtcgacttggcgaactcgagaatcagctgttggcgaacgaaccgaaagcgtagcgttttgcacatcaacattcgcgctcttaagcggagcggagcgtcgagcgtttcgaaatcagtttcagtaccactttgtccgttcgcgattgcgtgctccgtaccgtagtcttctctccggcggaacagcaccgccaccaacgccaccgccatcagctgctcggatccggacaaaagaagaagaacgtgccgaaccaaagtgtccaagtgggtacagtgtggttacaagcgggcaccgacccaccattagggcatggtcatcggtttgggacacgtggaaatccccctcatatgtacacatatacatacatattacatatgtacatatgtaaatatgtatgcgcggttgaaagtcaatttccgttgccagccaattcgggaagttatttgtggtgattcggaagcgctgcattgccagctgcactgagcgaaataactaatacaaaagcgattttagaatgatcgaaatggtgttaaagtcgaaagtgaccaataaaaaggtcaagtgcgtggagaagtgattagtaaatcagcgacattcgtagcgagctacaaagacagaaagaagtgtaaatatttcaaatatttagtaattaaattagacacacatagtcgataatctaatataaatataagatatacgaacaaggtgttttacacaataaacaatacgcttgaatttcaacattattccaagcacgactcttcaaaggtttctgtaaacccattttaaaaatctgtgttactgtgccaatgcaactttataaaaagcgtgtacaatattcaattcaacttatttaaaaatgaccatcattgatttaaaatcttaattccaagagaacgaaacataaaaacaatgcaatgatgaacgataatgagtcttgagtaaaccattcaaagtaacattttgatcaaacccgtgagctcccacaattgcatgtttgcttttaaattattttatataaaatattaataaatttacaaaaccgaacgaaacaaaaaaacaatacaattatcaaagataataagacttgactaaaccattcaatgaaatgcagacaaagtaacattttcttcaaacccgtgagctcccacaattttatgtttcctaataaatgagctgttttttttttttttttttgtgtagccgctgtctagaatccgtcttatcgcagttttaacactcatcgaataaagcgaacaccccactccatttacgggtatttatctgggcgaagaccaaacacccccgcaaccgattgtggtcgggcaaccggcgaccatgacgccaatctcaagtgttctggcgattcattgcgatccgtgaagcacgggaagatcgggttctttgacagtgggttattatctctgctggttgtgcgaatgtaaaactcaatcttaatgggcgtggaaaatctaccttaatttgcaaattgattaaatgcagtgattaggcattttaaattcaattggccggcatatcagcgagcgatctaattaaacgataggaaatggggaaaaactgtttgcgcacgacatgtttttcgcgaaagaaaaacagtttcatctcgcggcggctaatggcattaagctatcgaaatgcacgtgccaaatgagccagtgaaactttcagcgcaatataaagcaaaggccaccctccaacccccccccccccccccaaaatagtgacccaaatgcaatcggaatccgaaaccggaatccggcattccaattccactccaagccactcaatttatttggcgacgcactcgcacaaagtcagtcaactggcgcagattgcatttgccaaggccccaggtcaaatgcaaatccatagccaaatccaaatccgttgctaaatccaaagctaaagcttaaactaagctgaagctacaaaaaataaaaaatataaaaaaacatgaaaatccggactcggaaatccgcgcagagcaacaagtggcattgggggcgcttaaattcaactcaatggctttattaaagcaaatttgcgatgtcacaaaagcagcagcagcagcagatggaaattcgcttgtaatcagaccagtcaacaagctaattaaggcacattaatatcgggtttacccaaaaccacagcatttcggtttgttctgaaatcagaatcaggctaccgaaatccaatgggaattattcaaagtgtaatattcgtactgtttaatttatgaagctttttgctagcttgtcttattattattaacagctggttaaccaataaaattagccaatatatacagattgttgacaaaaaacgagcagatgatttatggctgaagggttgtagattacactgcaatttactcatttattttcccatttactaaagcagtttaatctgaactagtatgccgcacatctgcttactatttgcgtagaacagcacgtttggtggcaactgaaacgaatttgaataccagctgttctagctcaaaataatctcaccttgtagatacatatatgtatatatatacatacatatatctccgtctttcgataggcactcaagttcatggccaacacacaatagcctcgttagcaatatcatttcaattcaaatggtttgtaaaccacaacgttagttacttattttaaccgcaaagtacatggatgttttaggcacacagagctggttagctaatggttaactaatatccgaataaagcccgaattaaaaaactcaattgattattgtgatatttgcttgcttgcagaagaaccgctttcgaatatcagttttaagcaaccacgactgccccgaaggaatagagtgttatatccagccagcaactaaacggcaccaccgatcagtccgtcgcaccacctgttccagctgcgagtagcaccactttccagcacccacccactagatggacctgaagcacagtgcgggtggagctggcgagaacagcgagaccttcattgccaccagcaagtccacagacatgatcacgcccaaggagaaggagggcaaggggctgaaggtggcgggtggccataaccccccagccgaaggtgagtcatcataatcctcattatccagaaagactctgatggaaaggctccgaaaagcatatctttatcctaacttgagatattatactattcttgcactttatgtactttcatttgacgaagaagcatgcttcaaaaaccaaacaaaactggtatccaagatacgagtatctccaaatagaacagtaatcttaacaactaggtcagttatcaataccaaatttcaaagatcaaaaacactgatatgatatggtattggaaatagttgttaggggtagcaacagtgcgttgtggaaaaagttaaatctgcgagtctaaagtaaagttaggaatcaaagtatagatagttgggcatcaaagtagttcgatatcgaaaagcacttgaaaacgtcgaaatgtaatcaattttcctgccaatcgaaaacacaacaggtgtggtatcatatttaagcgaaacgattgaagtcgtgcttttcaaatagatattagatactttcgaatctgacctttaccacatatcctttaaaatatctctgggcatgcttttcaaatagatattagatactttcgaatccgacacttgctatgacaaccgtttgaatgccagcgactgccatccgaacccaatcctgtgagtcctgccgtccgctcgttcactggcgacaggtgatgtgggtgcaatgccaccattgcttactacaacacagcactcgcctagttggcatttcaagccgaacagtcgcgcagttgccttgccgctgcagctgaatgtgcacctgcactttgcatgtcggacgcgaacgagcggtttggcctaactgcgcctccaggtaggcaatagtatcgtgtctgtgattgtgttgcggctgcatagatgtatgggtgcgtggtgcgggtgtgtaagagtgtgggtgtgcgaagagctggcattcgggtgcagtatgcaatccaggcaccacacaaccaccacacacaaatgcactcggcgagcctgccaaaaccaaagccacagccgcacattcacttaaaagcaggccagccgcaagcactgcaagaaaaaagattcacctttgattaactatgaactaaaaatacaagatctacataagcaaatgtattttatacaaaatcgaactttgtaactcttctgtgaacctgaagaagttcatctatatattttaattacatcactgggccatcttaaataattatttttttaatagtaataccctatttttcttcctgtgcactgtaaacatatgtgtggccattgtacctggctgtgtttgtgcatacacgtgctttaactgaaaactgaaaaatacaaataaagcagggcatcaaagcgttttgtactttcaatgccatgcaagccgaaaagttagtgacgtcgcctgtgaattgtcacaaattggaacgagaaagatggttaaaaatagaaccaaagcctacatatatactacatacatatataagcaatccgatgcacgcgattccatagtgatagccatttaatacgaggtgcaaactaaatgcatttcaatagctgtgcatttagatcacacccgttctatttgtaatcaaacattttaatcataaggatctcctgggacaattgaacgttcccacaaatggccgaatcaaaaatgcctttaaagccaaggatttcctctccatttgaacagaaatttattcaaattcgatttaggtcaaagcaaaaatagttgcttaaatgaacctcgttagcgaaaatcacggtgtccatgaatcgaaaataattaagctatttaaacaagtcgaccaataatttcaaatttcgaggaaaccttttccaaaggataacctcatggggcctaatttcatcttattcaggatattttgctcacgaatcacacattaaatatatattcaaaacaaaataattgcagcaaaacaaaattatttaaattactcaataaattgaaattttgtataacttcaaacgttattatggataatgataataccatataaatttagagacataagctggctagtatgactaacaagattgccattggaggcctttaagttggaaatttagagaagtaccgaaaaaccctcaaggccgcgacgtcactaggcaaacagaaagggcggattaacttgttacgataatggggcgatggtggtgggcgccatcatttgcatggatattagcttcggaaaaggccttaggcgcgagtggaagtagtgaagaagtagtgagtagtatatgtaatcccggcccctgatccagttaatccggtgcagctctacacggggtcctcctccgcaggatggtcggatgcgatgcgatggaatggggagccttgggccgcgtcatgagcactctgaagtggctttcacctggctggcattcaatttccactttctatttcttaggctacaaagtctacgcccgacgctgggcggtgctcatcctctttgtgttctactcatcctcgaatgccatgcagtggatacaatacaccatcatcaacaacataataacccggtgagtgaacggggctgcgagggcggatcgtgcggttccggaacatcgcgtcgcatatttcgttaaaagttttcgaaaagctcattaaacaacttgactttggggctgcataaattaacttcaagtgcattcttgcccacagaaatttcccctttctaatcgccgctttgtcctatcctgcagctactatggcatcagcgacaagtgggtggactggacgtccatgatttatatgatcctgtacataccgctcatattcccaggcagttggtttttggataaagtggtaagtacagtgacagtggagcgagaaatagtttataattacttccactaaattaagaagtacatattgatacctatgattagtattcaatatattattattactattactttatgacttggccagtgtgggtaaaagaaggagatatttcaactttttttttggcacactgttagaaaatgaaaaataaaatcgaatcatgattaatcccaactttctagcttatatagttcccgagaacttgacgttaatacatacggacatacggacagactttcaaacggacagaggaacggacggacggacaagcaggcggacatggccagagcgacttgaacagtgatcccgataaagagtatcaaataacgccttattttatatgttttataactttttcatctcacttaaaagtgacacgtgccattatttatagcaccaactgtttcatgtgcttgtcatcaacagggtcttcgcatcaccgctctagttggaatcgtcggcacttgtgtgggtgcctggatcaaggtcttctcggtggacccgtcgctcttctacgtcagcttcattggccagtcgatcgttgccctggcccaagtgtgcatcctgtcgcttcccgcgcgcttggctgcggtatggttcggtccggaccaggtgtcctcggccaccagcgtgggagtctttggcaaccaggtgagtggaacaagcataagccgcgtggccgtcgtcgtgaatgggatactgtaatgccatgtacgccgctccgacattgtcttgtgagttagtgagccgttgaatttgcattaacacagaaaaggcagtggcccgcctccgacccatttcgttagattgatgcagcaagtcgggcaaggtcaagttgggacgtgggcctagcccacttccggagcggcggaagtggcttgctcggacattttcgagccgggtgtcctgtgaatcctggccagtcaatcatgaaattgcccaaaagagttacccgaactggcgcacaagttaaacaaaagcgacaacgacagggtcgtcccgtgccacgcctcgttccgcctcaatggctcccgaatgcgggcaatgcatgcggaaggctctttgagtggattcaatttggcgcactgcatccgcatctctggccagcggcaagaggttcaatttattcagcagcgacaaacaaacgaaatgacctctccgaaattccccgagcttaagtgattgcccgaataccttcaccgtcgtcatcttccaatggggctggacaattgaaatgtcgccgttggaggagcagcagcagcaggaggaggaggctggacgaaatgggccgggctgcgctgaggtggggtgacatgcattatgcggttgcaagtgcacaactcgagatggcggccaaccgactagttgagttcttgactttcgaactgcatgagaatgggaatgaggcaattctaaaagccactgacaatttttattagccatcaacgaatttggaatgtatttggggaaagtggtttatctacttgtttccccaaattaaggacaatttgcagttgaagccattagatgcatttagcttgtttcactacaaatgcacatttagttgttttgtagcagaataagaaggtcttaaatacatttatctactagaaatggactaaaaatacaattgaatttaaatttaagatcaatataaaatacccatttgttgaatgatatatgtagcataccctaaatagttgcacatgccacagcaatgcagattggctgcactttttggtttcgacaggttatgggcttaaacaccgcaaaacaattaggtcgcttgcttagccatcaggcagcagtgtcaggtgggccggtgatgaatgacaatgccaccggggggatggaggacggaagagatgcctgggaatggggaagtggaggtagtggaggaggaggaatgtgggcaaaaggcggctgacatgggatgtggagcagtttgctctttatgttgatttacgagcgcgtcgggcaggaggactgaaagtgcaaatatggggctcaaatatccagagctggcttgcacctccacttccacttccatttccacgtgtgcacccactgacatcccggcaagacacattgcatcctaaacgcacctgtgtgtcatatttgcctttcactcgagtgcagatgaaaaggcttataatttccgtttgtcccaggtaggaagtcacaatgggatgtgacattgtgaggcaatgtgatgaggatgaggatgaggatggggatgaggacgaggacgaggatggggcgatgatgtggaacagtgggccggaaggcgaagggcttaaagccagtccgggtaatctcttgtcgaaatgccaagccgaacttgtgcccaaaaaaaaagagccttcataaaaaacgcagcgtggggccacgtaggtggcccacataccgtgtgacattgaaagcgaacgcccagccaccaccgggccaccacccactctcaatcgccttggcagccttatctggcaaggacgacgcaccacacgctcttggagcatcccgccaccccccaaatctctgatttctgactggctgagccgagctgaaacggatttggcggaggagcattgttgccagagtgctgagcaaacacagtttcttatcccgccgcctctttcatcctccaccaccacgtttgcttttttttccggatggccatgtaaacacggccggaacaagttgtgccgccaagtcgagaataacgttctccagggccgccagcgaacattccgccggattggcgaagcttccaaccctcaaaacgaggctcagacgttcgatccgtctccagccgactcaaatatttactcccgatgccatgcctgaggggggctcagactgcagcctagggtcccactcgaatgtccttttgcgttccctcgtaaatgcccaaatggccggaacaaagggtacggacaacggacggggaattggcaatggagatggagctggtgctggagatggagatgagcttctgtcatctgcctggtttatgacccaccactggaatacttttatgcaaatggctgcaattctatgaatttgctcggactcactttgcccaagtatttcaaaatcacatttctgtttcagtcggatatagcaatccaattttcattgccgaatcaagcggatttatttaaatttatcggtttcaacaaactggatccttgacatttatcgcgtaaggatttccatagcagagttatatgaaagaatttcgtgggaaatatttcacactcataacgtttgaatagccaggcaattttaattataaacatacaattttggaacgcatgattttctacctgaaaggggtttccacaaagaaaaatcccaccgccgctgctgcgtaatccgcgggaaattcttcagggaaaacccagatgaatgcgaaatattcggcttactccgataatctcgatccttgtccatggagtggaacggcaatctgctaaataaagatggcacagggaaaactgattatgtttgcgtgctccattaaatggtggggccatcccgaatcacggaccacctgcagctccggacagctcggtgtctgtttggtcacgatagtggcgaaggtcagtgggaattgagttcgctcccctgaccgccattggttctcctttgttgtgggtaaaccaaaagctattgccaaaaagaaatgctccactgggttgaattgtgtgtgcggagctgagctgctcggccggctggcattttcttttgtttgcctaaatgagaacaatcgggactcaggtgattatttttgcacaaaaagcgaggtgtttcaatttaattaaaatataaacacacgccgaaggcctttgctaattaaataatatgcaatatgcgactggattaaatgcacttggtgctttaacatcacttccgagcgcatttgattttaattttacgccactaaaagtgcttggaccgtaaatccaatttattttcccgactgtcaaatgtcagtgggccctaaataccgtcactgccgctaaaaccgatttatggccaccgaaaaaaatggttaataaaatatcattatcacctggggcgctcgactgaaggataccctataatcgattgtatactgctgaaaagatacatgtagtttgtgctcaaggttcttgtgattaaaaacgcttttatttacatcaaactgattgagcgatttacgagcatacattttgagatacggaaaatgctacttttcccgtccattacataatccacatgataccccgtcgtcggtcatgcacaaaaatcaaggaaaacaactaaaaattgcatagctcaacttttgtgcggaaaaaagtggagctgtctctgttgacccgggtgtacatacatctattttttgtcctggaacagcgccgcaaactttgacgaaaacaaaaacagagaagcaactgaggagagcagttagtggggaaaccggcataggagaagcaggagtatgcatctatccgggccaggcccaccataaatcagtttcacagttgcagcgtgaatagtcgtaacacacgtccacggtgtcggggggggggggggggggagagggtgtgttgctgagtgaaagtccggaagcggagcaaaaacagacgcggattcagagacagcggcggaaccggaaacagatttcgctttgagcaacttgcgtactatcgaacaacccgcccctctcttttcttcttgcagctgggcgtggccgtgggcttcgtgctgccacccatgctggtgcccaattcaccggatctcgagacggtgggcagtgatctgcagatgatgttctatttggtggccgggctcacctctatcctgctcgtcctgatggtgatatgtaagtttgagactttaattcacatcaatttcacaattgtacatttcaataaatatgcgaaatagcctttaagagccatcaaaatattttacacctttcgtttaatctttaaaaatgttcatatcaaatgtacaacatatcttttatacaatgtttttattgaatttaatataataaaatacttttgagtatattataagccagcccatcaaccaaatagtgaaacacttttattgttcttactgtaataattattttatttaagcaaccgattgaaccgcactctctcgctgcccgcaagcgaataatttcgattactcgataacatgcatgtgagagccattaaccaagagaacagtaatagagcgcattctctctttccatgatcctctttagcttcatcactctcacatacataaacacaactttgcatatgtgtaactttcgtatttttaacagtttcaaactaaatgcatatgccataaaccattaggtttgaacagaaagcattaaaagtgataatcccataataaatgtctacttttggcagttttccaggacaaaccacccactccgccatccgccgcccaggaggcagcccagctcttggaaagttccgaagcggagcaagtcagcttcatgcagtcgctgaagaacctgatgaccaaccggaacttcatcttcctgctcctctcgtacggcatcaatgtgggcgtcttttacgccatttccacgctcctcaatccggtacgaacatacttcgcatacttccactcgattaatgagcggctgctaatggggtcttattgctgggatctgtttccaggtggtgctgaagtattatcccggccacgaggtggacgccggacgtattgggctcagcattgtgctagccgggatgctgggctccgtggtatcgggcattgtgctggataagacgcacaagttcaagtgagtacagccgccacaagcagatttcaagggcttttccgagcgtgttcgaaactcattacgcatacgccatgtggccccgtcgaaaatgggctgcttgagaaagttttagcacagcagttgcacaacttgttattaattgaatgaggggctctcaatgcttaatgagcggtactcaatgtggttaacctccattccatccagggaaacgacgctggcggtctacgcgctgtccatggtgggcatgtggatcttcaccttcaccttggacacggggcacatcgcggtggtctacctgacggcctcgctgctggggtaagtccaatccagcaagttggtttagctactgtcttcctattggaagataaatctatgtatatcagtagaatgcaatcaaatcttaaatgttttccctgtggctcaatccctctcacagcttctttatgactggttacctgccggtgggcttcgagttcggcgccgagctgaccttcccggagccggagggcacctcctccggactgctgaacgcctccgcgcaaaccttcggcatatgctttacgctcttctactcggagctgttcaccacgttcggcgacatagccgccaacataaccatggccgtgatgctgattgtgggcaccattatcacggccatcacccagtcggatctgaggcgccagaacgcccaggtgccggccagcggacaggctggcaatccataggaaactcaggccggcacggcgaccgtcttttatgtatagtattccacgcatatcgttttactatttaatttatttagttgtttactgtacattccgttgtagccttaagtgttgaattttaaactgttcattaaaggtgcatagcaacatacacacgaacacgacacgcacacaacatgcgaatacaaacacgaacacgaatatgaatatgagtaagcttaggcaattattttttcaattttatattggccaccgattacggtttagtgcttaggttagatgaatccaaattcagcagccccgagacttgcatcgaaattcagctttatctttgcgttgccactgcactgcaacaccaactaacacaggcaagccacacagtacagacaagacaagacaagtcctgacaagactagtcaagacaagacatgttacgtatatggaaatatgcccagtattatagccctaatattctagcgaacgttgacagtttgattgctaagcggagtatccaaagcagtttgaggcagtgtatccgaatccagcgaatgccgaattaccaaacagtagctacgctgctctcgccttcgattgatgttcccccctccttccgccttctgcaacagagagtgtacataatttatatacatatataattgcattccaaacccgatccaccgagggcgctgctactgttgtacaaagcacaagtatatcctgcatatctggcaaactgtaatattttggatgttgatttacaactaacagcagattcaagtcaaaatatatacatacatatatacctatacgagaaatatatatctatacatttgatagtgttgtgaactagaggaacccacactgaacactccgccggcggcaatgcgtaatccacttttgtagatagcctttaggccgacctttaggccaagtgacaaacgcaaggaagttacaatcttccacccagagtcaattgagatggccaaggagcagacacact

SEQ ID NO: 929 - DNA, 2207 bp, DROSOPHILA
cccggcccagacgcagatcccacagtgcccgccaaaagtcggttaccctctcttcactccggatttacagctcaggtctggcaaaacgtggtggtgttccgaatgtgtcactagactcggcggcgataattcgaaaggaaaacagcaataaaccccgaatgccgaatgccctgctcgtctggcgaggcacggcactcgtaaaacaatcaaacgcctggcgagtcgcggctcttaaccagttcgcaatcatttatcactccgcgcctttggagctgaagcgcagggcactcgacgagacacggctgtttggcttactttgtcatcatcatcatcatcatcatcgtcgacttggcgaactcgagaatcagctgttggcgaacgaaccgaaagcgtagcgttttgcacatcaacattcgcgctcttaagcggagcggagcgtcgagcgtttcgaaatcagtttcagtaccactttgtccgttcgcgattgcgtgctccgtaccgtagtcttctctccggcggaacagcaccgccaccaacgccaccgccatcagctgctcggatccggacaaaagaagaagaacgtgccgaaccaaagtgtccaaaagaaccgctttcgaatatcagttttaagcaaccacgactgccccgaaggaatagagtgttatatccagccagcaactaaacggcaccaccgatcagtccgtcgcaccacctgttccagctgcgagtagcaccactttccagcacccacccactagatggacctgaagcacagtgcgggtggagctggcgagaacagcgagaccttcattgccaccagcaagtccacagacatgatcacgcccaaggagaaggagggcaaggggctgaaggtggcgggtggccataaccccccagccgaaggctacaaagtctacgcccgacgctgggcggtgctcatcctctttgtgttctactcatcctcgaatgccatgcagtggatacaatacaccatcatcaacaacataataacccgctactatggcatcagcgacaagtgggtggactggacgtccatgatttatatgatcctgtacataccgctcatattcccaggcagttggtttttggataaagtgggtcttcgcatcaccgctctagttggaatcgtcggcacttgtgtgggtgcctggatcaaggtcttctcggtggacccgtcgctcttctacgtcagcttcattggccagtcgatcgttgccctggcccaagtgtgcatcctgtcgcttcccgcgcgcttggctgcggtatggttcggtccggaccaggtgtcctcggccaccagcgtgggagtctttggcaaccagctgggcgtggccgtgggcttcgtgctgccacccatgctggtgcccaattcaccggatctcgagacggtgggcagtgatctgcagatgatgttctatttggtggccgggctcacctctatcctgctcgtcctgatggtgatatttttccaggacaaaccacccactccgccatccgccgcccaggaggcagcccagctcttggaaagttccgaagcggagcaagtcagcttcatgcagtcgctgaagaacctgatgaccaaccggaacttcatcttcctgctcctctcgtacggcatcaatgtgggcgtcttttacgccatttccacgctcctcaatccggtggtgctgaagtattatcccggccacgaggtggacgccggacgtattgggctcagcattgtgctagccgggatgctgggctccgtggtatcgggcattgtgctggataagacgcacaagttcaaggaaacgacgctggcggtctacgcgctgtccatggtgggcatgtggatcttcaccttcaccttggacacggggcacatcgcggtggtctacctgacggcctcgctgctgggcttctttatgactggttacctgccggtgggcttcgagttcggcgccgagctgaccttcccggagccggagggcacctcctccggactgctgaacgcctccgcgcaaaccttcggcatatgctttacgctcttctactcggagctgttcaccacgttcggcgacatagccgccaacataaccatggccgtgatgctgattgtgggcaccattatcacggccatcacccagtcggatctgaggcgccagaacgcccaggtgccggccagcggacaggctggcaatccatag

SEQ ID NO: 930 - protein, 482 aa, DROSOPHILA
MDLKHSAGGAGENSETFIATSKSTDMITPKEKEGKGLKVAGGHNPPAEGYKVYARRWAVLILFVFYSSSNAMQWIQYTIINNIITRYYGISDKWVDWTSMIYMILYIPLIFPGSWFLDKVGLRITALVGIVGTCVGAWIKVFSVDPSLFYVSFIGQSIVALAQVCILSLPARLAAVWFGPDQVSSATSVGVFGNQLGVAVGFVLPPMLVPNSPDLETVGSDLQMMFYLVAGLTSILLVLMVIFFQDKPPTPPSAAQEAAQLLESSEAEQVSFMQSLKNLMTNRNFIFLLLSYGINVGVFYAISTLLNPVVLKYYPGHEVDAGRIGLSIVLAGMLGSVVSGIVLDKTHKFKETTLAVYALSMVGMWIFTFTLDTGHIAVVYLTASLLGFFMTGYLPVGFEFGAELTFPEPEGTSSGLLNASAQTFGICFTLFYSELFTTFGDIAANITMAVMLIVGTIITAITQSDLRRQNAQVPASGQAGNP

SEQ ID NO: 931 - DNA, 3459 bp, DROSOPHILA
gcggaaactttcgaaagaaagtgggatggttaacgcccaagagatgtgattatgttgattccgaacgatcagaataattgtaatacttgctcgctaattgttatataaattaggctttttgataacatcttttagtatctatgtactgcaaagtgtcgtggtgattattgttaggtaacttttataggatgtttctgtttaatctaagaattgcagagatagggtgagatgtttacacattttgggagtttaagatagctaactaaaattatagttgttttctttaaattaatgtccgatattacttacaccagaacatgtggtgacgatggcgtcgagtacgtccctcaaactccattagctcccggccgagattttcccatgtgtcctccacttggttatccaattgcgccggagcctcctcgttcttcgtctcctcgcaaaacaccagcgtgaagtagacgacaaggagcacagctccgtaccaaatggtgttcttgtgcatgattgtttagcgttgtagcggtgtaaagagcaaaagctggtatccctgtggctttggttggtcactgcagaaccgaatgatgcagctcgaagccgggtagccggcttatataccaccggctatcggtgatccgctccaagttcagagtgataattgaagcgtcgttgttgtggctttgcgcgcagattttcacacatgcgtattgcccgcgatgacgagtttaatgcccaagacatgcatttgaaatttctttaaactagtgcaatttcactttcataagtcgtgcccgcgtttctagccacttttgtctttggttcaattagtatccattacgaaatatgagcctacatgtaaggtaattgacaattggcgattttcccagaaccgttttcaaaagttatgtaaaaccccgccaaatcgaaccggttaaaaaagttcttgcgggctatcggacaagttgagcatatatcgatctagaacttccatctctaattaaatattgtaaacatttgttgacgttattggttttgtaaataaatgcatcttacttaaaggatgtccagcttaaagtcaaacgatgtggacaccaatcccgcgccggatccccaggcgcccattacccggaagggcttcctaatgtcgcttaacaccggaacacccatgccgattcccgagcagaatctggtaaattagtttccttgtagctaatcttcatcagaacatttgatttatgcgaatatctcagtttggccgctgtcgtcctgtctccgaattcgagaaactgaaccgcgttggcgagggcagctatggaattgtctgtaagtttggttccatatgcatttaacgcattcggttaacctgaaatcccctgcagatcgcgcacgtgacactcgtagcaatgagattgtggccttaaagaaggtccgcatggatcaggaaaaggatggtctgccaattagtggactccgcgagatcatgatcctaaagcagtgccatcatgagaatattgtccgcttgcgtgaggtggtggtgggcaaaagcttggacagcatcttcctggtaatggatttctgcgagcaggacctagcctccgtgctagacaacatgtcgcagcccttcaccgagtccgaggttaagtgcatcaccttgcaggtgcttaaagccttgaaatatctccattcgcgctttatgatccatagggatctaaaggtatccaatctgctgatgaccgacaagggctgcattaaagttggtaagaagataatctatatttaatcccgatatcggctaatatccattccccagctgattttggactggcccgcatgtttagcaatcccccgaaaccaatgactccacagatggttactttgtggtaccgggcacctgaacttcttttgggatgccgaacacacaccacggcggtggatatgtgggcttttggctgcattcttggtgagctgctgctcggaaaacctttgctgccgggtaattcggagatagcacagctggacatgatcatcgatctcttgggagctccatcggagtccatttggcctggctttgccgatctgcccgctgtacaaaattttaccttaagtcagcagccctacaataaccttacgccgaagtttcacatgattggccaatcaggcaggaatctcctgaacattttgtttatctataacccaaaaacgagagccacggccgaagagtgcctgaaaagcaagtactttgtcgatccgccgcagggtgagttggaatttctattgcgacaaagaaaattttcaagtgactaaaccattttccacttttagcttgtgacccgggcatgatgcccactttccctcagcacaggaacaatgctgcacctgctccagctgtccagcctcccgccgacattcccatctcggatttactcaatgtatttattaagcgtcaacgcatggagtaaatgagaacgaatttatttgaacattatgcaatgcactgggtggaaaactataggtacggccggtccatcggcgtttgcttggccttcctgtcgcgggcgcgtggaaaccagcggtgtttagtcgtgtgggtcagctgcatcagctcctggcgagccacttctggatgtttgcttttaaaggcacgcatcgccgtcttcagagccgattccttaaccaccgccgagctctgaatctcgctgatctctggcagcggcagggtgttctcgtagggaactggtgtgtccggatgccaggccacaatggtgcgaccatttttggtcactgccacggcctccaccaggctcttgccaccgacggcattgcgctgcacggcactcgaggaaaataaacgaaatcctccgtataaacgtgccgctgacattttcacaattagagatgaaccgataactgaacagctggaatgttatcgttctaattaatgggcagtgatgcaacattagctacttggataaaaatagctaatacgtcaaaaagaaaactgaaaccatttgtatgcttactctgtaatggttaggcaaaaaaggctaatatacagttacaaaatatacatttatcgatttctttccaataaaaacatcgatagcccaaaaaatcgatgtttcgtcacctctgttaagtactcgataccaggagcttatcacttgccgtcacagctgattttcatttaaaaataaacattcccgttgaaatgtggattgcttacgccctggtggtccacgtactgcttctaggctcaattttcgtgatctactttcgttcgccggtgatcacgggccttactccacagaagcatcttttatattacggcttggagccaccggcgaatcgtttagtgctgatcgtgaccgatggattccgtgccgactccttctttgaggagaactgccgctatgtgcccaacctgcgcaagatcttcttgcgggagggcgtcgtgggcgt

SEQ ID NO: 932 - DNA, 1224 bp, DROSOPHILA
aatattgtaaacatttgttgacgttattggttttgtaaataaatgcatcttacttaaaggatgtccagcttaaagtcaaacgatgtggacaccaatcccgcgccggatccccaggcgcccattacccggaagggcttcctaatgtcgcttaacaccggaacacccatgccgattcccgagcagaatctgtttggccgctgtcgtcctgtctccgaattcgagaaactgaaccgcgttggcgagggcagctatggaattgtctatcgcgcacgtgacactcgtagcaatgagattgtggccttaaagaaggtccgcatggatcaggaaaaggatggtctgccaattagtggactccgcgagatcatgatcctaaagcagtgccatcatgagaatattgtccgcttgcgtgaggtggtggtgggcaaaagcttggacagcatcttcctggtaatggatttctgcgagcaggacctagcctccgtgctagacaacatgtcgcagcccttcaccgagtccgaggttaagtgcatcaccttgcaggtgcttaaagccttgaaatatctccattcgcgctttatgatccatagggatctaaaggtatccaatctgctgatgaccgacaagggctgcattaaagttgctgattttggactggcccgcatgtttagcaatcccccgaaaccaatgactccacagatggttactttgtggtaccgggcacctgaacttcttttgggatgccgaacacacaccacggcggtggatatgtgggcttttggctgcattcttggtgagctgctgctcggaaaacctttgctgccgggtaattcggagatagcacagctggacatgatcatcgatctcttgggagctccatcggagtccatttggcctggctttgccgatctgcccgctgtacaaaattttaccttaagtcagcagccctacaataaccttacgccgaagtttcacatgattggccaatcaggcaggaatctcctgaacattttgtttatctataacccaaaaacgagagccacggccgaagagtgcctgaaaagcaagtactttgtcgatccgccgcaggcttgtgacccgggcatgatgcccactttccctcagcacaggaacaatgctgcacctgctccagctgtccagcctcccgccgacattcccatctcggatttactcaatgtatttattaagcgtcaacgcatggagtaa

SEQ ID NO: 933 - protein, 387 aa, DROSOPHILA
MSSLKSNDVDTNPAPDPQAPITRKGFLMSLNTGTPMPIPEQNLFGRCRPVSEFEKLNRVGEGSYGIVYRARDTRSNEIVALKKVRMDQEKDGLPISGLREIMILKQCHHENIVRLREVVVGKSLDSIFLVMDFCEQDLASVLDNMSQPFTESEVKCITLQVLKALKYLHSRFMIHRDLKVSNLLMTDKGCIKVADFGLARMFSNPPKPMTPQMVTLWYRAPELLLGCRTHTTAVDMWAFGCILGELLLGKPLLPGNSEIAQLDMIIDLLGAPSESIWPGFADLPAVQNFTLSQQPYNNLTPKFHMIGQSGRNLLNILFIYNPKTRATAEECLKSKYFVDPPQACDPGMMPTFPQHRNNAAPAPAVQPPADIPISDLLNVFIKRQRME

SEQ ID NO: 934 - DNA, 3186 bp, DROSOPHILA
gcatccccgccggatgcggaggtggcggaggagcttggaacgctgcactcgacgagcggaaatttgctggcattgctgatgccaagggcgcgactgcgctgttccgccttctcgagcatgtgctgcaagggaaaatgggaaatagcagtgaaaatccgcgggtgccttcactaacaccagtgcaatcaccagacaaagggctttgctgtgtgcgaattggcctcgtacctgagtaaacgggtccattgttgttgctgcagctgcaaatgcaaatgcgagttgtgattgcgcgcactatgctattgaattcactgtactgctcgacactccacgttggcgatatttgatgtttgtttttcactggcgggttgcgcgtccgtttgcattcgaaattctgcgcgtcgcttctgctcgtttcggcggttggcttttcagatgtgttgaataatttcaaaacgacgcgcaaatgccataggaccctcaactgaccacgacgaaataccgaaattggggagaaaatgccagtggtgagttgccaagggctgccactttgtcgtatttggcagggtggcagctctgtcgcacatcaatggttaaaccggttcaccaatcacacatatttaccggtttaatttcggccgacagctgtttatttttcttaaagcgttatcaaaaagggtttttattgatgttataatatgaatatccaaccgtaatttaccacgtatcactttcaatatttatcacgcatagctggtaagttaagaacctggaattaggcttgaaatgcacctttgatttctctggtgagctgcacacgttgtgccgtcagtgctgtatgttttggctagaattttggcatgtttcctctatttaggctacctctttaagtttggcttttctgttggggtttcgttaattaatgtaggaaaacatttctggaaataattacgcttaaatatatagaatttgttttttcagtaaattgtcagcgtccgccatgagtgaccaaaaaacagtaaatttgctgtggaactgtgcctccaagctgaccgaccaaacccacacagaacggatcctcaaatcctattacatgtgagatccgttgtcaattccttaagcacccactaaaatttcgtttccaaaacaacccagaaccacctgtaggaagctggcccggcacaatgtccagttgcccgaggagagctttggacccgcacgcatgtgctcccgctgcgggaaccagtggacaggtggccgctaccagctccacctccagccacaagaactgatgcagagtgctaagaaccggagactgatcaccaagctggaagccgtgaagggcaagatggcaaagggcgagatgaacagcggggccaggaaacgggccaagtggctcaagaagcgtatggccagtaacatggtgagaaccaggagctaatagaatgtctagaatatgtctagattgtgggaaaaaatacttttatttctttaatttcataaatataaatataatatctctttgcttccatggatgaatggtatagatggatagtttagtaccttataagcgcaatataaatttatgtatcaagcttctgggcaaataataatttaaattaacaccaaggaagctgaaagatctttatacagtgttttgtgtgtgtacatatggacccattcctgccactctaaccacaacccaattcattttgcaggccgtggactgcgatgtttgccatcacaagacaatgttggctctggagaagagccgaaagcgcgccaaagtaaaagccacggaggagacaatggtagtcacacaacctgcgccagcgggccaaaacaaaaagaaggccaaaacgaagaagtctcaggcgccgaataaagatatcaatgcaggcctgaaaatgcagcaaaaagcgcctcagcgacagcagcagccttcgaaatcgccagctccatccaaaaacgcgtcccaaccagtcggcatagcttcccaaaacccaagtcagacatcgaagaagaaaaagaagaagcctgcccagccagcgcccaccgcaccaaaaacgcagtccaaaacccagaagcagaacgtactgctgcaaatagctgcccagctgaagtcgaacgcgtttaaagacgccagcaaaacgcagcagaatcgcctccaagcgttcctcaagtagcggccagaagacagctccggccatgcattaaagtacaaagaatgaaaatacttgttgtggcacataattaagcgttagcacaatactagaatcagactctttgtgccgcttgataaagccagccgaggtgggaacctgttatccactcgcccggtcttctgggtcgaatcacgcaacggctatgcacttatcactgctgccggagacaagtccaggcggggggacccaaggttgtccagatattgcgcagccaacctggtcagcatgcttaatttatttctcggagcgcaacgtttaattaaaattgagttgtttgcctcagcatcccatgaacgcgtccttcaaaactgctgcccaaaaagggcagccgatcggctctggacgggccgctttatctgccgccgattgtgaagagcacacgcacaggagaaggctccagactcggcttcgacccatggccctctgcttacccctttctgtgccgaagactcggatttctcggcagctgcggcaacaacatctgcctgccacattagaagatttctggttccacagactagccactcggcacgaacatcttgtatgcatgcacatgcagaatgaggaaaaaaaagtttaccttagggaaataatgccattttaaggacagttacttaatattaagaaaatgtgatatacaaacataaattgtaatagagagtcttgaaattataatacaaatatgtacaattattcgcaatgtttatattgttgtaaacaataatattctgtaattaaatatctgagaaaggggagccagaacttcgactatcgagcgtacattgtgcgcaacaatgtatttgatggcagattgagcacctttaagtcgttctacttatgggagcccgaccgtagtgtagcggcctgttttgccattgccaaaatgggcatgatgctctctaaaatatgatatcagcagcgtgatcgtctctccaaatgtggcaagagcggtacaattttc

SEQ ID NO: 935 - DNA, 831 bp, DROSOPHILA
atgagtgaccaaaaaacagtaaatttgctgtggaactgtgcctccaagctgaccgaccaaacccacacagaacggatcctcaaatcctattacataaccacctgtaggaagctggcccggcacaatgtccagttgcccgaggagagctttggacccgcacgcatgtgctcccgctgcgggaaccagtggacaggtggccgctaccagctccacctccagccacaagaactgatgcagagtgctaagaaccggagactgatcaccaagctggaagccgtgaagggcaagatggcaaagggcgagatgaacagcggggccaggaaacgggccaagtggctcaagaagcgtatggccagtaacatggccgtggactgcgatgtttgccatcacaagacaatgttggctctggagaagagccgaaagcgcgccaaagtaaaagccacggaggagacaatggtagtcacacaacctgcgccagcgggccaaaacaaaaagaaggccaaaacgaagaagtctcaggcgccgaataaagatatcaatgcaggcctgaaaatgcagcaaaaagcgcctcagcgacagcagcagccttcgaaatcgccagctccatccaaaaacgcgtcccaaccagtcggcatagcttcccaaaacccaagtcagacatcgaagaagaaaaagaagaagcctgcccagccagcgcccaccgcaccaaaaacgcagtccaaaacccagaagcagaacgtactgctgcaaatagctgcccagctgaagtcgaacgcgtttaaagacgccagcaaaacgcagcagaatcgcctccaagcgttcctcaagtag

SEQ ID NO: 936 - protein, 276 aa, DROSOPHILA
MSDQKTVNLLWNCASKLTDQTHTERILKSYYITTCRKLARHNVQLPEESFGPARMCSRCGNQWTGGRYQLHLQPQELMQSAKNRRLITKLEAVKGKMAKGEMNSGARKRAKWLKKRMASNMAVDCDVCHHKTMLALEKSRKRAKVKATEETMVVTQPAPAGQNKKKAKTKKSQAPNKDINAGLKMQQKAPQRQQQPSKSPAPSKNASQPVGIASQNPSQTSKKKKKKPAQPAPTAPKTQSKTQKQNVLLQIAAQLKSNAFKDASKTQQNRLQAFLK

SEQ ID NO: 937 - DNA, 4782 bp, DROSOPHILA
cgatatcttgacattcattcatatgtacgttcggatagatggatggaaatggccagatcgactcggttattgatgctaatagcgaatatatatactttttagggtcggaaaagtttacttttccctataatatatattttttaggaaatcaatcactctacttggccagatcgacttggctattaatcctgatcaaaaatatatatttatatatttgattatatggtcggaaacgcttccgtctgcctgttgcatacttttcaacgacttcagaataatttagcaatgatttatactttcacctctctttttcctatcaacgtttggtatgcgatcctattagattttggattacctttcagttagttagcgattttaagttcttcgccttcacacgtccccctgtgcttcgtcactacgccgattgccgaccacagtgatttgctagggaaaagtatagcattaacttttttttaatttaaatgtgtgagttatttttatttgcagttgtataaaaatattttgcctattaatagaaatgatattccaagagttgtataagttaaatttctcaaaaataattataaaacatcaaattatgttatacaaaaattttgttggtttttaaaatacttaaataatgtaaaacgtgaataaatgtcttttttatatgtaatcaagtaattttaattttcaattacataatgtgcacagcaaattgattaattagcgaaatctttcgcggataaggcaatatttatgaacaactttaggtaagtcgcaattggtgacaatacttcgttatctcctagatatttgacgccttgtgacagatttcagtgaggagctccaacacaataattttagttgggactagtaaatgattaattcaactagaaatatctataaatttaagtatgcctttgtggggtacacgtgtgttagttaaaaatatatgtataaatagaaagcatgagttgctattcgcagtgagcattatttaacttccgttgctaacgctaggattagcacaactatcgccaattattcccggcacgtccgggtcggcatcaacatttatgggattcaatttggccgctgcggtcatagcctcgcgacgctgacgtttcatctctagaagcagttttctctgggcctccctctttaaagctgctgccgagttaggtgggggaggtgccgagccattcacacgaacgctggatgcctttccgactgttttcacttgcgaaacaccgacttttgacggctttattgtcttagttggtatggtgtgcaaatcgggttggtcagcgacggactgtgcttttaccttccagtcgttacttttgagtttctctatatcagcaaaaatagaatccacgtgctccacctgcaaataaaccatatcccagaatccttgtaaatcatccagagttgttggaaacttatcctctggtgagcgattcagattattgtggcaaagacctaaaatattaatgttagtaacaagtgatttaatgctttgcaatacgcgtaccctcgaattgtttcattttctgcgataccaagagacgggccttacccgacgctgatcgcagtagcccaaaggtatcttcggagatatctggatttgtctgtagagttcagtgtcgaaaataataataaaaacaattgagattttaatcactatttagatcacttacagacaaggcgtctgcatatttttcagcaagagcggctagcaccaagagacggctttgttcctcttttagtattttcagaaagaaatttccatccttaacaacagcttcaacagaaatattggaagtgctgatgtattcctctgaggctagtttgtccatttttgtggattcgtggtctacttcatctgtgggaccatggtctggacttgactcgttatctacaagcagtacatcaggagccatgcaagatcgaggagcacccctttttggtgacacagtaggcaactgggcgcggaactcttgactaaggtgcctaaacacgggcaggtcaagatctccgttaagccctggagaatgcaacggctcgtctatcctcgccgttgtactctgagaacacttcttctgcattttttttcgaaactccccatagtctttactgggggagagctgcttgaatttccgagccagttcggagccttgtagagagtcgatctccacctgccccctttccgatcgccctgcagcattcgatggtgactggccgtgctttttggggctgtagaaaccctgggctaatgcacccggcccgtaaagtcgctccacccgttgcttgataaaactgccatttccattgctgtgaccagaacccgaactaaaattcccgctactgtcgttgctgttgttgttaggctcgatgggtttgcacttggtggccggagaaggcatgctgtgcagagttggtgtcgctagaaagtggttgcgtttgcagtactgtagactgctggtggagggacgaatcggggaaacctcacgtgacttgtttatgtcctgccgaatcttggagtcgtaggtggtaaggttggaataaccgttgacgcagcaagccaggtttaaatagctgggcttcttttcgggagcttcttgtgaattttctgcagaagtctcgtcaaaatcattggagctcggctcttggtcgcactccacaattgcaggtgacagcaccatgtgctccagctctgacgacctggattcaacgtaggcaggggttttgtgctgaggctggggaggcaagttaggcacacagcgctcccgaaggttggcagtaaattcgcgtgttatgtcccttactgagaccggcgttggaaagttcaggctcccactggtatctgcaattcggggaaatcaacccgatgtaatccacagatgggttgcaaggcgattgaagttggttatatgtatatccacataaatatccatataaatatttacctgatatatcggaggagtcggcgtctacatccagtgaacagctgccaatagagtccagactgcgatccatgaaaactgagcctgttgtataaaaagcattgggcttagttattcatgcaatttacaattcttaaccgtaattagccgttagtggttgacctccaaaaggaataaacacgaataaactgataacgcccacgtctgacttggttttaatgtggaaattgagcattcagagaatcgaaagagcctgacaggtaatttttatttatcttattcggaacccaaaacataatgattcagatctcctctatctctccaatcagatccatatattttgaaacaccagtcaaattcaataatataagcagcgcactacgccttctaagttaagcctgtgaatgtgtaagtgtaagcttagcagatgggaacagctttaacggcactttgaaagttccgctttgctggcttttctttgatgcttcgcccagttcccgtactttttccctcccatggccccgtgtagaattcattatggcaccaacaaacgacacacaactatttataattcggtgagatgaaaaacatgatgatgtcggtggcgttcgaagtttaaagaacacaactcctttgggtaataacacacacacgcacttcgatctattttggtctcataacacaacgtgaagactgcgcagcttgagcgtatagaaatccaagctaatacgtgccaagtgaagccttcaataatccaatttacttattcctgaaaaccaataaaaactgatcggtgaacagcggttgtgttgccatgacctggacattaaaaacgccatttcgccgaccgcttcgcattttaagattaaatagtgcatggtatttttaggacaagtgttaaggtaacggcgataagattctgttaaaagtgaaactgtgaaaatgtaacacaggggtgcttgaaaactatctatatgctttgacaagacagtccgtcagttcgtttcaatgcttattaatcgcaattttaaagcaatttgcatcaagctttcatgtaagccaaaccgagccggtccgatattatatccatggaaaaaataagatgaagaaaatgtaaatttgttgttcgtgatcatgatgtgacaaatatcggacatgcattcggcatacgtaatatttttttcgaattcgatttaggcaaaatttttggatttcgttaaaaaaaaggatttaaatttgcaatttatttttttgaagccacgagaaggcagaaattgttatttacattcaacagtaaacaactgatttagctgttttccagacgatagcgctgcaatctttttcacagtcttaattgcggttcttccgaattactagttctctttgaccatttgcgtaaatatattaaataacattatttaaaatcaactcttttggccatcctttaaattaaataaagaactcttttatatttgataagtatttatacctgcttatacctgattttaaaattgtttaaaagtgtgggcgtgaccgttttgcgcgtttcgtaggcgaaaagatggcgtggccagttttttggtatataaataaaaaatgaaaaaacaaaaaataaaacgaagaaaaatctaaactttttttgtgggcgtggcagttttgggaggctatgggcgttagagtggacgtgccaaaaagtttttgggaaatcgataaaaagttacatgactaatagttacgaaaaaatatccaaaagtttttcaaaaatgtggtcgtcgcagttttgggcggttttgcggcgttagagtttgcgtgg

SEQ ID NO: 938 - DNA, 1908 bp, DROSOPHILA
gcaacacaaccgctgttcaccgatcagtttttattggttttcaggaataagtaaattggattattgaaggcttcacttggctcagttttcatggatcgcagtctggactctattggcagctgttcactggatgtagacgccgactcctccgatatatcagataccagtgggagcctgaactttccaacgccggtctcagtaagggacataacacgcgaatttactgccaaccttcgggagcgctgtgtgcctaacttgcctccccagcctcagcacaaaacccctgcctacgttgaatccaggtcgtcagagctggagcacatggtgctgtcacctgcaattgtggagtgcgaccaagagccgagctccaatgattttgacgagacttctgcagaaaattcacaagaagctcccgaaaagaagcccagctatttaaacctggcttgctgcgtcaacggttattccaaccttaccacctacgactccaagattcggcaggacataaacaagtcacgtgaggtttccccgattcgtccctccaccagcagtctacagtactgcaaacgcaaccactttctagcgacaccaactctgcacagcatgccttctccggccaccaagtgcaaacccatcgagcctaacaacaacagcaacgacagtagcgggaattttagttcgggttctggtcacagcaatggaaatggcagttttatcaagcaacgggtggagcgactttacgggccgggtgcattagcccagggtttctacagccccaaaaagcacggccagtcaccatcgaatgctgcagggcgatcggaaagggggcaggtggagatcgactctctacaaggctccgaactggctcggaaattcaagcagctctcccccagtaaagactatggggagtttcgaaaaaaaatgcagaagaagtgttctcagagtacaacggcgaggatagacgagccgttgcattctccagggcttaacggagatcttgacctgcccgtgtttaggcaccttagtcaagagttccgcgcccagttgcctactgtgtcaccaaaaaggggtgctcctcgatcttgcatggctcctgatgtactgcttgtagataacgagtcaagtccagaccatggtcccacagatgaagtagaccacgaatccacaaaaatggacaaactagcctcagaggaatacatcagcacttccaatatttctgttgaagctgttgttaaggatggaaatttctttctgaaaatactaaaagaggaacaaagccgtctcttggtgctagccgctcttgctgaaaaatatgcagacgccttgtctacaaatccagatatctccgaagatacctttgggctactgcgatcagcgtcgggtaaggcccgtctcttggtatcgcagaaaatgaaacaattcgagggtctttgccacaataatctgaatcgctcaccagaggataagtttccaacaactctggatgatttacaaggattctgggatatggtttatttgcaggtggagcacgtggattctatttttgctgatatagagaaactcaaaagtaacgactggaaggtaaaagcacagtccgtcgctgaccaacccgatttgcacaccataccaactaagacaataaagccgtcaaaagtcggtgtttcgcaagtgaaaacagtcggaaaggcatccagcgttcgtgtgaatggctcggcacctcccccacctaactcggcagcagctttaaagagggaggcccagagaaaactgcttctagagatgaaacgtcagcgtcgcgaggctatgaccgcagcggccaaattgaatcccataaatgttgatgccgacccggacgtgccgggaataattggcgatagttgtgctaatcctagcgttagcaacggaagttaa

SEQ ID NO: 939 - protein, 605 aa, DROSOPHILA
MDRSLDSIGSCSLDVDADSSDISDTSGSLNFPTPVSVRDITREFTANLRERCVPNLPPQPQHKTPAYVESRSSELEHMVLSPAIVECDQEPSSNDFDETSAENSQEAPEKKPSYLNLACCVNGYSNLTTYDSKIRQDINKSREVSPIRPSTSSLQYCKRNHFLATPTLHSMPSPATKCKPIEPNNNSNDSSGNFSSGSGHSNGNGSFIKQRVERLYGPGALAQGFYSPKKHGQSPSNAAGRSERGQVEIDSLQGSELARKFKQLSPSKDYGEFRKKMQKKCSQSTTARIDEPLHSPGLNGDLDLPVFRHLSQEFRAQLPTVSPKRGAPRSCMAPDVLLVDNESSPDHGPTDEVDHESTKMDKLASEEYISTSNISVEAVVKDGNFFLKILKEEQSRLLVLAALAEKYADALSTNPDISEDTFGLLRSASGKARLLVSQKMKQFEGLCHNNLNRSPEDKFPTTLDDLQGFWDMVYLQVEHVDSIFADIEKLKSNDWKVKAQSVADQPDLHTIPTKTIKPSKVGVSQVKTVGKASSVRVNGSAPPPPNSAAALKREAQRKLLLEMKRQRREAMTAAAKLNPINVDADPDVPGIIGDSCANPSVSNGS

SEQ ID NO: 940 - DNA, 8568 bp, DROSOPHILA
gcttcgacccatggccctctgcttacccctttctgtgccgaagactcggatttctcggcagctgcggcaacaacatctgcctgccacattagaagatttctggttccacagactagccactcggcacgaacatcttgtatgcatgcacatgcagaatgaggaaaaaaaagtttaccttagggaaataatgccattttaaggacagttacttaatattaagaaaatgtgatatacaaacataaattgtaatagagagtcttgaaattataatacaaatatgtacaattattcgcaatgtttatattgttgtaaacaataatattctgtaattaaatatctgagaaaggggagccagaacttcgactatcgagcgtacattgtgcgcaacaatgtatttgatggcagattgagcacctttaagtcgttctacttatgggagcccgaccgtagtgtagcggcctgttttgccattgccaaaatgggcatgatgctctctaaaatatgatatcagcagcgtgatcgtctctccaaatgtggcaagagcggtacaattttcgggtgcctactccaggatggggtatccgaatgggacatgccgcttgggcgtgggcatccaactccgccaagccggccggctatttattccaccgaaaaagcaaagcaaagtcgtataatatttcactgcaacactaaaaaagtcatctaaattttgatagaagttggtcatataaatcgcactacttcttagcgaaccttcttagaatggttaacataatcgtaggctgtttaaacttgtcttatagttatgaatgagtaatttctttagaattgaaattttgcgtaccgaatttaagttcaattttttcgcgccgtgcagagagagagagatccaaagccgagggcacttcggctgcgttcgggtggccatcggctggcggcggcccaagctggcgctcctagagcggacgagctccaagtcgggcagttaagctcgagtgattcatggtggcgcaacagccggaaagtcgcgctcgcttcttggctccggcggtgaacagttcgcccgcgagcgaaaaggtgtcaacgtagtcagaacgcagtggaaaaccggatgcaagaccgaaatcggtgcgtggatgcatttcgtaattcgttattgggggctcctcggcagcaggaagccggccattcggggggatcggaaatgaccggaagtgcgcaaggagcgcgcggcggagtggggagtgcgttggcgatggcgatggcagtggcagtggggtgtcggacacgcctgcgcacaggtttccattgagtttcggggccggaaaagtctcgcgcggcgaagccagctggccaacagtttgtttggcttttccgcggaacgacagccagttgggagctcgccattcgattcgattatccattgcaaacaaaggtgtcgcggtctccagttgcaaatgttctgaatcaataaatatactatatatgtgtacatattttcaacggctggcacaaaggaagcaaatacttcggccgctcggtgcaaatcaaattacatttctgttttatggtcacgataaaaaataaagaaccgaaaagtaaaagctgtctctggacacgtagaaatggcagcgggtgtatatagtgaggcccagagaaatggtcagcagttcgcttgtacagtagaacatggccataaagttcgagaaactctctgactgactatctatctatctatctatcaatcaacctaactgacaataacgttctgaaatatagaagttatttcaatatttgcacactaataagttgggtattcaaatcggtcagtttgagatatttttctttgtagcagagacaattttgggtaagcagaagtgcgagagtatttgcatcttctcgccggacagacggtcgcttctttgtggcgacacgcgtcgcccacagatgagtcacaattaaagggcttggccccaaacaaggggccccgtcgcaggcacaggtccccagtttcaagtcccgggtccgagctcctctgcgtgtggccgcccgatttgtatgcggttcttggccacagcacagtggtaaccgcaaatgacaggcacgccagaggagtgaaaactgaaaattataaacaaaaacggagacacccgacaagtgcagaggcccaataaatggggatgtcgtaatgacacttaatggcaagcacacactgtttccccatcagcgaatccagatactctagccgccagatacccagagatacataacgtcatcgcttgattttcattttccatggggcgccaaacgaagcgtgcaaccgaaaaggcgaaaagagcagacaatagtaaaaacgaaatatagagaatagagcgcaatagagattgcattgtatctgaatgtctgaatgtctggaaatctggttgtctggatgtctaggtatctggatatccgtgctgctgcatcgatgtcccagctatttataggtcgactcctcagcgggggaggtagttgccgtggcacggcagcatcgagcatctgatagcccgggaatgggtatatgcgtgtaccttcagtagcactccggtcgcaatccgttccgcgctccactcccgtcatcgcaatcgaagatagtgcatccgatcggttctgctgtgcatgtgatctaataaaaatacaaatgtgttatcccattttgacagcaaactgttaatttctaaggcaaaacgccgtgtggtgtgcagttggtggatatgccagatacagatacagatgactattccgatccagatcgcaaagaagccacaataaagcccgggcgagaaatcaagcgttcggccggccaaacaacaactagcactcaacgcacattaacgcaaatcgcctcaaattaacactgaacactaaaatcggaatacaaaagtgcggatacaatactatttagaagccatgaatccgaaaccaacaactaccaagctggccgaaattgagcagtttttgttgggtaagccaggtttttctcaaagaatcggtcttgggtgttaatagtataagtagctatttatcagcacataaaagtgcttatgagatactcgtatttgtttaagacaactatttaaaagcggttggaaagcagcaaaataatccttggtttacaatagccaatctcatatttcttcaaaacttatttttatgatttttttttttttttttttttttttttgtttccatcgatagtgttcctatctcataaagaaaattctacttatggcatacctatttttctgcgtgtagctaaaatcagcaaagcaaaattgaagccagttagtgtgagatagatcaacagaaactttgttaatttcgccaggcaaacagcgccatcaaaaaattacacaccgactcaaagttgagaagagatggaggaggaggaggcggaagaggaggacgaggaggaggaggcgatccaaaacataaccattaacaataacccagtgccggagtattagtattgactcattccgcaggcgcccgagcttaatactcttttgttcttcttttggcctgtgaccagaccatcggactcttctggatattttagtggccctcctcctcttcctcctccttcgcctcgcgcgtatttcgtacactttatcgagtcccaattgggctcctctttggagcgctgttcccccgaatcgtttatatatatgtacatatatatatttgtggttatttcgttaaatcattctacatgtgtatgtggacgagaaagacaataaacagcggattggacatgccgcagaactaagccttaagcgctcttttagcccatcttggaccttccctagtcggttccactttctcgggtctcggttcagtggctctcagggcatgatcaggggaatagaggagcacgtacatatatgtatgtatatccaccctcctccgatgactgttgcttcaatttatatttgtttgtgtatgcctcacattgatacatatatcgtacaaatgagtttctgaggagtttcccaacgatcctgattaagacacaattatcaacttagcagttggtttctgcaacacatattacagcgagacaagcttattgataacaaatatacatacttataatgttttataggataaacttcttcattattatcccattttaaattggttagtttgcacctagtaatctttcctctgctgtagacttaaaggccaaagtcagagtgctgatttggcatacagatcaaacaaattatacttttaatgcccttttccctaattcatttggttggaaagatatgcactgtcaagatccccaattatccatagtttgggagcaaaaagttgcctttgcacgaaacgttttaactgaacggttaagttaagtcttgtttccacttccttaaaaaaaaaattatcgctcctaactatatataataagaatttggcttcaagctgaaactattatttgtccaaggcgtttttaacaattaaatgatggaaagttgccaaaaaaaactccaagtgaccaagctcttctggttaagatctcaaattcttaagggcatttccagttcgcatttcgccagcacgacttttggatatttttcttatttccatatttggacatattacttttaagagcagttcaccggagctttgcgtgcttgagttttaacaagatttcgggcaaatttcagcgtcttctggttttctgtggatgtgggcatttctggacagagggtggggtaacagacaccagagttaactttcttggtcagtgaaattatttttaattgccccggtcaattcgcagttgactcttgagcaagagcttatgaggtcacttatgtacatgtacatgtacatacccacatgcgtttgtgaccgtacttctggctgggaacggtagagccagtgagtcacggctgcagaagtcggagcagaagaggcaccaccactccactggcccactaattgcccgcccaagaaagctactctgttgctcaactgccccgccattaggctcaatgatgcgtttaaaaataatagccgatggggccgccgccttatttagccagctgaagagcttacgatcctcccctctgcttgctttcagatgtccgcgcccacttccgagcctcgctggagacctcggagtacgagaacacctcgaacctattccatgtgacggccgccgagcagaccgccgctcttctggcccgctgcgaaatcctgctggctgcagccagttctgcatcgggatcgggatcgggactggaactgggatcagggctgggatgcgcagacgagcaggcggcagctaaccatcgttccagcctggtcgactgtgtcgatagcaaggtgggcgcggagaccggtcccagcggttatctggagatgcttgcctccccgtcaccctcgaaaagctcacgtgagtgctgaacactactcatacatattacatacagtcatgcttccctaactgaaatccaaataaaccatgctaaagtatactggtaacttttgtaagctctacaattatgtatttatatttaaaaaaaaacggtacattgttgaaagagacttaaaccagcataatggttgcaaagcggatagccaggctttagaagcactactgtacctgtacctctctaatgcctacaattagcactaattacccgtaattgcagtgtccgcctcgcgggagtacattgatttgggcagcagcggatccctggatcgttgctccgtcaatcaaccggttccggcagcgaaggacaaggagccacatcagcagctctacgagatttgccagggccagggagcgggccaggacgaggatgaggcgcaacaggcgatcacctttacccacgaggtgttcattgactgcccgtatgcagatctgcccgctggccacttgtccctgcagaggtcaacaaagtacggacagctgcagaggattgtgcccaagcggctgttcttcgaccagacccgcaagtgctactgtggcatcctcaacgattggatgctgtgctatgccgacggcccgaccgcctgtcgacccagcagcacgctctacttgaagagctcctccatcgagattgaacacttcggagaggggaagcggcgcgacatctgcttccagatcacaacagacgaccccaacaagaagttcgtgtaccaggccaacaacgaagtcgatgccaaagagtggatacacgccattgaggcggccatccgcggagatgctggtgctcattcagcgttaaagactccaccgccccggaaactgcccacgccgccggtccaaaagaaatccacctacacagcagcggatatcatctacgaggagccctcgcccgtgtatggtctcatagactcctcctccatggtgctccctaagctgccggagaaaagcaacagcccaagcgccctcgcccgacgtttcgagtacgatgtgcccaaatgcccggcacagccgctgcaggacacctcctccagggtggcatctgtaagtggggagctggaatccctgggactactcaacgagggagatattaaggtgcaaccgcagccttccagtttgcacggaagcatatcgctggacttccaggccagggtgaaaacagtgcacagtgagctctccacccagttatcagcggccggtcccagtccggatcgtctgaaaaaggcagcgaaaaagagctattcgaatggtagtgaaccggagatgctctctcccctgaccagccccgtccaaacgcccaccaaggatcagaagaagcagcgcaagtcaaccacctcaccgcaatccagtccggtcagcaaggactgcgacaagctggcacgaaactggttcctcagtcgccttaacaagagcaccggattgaaggcgaccaacacgggcagtgcatcaccaaccaacgccaagtgcaagcagagcgagaaggagaacctgctgacggaagcggagctgggcgagggctatgatgcaagtcctggtgatcggtatcacggcctgccgggcagcccgcccacgtcgccgtgtctgaaggcggaggccaagagcaaggtgaacatgattatcaaccagtttgagagtagcggtcacctgtccaccatgttcagcgtggaagctttggccgccaatgcactcgcctcgctgacatccttctgcgaaagtgatggttgcaacaactacgagccaatcatgcccctggccacgactcccagcagctttctcaagaaggtgtagactgccgcacatccgtcatctgctattcacatccgacgtcctggagagctcgttcgtctctgtattgtagatttaatccttaggctagtgaaaaccactctccggatgtcacataactttgacataaaattttaatatcaaaaccatggttgttaacatacgtaaaagtgcgacatgtaagtttgagttttccaattgggcgcacggtgcttggacagaaaaaatcttgatgatcgaggtagatttccatgtcgttgctgctgtcgtggggatgtgattggattataatatagttgggaaataaattcagttctattgtcaattatgagccggataggcgatggtggcccttaacggattgggatcggagcgctgagattctataatgtccacaagagcgtcacgtttgcgctcatctgccacgagcactaactttcgaggtgactccttgctgctaaacagaccaagtaccttcttgccatccgtctttactgtgaactggacaccgcgagccgttgcagccacggagctaatctcgttccataggtaggaccaaagagactgtgtgtaaaagaagtataagtaaggtccaactactgaaagttaacagcaaaactcaccgtccaaacgccgaacatctcgttacgttgcacgtacatcacccggtaattggtcaccaccaagtactcggacttttggataatctcctcacagtgaatgaagttatctgtggtggcaaatttacccttgtcggtttccctgcgagtatatttggttaagttcgcgttttttgtactccagctgaaaatctagtagctatcgacacttacttcattattttattccctgtcgcctccatcaagcaatagggtctcaacacgaagtcgtagtgctggaaacgcggcggtcgcatacgcttcacatcctcgcttgcatccgccgcccgtttcacagcctcgaagctgccactggcaaagtcaaccacgccagcggtggggcgagcaaccaggccaattgcacccttacccaggcccttgaagaagccctcgaccccgttatcgcgagccccagtcactggtttggttacaacgccagtgacaccgtccacaaagccctgataaaattatagagtcatatggatttcaaactgatgaaccacatagatgaggtcttaccatcactagacccttgctgctgcgggccaatccttcgtggaagttcttcggtttgttttgaataccctgtcgtcgtttcttttgatagtcctcgtcgaaggtcagcgcagccaaaccctttcc

SEQ ID NO: 941 - DNA, 2608 bp, DROSOPHILA
tcatggtggcgcaacagccggaaagtcgcgctcgcttcttggctccggcggtgaacagttcgcccgcgagcgaaaaggtgtcaacgtagtcagaacgcagtggaaaaccggatgcaagaccgaaatcgcaaactgttaatttctaaggcaaaacgccgtgtggtgtgcagttggtggatatgccagatacagatacagatgactattccgatccagatcgcaaagaagccacaataaagcccgggcgagaaatcaagcgttcggccggccaaacaacaactagcactcaacgcacattaacgcaaatcgcctcaaattaacactgaacactaaaatcggaatacaaaagtgcggatacaatactatttagaagccatgaatccgaaaccaacaactaccaagctggccgaaattgagcagtttttgttggatgtccgcgcccacttccgagcctcgctggagacctcggagtacgagaacacctcgaacctattccatgtgacggccgccgagcagaccgccgctcttctggcccgctgcgaaatcctgctggctgcagccagttctgcatcgggatcgggatcgggactggaactgggatcagggctgggatgcgcagacgagcaggcggcagctaaccatcgttccagcctggtcgactgtgtcgatagcaaggtgggcgcggagaccggtcccagcggttatctggagatgcttgcctccccgtcaccctcgaaaagctcactgtccgcctcgcgggagtacattgatttgggcagcagcggatccctggatcgttgctccgtcaatcaaccggttccggcagcgaaggacaaggagccacatcagcagctctacgagatttgccagggccagggagcgggccaggacgaggatgaggcgcaacaggcgatcacctttacccacgaggtgttcattgactgcccgtatgcagatctgcccgctggccacttgtccctgcagaggtcaacaaagtacggacagctgcagaggattgtgcccaagcggctgttcttcgaccagacccgcaagtgctactgtggcatcctcaacgattggatgctgtgctatgccgacggcccgaccgcctgtcgacccagcagcacgctctacttgaagagctcctccatcgagattgaacacttcggagaggggaagcggcgcgacatctgcttccagatcacaacagacgaccccaacaagaagttcgtgtaccaggccaacaacgaagtcgatgccaaagagtggatacacgccattgaggcggccatccgcggagatgctggtgctcattcagcgttaaagactccaccgccccggaaactgcccacgccgccggtccaaaagaaatccacctacacagcagcggatatcatctacgaggagccctcgcccgtgtatggtctcatagactcctcctccatggtgctccctaagctgccggagaaaagcaacagcccaagcgccctcgcccgacgtttcgagtacgatgtgcccaaatgcccggcacagccgctgcaggacacctcctccagggtggcatctgtaagtggggagctggaatccctgggactactcaacgagggagatattaaggtgcaaccgcagccttccagtttgcacggaagcatatcgctggacttccaggccagggtgaaaacagtgcacagtgagctctccacccagttatcagcggccggtcccagtccggatcgtctgaaaaaggcagcgaaaaagagctattcgaatggtagtgaaccggagatgctctctcccctgaccagccccgtccaaacgcccaccaaggatcagaagaagcagcgcaagtcaaccacctcaccgcaatccagtccggtcagcaaggactgcgacaagctggcacgaaactggttcctcagtcgccttaacaagagcaccggattgaaggcgaccaacacgggcagtgcatcaccaaccaacgccaagtgcaagcagagcgagaaggagaacctgctgacggaagcggagctgggcgagggctatgatgcaagtcctggtgatcggtatcacggcctgccgggcagcccgcccacgtcgccgtgtctgaaggcggaggccaagagcaaggtgaacatgattatcaaccagtttgagagtagcggtcacctgtccaccatgttcagcgtggaagctttggccgccaatgcactcgcctcgctgacatccttctgcgaaagtgatggttgcaacaactacgagccaatcatgcccctggccacgactcccagcagctttctcaagaaggtgtagactgccgcacatccgtcatctgctattcacatccgacgtcctggagagctcgttcgtctctgtattgtagatttaatccttaggctagtgaaaaccactctccggatgtcacataactttgacataaaattttaatatcaaaaccatggttgttaacatacgtaaaagtgcgacatgtaagtttgagttttccaattgggcgcacggtgcttggacagaaaaaatcttgatgatcgaggtagatttccatgtcgttgctgctgtcgtggggatgtgattggattataatatagttggg

SEQ ID NO: 942 - protein, 644 aa, DROSOPHILA
MNPKPTTTKLAEIEQFLLDVRAHFRASLETSEYENTSNLFHVTAAEQTAALLARCEILLAAASSASGSGSGLELGSGLGCADEQAAANHRSSLVDCVDSKVGAETGPSGYLEMLASPSPSKSSLSASREYIDLGSSGSLDRCSVNQPVPAAKDKEPHQQLYEICQGQGAGQDEDEAQQAITFTHEVFIDCPYADLPAGHLSLQRSTKYGQLQRIVPKRLFFDQTRKCYCGILNDWMLCYADGPTACRPSSTLYLKSSSIEIEHFGEGKRRDICFQITTDDPNKKFVYQANNEVDAKEWIHAIEAAIRGDAGAHSALKTPPPRKLPTPPVQKKSTYTAADIIYEEPSPVYGLIDSSSMVLPKLPEKSNSPSALARRFEYDVPKCPAQPLQDTSSRVASVSGELESLGLLNEGDIKVQPQPSSLHGSISLDFQARVKTVHSELSTQLSAAGPSPDRLKKAAKKSYSNGSEPEMLSPLTSPVQTPTKDQKKQRKSTTSPQSSPVSKDCDKLARNWFLSRLNKSTGLKATNTGSASPTNAKCKQSEKENLLTEAELGEGYDASPGDRYHGLPGSPPTSPCLKAEAKSKVNMIINQFESSGHLSTMFSVEALAANALASLTSFCESDGCNNYEPIMPLATTPSSFLKKV

SEQ ID NO: 943 - DNA, 4260 bp, DROSOPHILA
tgtaaataaaagatataaaggcagagactaaatgagctcatggagagccaagagaaaccacaagaattgctctatcgcacagcaagatgcaacagttgtcccacccctcgaagtctgaatgctcctccgtcttttctctttctcagaagaattcattgggttcgcatgaacttgcgaatacggctcacttagaagcgacgaaattaggtcattaatagtattttgccaaggataaggtcaccgccatcattgttttttctgggcacttgcgtgcaaatagaccaataaacaatgggtaccgcagtaaggcgatgtttttgcgtgagggtggagcagaatggtgtcatcctctccggggaactggaactcacctccccaaatgccaatcttcagctggttccggtccaagttctcgatgtagtcgccgagcaccttgttcagcacatcggccaccaccgcctcgaagaccattgtgtcctagcagatgctcctattgattttcctccaagtttgtggttgttattccaattgatgtggtcgtggtgagtgcttcaaacaatctggcgttcgctgtgcggtctatagttgatctaaaatacatgcatatgtaaacacagaaaccaaacagatggaacggagagacggattaaaacacaatgtcgatgatgtcatcgttgaacgcatttcaaatattttggcacaatccgccaggcccattgttccaaaataaactaacaagccaaacgattgtccagggtcagctggagtagggctggtgcgattaactcactactccactccagagcacgtgtgcaacgcccgttcttatctctatttactgcacccaattaccagcggcatttccacgcgacaaaaaagtagtaactccgtgcgatgcgcgttctttaaatgctcgcccgaaactaacagctgttgtgttttccgtttgcgttctccacctggggacgctcaatcagctgttcggtcgcgttcccgggcgaatggcaaactgttaggtgacgtgtttgaccgtgcgaattgctgagctataggaaaaatatttataaaacaccatgcaaacacgtcttgttttgctgctgctagctctgaccccgctcgtcctggccaagaagttcaaggaggaggagaaaccggcgtgggccaaaaaggatatacgcgactacagcgaggcggacctcgagcgtctgctagatcaatgggaggtaggtaacaacactgcgattggaaagcgacacatcggacccaactctccagattcgcacctagcaagggagtaatgccaaccctttagattcccacctatctaaggattcatcatttgtagagacggataactgataccccttcttttaatcttctcttaggaagatgaagagcccctcgaggatgatgagctgcccgagcacctgcgcccccagcccaagctggacctgagcaatctggacagcaagagccccgaggacctgctcaaggtgtccaaaaaggggcgcacgctgatgaccttcgtttcggtgaccggtaatccaacccgggaggagagcgacaccatcaccaagctctggcagacaagcctctggaacaaccacatccaggcggagcgctacatggttgacgataaccgcgccatcttcctcttcaaggacggcacacaagcctgggacgccaaggacttcctcatcgagcaggaacgctgcaagggcgtaaccatcgagaacaaggagtacccaggtgtcaatgcgaaaaaggacgaactgtaggccggttccacggcataccagcacatcaaaacattctcactatttaagatcaaagttcaattaaaataaaacaaatttattaaacaaacttattaaagaagctacatatgtattttgcttggccattcacagggaaacggctccgtttgcgggatggaataaatatggataaaaatatgaatatttcaataaacatattttgaatataatatttgtatctctattagattgtttatatacactgcgtatgtgtcaaatcaaaaacaaaataaatgaaaaatttaagcaaaactctaaattaatcgctgaccaactacacaactcacggtgccatcggcaaagttatcgtatcgcctttcaaatgtttcgagctccagctcccctctgtgtgaccttaagtcaacaagacgccacccgcgaaccgcgacgtgctctacttgctccgcctgttgagtagctgttccaccaagaagatgcccgtccaagccaagatcggtcccagcattctcaatgcggatctctccaacctagcggcggagtcacagaaactactggacaatggagcggactacctgcatctggacgtgatggacggcacttttgtgccgaatctcacctttggtcaccccatggtcaagagcttgcgcaacaagatcaaggtaagtctgcagtcatctgagccagatattcaattacctatgccacaaccccatatagacggcctttttcgagacgcacatgatggtccagaatccggagcagtggatagagcccatggccgatgccggtgtcaatctctacaccttccacgtcgaaccggtgcaggatgtcgtcagagtcagtcgccgagtgcaggagtcgggcatgaaggtgggcctggccattaagccgggcaccgaggtaggttgaggttagggttatatcacttttgatacttgatacctcctatgtatgttgtatagccacagcttgttgcttatttgtttgaaattatttatagatttgatatttccactagatcttgtcccaagctaggtctgaagttccttacaattttgaaaatatccaacgagtaaccacctgttgcacttaccttttaggtacaagatctggagaagtacttgagcattgccgacgttgtgctggtgatgaccgtggaacccggttttggcggacaatccttcatggccgatatgatgccgaaggtcaagtggctgcgcgaaaactaccccaacctggacatcgaggtggacggaggtgtgggacccaagactatacactgctgtgccgaggccggagccaacatgatcgtctcgggaaccgccgtggtgggcgcctccgatcagtcgcaggtcatcaaggagttgcgcgatgtggtgcacagctacctcaaatagagattcatttaccagctagcttaagaaagaattttttagataggcgaaatgttttgaccaaattgcattgcaagtaatggggaaaattcctcgggaaatggtaccattaaaagaaacttacaaccgtatgtggttttatacatttattttttaacatttatataatatatgtttgtaggtatatatcatgtttggtatgacatgttgcttttagcatttagttggttatacgtgtgtctgcgtgtactttatgtagttacatttagtttactgcactttcccagttattgtcggacattggccaaatgccggctttattgtcatggttttggtactctctgagttttcaaaaataaatgttcaacaatattgttcgatttgcgtcaaaacttcaagatctgaatgtaaaacttttcataaattctcaatgcctccgatgcgcttgtctagctcacaggaaaacaaattcagtttgtctttattgtcaaaggttgttattgtaaattcttcacaaagttccgtctgtgcatagataacaagtgcttttcatcaaattatcatctttaaacatttacatataatattctgatacgtgagtacatatactatgcttcatctttataatgcgcgacacatgtaaattcaactagtttgtttatcagcttctggtttttggattttgctacattttacacataacttttcgctacaaattcttgtgttctttgtttaatagggcctgttcttatgtactttgtgtagtgtgtccctccatgcacatggagcatgcgaaactgaatcgaatccttggggacgatccccgttaagcgcagaatttcaactaggatgtggggcttgtgcgattctgagtttgagtgtcaactgtttgcgtattgtacttagtaattatctattctgcagttcatgccacgtgtaaattatttcactcactccgatcgccaatgctaagcattttacatctacaatatatataatatatgggttgtattcgatttagactaaatgtacataaagctaagcgttttgatagtagcctggagcatggggtgtataaaaatagctcg

SEQ ID NO: 944 - DNA, 1379 bp, DROSOPHILA
aatggcaaactgttaggtgacgtgtttgaccgtgcgaattgctgagctataggaaaaatatttataaaacaccatgcaaacacgtcttgttttgctgctgctagctctgaccccgctcgtcctggccaagaagttcaaggaggaggagaaaccggcgtgggccaaaaaggatatacgcgactacagcgaggcggacctcgagcgtctgctagatcaatgggaggaagatgaagagcccctcgaggatgatgagctgcccgagcacctgcgcccccagcccaagctggacctgagcaatctggacagcaagagccccgaggacctgctcaaggtgtccaaaaaggggcgcacgctgatgaccttcgtttcggtgaccggtaatccaacccgggaggagagcgacaccatcaccaagctctggcagacaagcctctggaacaaccacatccaggcggagcgctacatggttgacgataaccgcgccatcttcctcttcaaggacggcacacaagcctgggacgccaaggacttcctcatcgagcaggaacgctgcaagggcgtaaccatcgagaacaaggagtacccaggtgtcaatgcgaaaaaggacgaactctgttccaccaagaagatgcccgtccaagccaagatcggtcccagcattctcaatgcggatctctccaacctagcggcggagtcacagaaactactggacaatggagcggactacctgcatctggacgtgatggacggcacttttgtgccgaatctcacctttggtcaccccatggtcaagagcttgcgcaacaagatcaagacggcctttttcgagacgcacatgatggtccagaatccggagcagtggatagagcccatggccgatgccggtgtcaatctctacaccttccacgtcgaaccggtgcaggatgtcgtcagagtcagtcgccgagtgcaggagtcgggcatgaaggtgggcctggccattaagccgggcaccgaggtacaagatctggagaagtacttgagcattgccgacgttgtgctggtgatgaccgtggaacccggttttggcggacaatccttcatggccgatatgatgccgaaggtcaagtggctgcgcgaaaactaccccaacctggacatcgaggtggacggaggtgtgggacccaagactatacactgctgtgccgaggccggagccaacatgatcgtctcgggaaccgccgtggtgggcgcctccgatcagtcgcaggtcatcaaggagttgcgcgatgtggtgcacagctacctcaaatagagattcatttaccagctagcttaagaaagaattttttagataggcgaaatgttttgaccaaattgcattgcaagtaatggggaaa

SEQ ID NO: 945 - protein, 406 aa, DROSOPHILA
MQTRLVLLLLALTPLVLAKKFKEEEKPAWAKKDIRDYSEADLERLLDQWEEDEEPLEDDELPEHLRPQPKLDLSNLDSKSPEDLLKVSKKGRTLMTFVSVTGNPTREESDTITKLWQTSLWNNHIQAERYMVDDNRAIFLFKDGTQAWDAKDFLIEQERCKGVTIENKEYPGVNAKKDELCSTKKMPVQAKIGPSILNADLSNLAAESQKLLDNGADYLHLDVMDGTFVPNLTFGHPMVKSLRNKIKTAFFETHMMVQNPEQWIEPMADAGVNLYTFHVEPVQDVVRVSRRVQESGMKVGLAIKPGTEVQDLEKYLSIADVVLVMTVEPGFGGQSFMADMMPKVKWLRENYPNLDIEVDGGVGPKTIHCCAEAGANMIVSGTAVVGASDQSQVIKELRDVVHSYLK

SEQ ID NO: 946 - DNA, 6415 bp, DROSOPHILA
ggagcacggccaagaagcaagacgatctcgaggcgatttttcaaagtcaatgccgggcaattgacttagctacagtacagacacccagtcatgccattacacatattctccccccattgagtaagtagcgcttctcttgggcattgtttggatcggatcagactggggagttcggacccatatataccgtactgtggattccttatgtgctagtcgtttatcgcgcgatcggcgatgatatttattagacatgcgccgcaatagcgccaacgacgcttgaaatgaatttctttgcagcaatatctcggggcctgaggcctcagatcggtttactgtggattgattcgcacactcatccatgtacaaacatagatacaaatgtacgtatattcgggtgtgagtctttatcttgcattggggtgatggaaattggttccgattattaatatacgacaagccattatctgtttcagcagacgagtgtgttcaatgtcgatgccaaatggcgagcgcttaataataattgtattcactttatcgcacttcttttatggcccatccttaacgataactcagttaagattccttcaaagatataataaaatgaaatatgaagtgaagaggtaacattcaaaatatttatatctgatcatcgaaaatgtaagggtattgttgcttgtcaaaaatatataagtttataaagtaaattgaaaaaccaaacataaataaagcaaactgatctacaatattttgaatattgaatattaataatactattgtagatttttaattaaattgcaagctatgtattatttatcaaaagtaacgtgcatttaaatttaataaaaacgatactaaggcttttgaaaccgttattttaacggatgcagtattttaaatactcaaatttttatagttatatggtaactatcgcaaactgagtgtgtacattaacgaacggccacactgttgcccgtatttgtaaggtgcagccctggtcactctgggcacgtagtcaaaatgaggtttttttccggcgttttcgtaattttattaattaaacttttccaaaatgccaacgccggcgaggtggaagtcgtcggctgcggtggattcatcaagagccacgccgagattgacttttcccgggtggagatcaaactgtaagtaaaagttccctttctgggatgacctgataagaattgtggcgcatggtggccgctaattgaataataaattaactggcccgtatgtgattaacctaattccatctcgctctgcaggctgaccaagcagggatccctgaaggacaagacggactgctcaccctctaacggatattacttcctgccgatttatgataagggcgactacctgctcagcatttctccgccaccgggttggagcttcgagccggaacaggtggagttgaacttcgatggcaagaccgacgtttgcagccagggtcgcgatgtgaactttgtgttcaagggctttggcatcaccggtcaggtggctctcgccgccggcggcggtgcccgaggcgtagacgtggagctgcgatctgaacagggcgaagtccggcgcacaaagagcgatgcgaacggagtgttctcatttacgcccattattcccggtaactacgtggtcaaggcatcgcacgcaaggtggcacttctccaaggcggagcacaaggtggttgtggttagcggcaacaccgagctgccggcgaactctttggtagtctcaggattcgatgtggttggtcgctttgattccagctcgccgcttcctggaaatctgggtgtggctctttacaagaagaaaggagtaagtatagttattttctaacacattttctgaaaagaaagaacacaaaaattgtttaatttatttaaaactgctgtatacactttacataaattaaattaagttgttaacttaattaattattaacgtttatcattattctctttttagcaatctttagtgccaaaatgtgagacatcctccccagcgccgcctaatagtgttaatagcgcatacgaatccgcatcctcctgcttctcccagttggacaaatcgggagagtatattttcaagaacgtgccatctggaaagtacctgttgcaagctatcaacctagattccaagttgaagctgcacttgagtcctgagctgttggaactagaagtgggcaaggatacgctgcaaatcaaggacgaatttaagatcacaggcttcaccgtttctggtcgagttctgacctccgccggaggggaaccgctaaagtcagctgttattaaagttaatggaaagaaggtggccgagactgatgcccagggctcatatacgttggaaaacttaaaggcaggcacagtcaacatcgaagtggagtcctcccagctgcagttttctcccctgcaagtcaaggctcagatcaacacagcttccctgcccaccattgtgccatctgcttatgaggtgtgcggaaaagtagtgtcgccgaaatcacataatgtgggacttaccaagatcggctccaccttccactcgtcggcttccacaaacgcggagaccggaaactggtgcgcctttcttcctgttggcaaatataccattgaagtgctgacgacggatgctgacaaggccgctggagtgcagttcttccctgttcagcagcagacggaggttcgcgatgcacccgtcaatggcataaccttttcccagctgcgcgcaaagattcgcggcgaactgcagtgtctgcctgatgctaccgccacctgcacttccgctgaggtcaccctgcaggccttagatgccaccggtcagcccacggagaacaagtggaaggccagggcacatcgtaagtaattattatttagtttatgcgtacaagtacagcaatttaaccatagaaaatataggtttaaatttaattatcctacttacaagaaataacatgcagttttgagataacctatcttagaaggtttaaaaattattcagcagaaatggatatgtgctaatacttctagtttcaaaaccattattatatttaaattaaaaaagtatcacgaagttcactaggtaagaatattagttgacacggatttcgttaccagtggccgctgataagtaataagattacaacagtagataaagtatctttggcgtggtggttctgttttaattaagatggtcttccgactaaccatgtatcatccaaaataccctatcatcaatcttatggttttggattgtaggtggcaaatacgtttttaaggatatgcttcccggtccctatgaacttacaattccccagggaaatctctgctacgaatcgacccgcgtgttcctgaacgttgcttctgctgaagaagatgctcccccatttgtacacaagggctacgaggtgtccattatctctagccatcgggcactggtaagtctgacactttaaacgacttcatatgtatattaaatgatgtaaacattccttttaagatgaaatacacccacgtcactggaccttctgagccaaaggcacctactgaatcgctgaagattgcgtcaggagtgaataccttttgcgtgaagaagtatggtagctacgattttaagctagagggctgccacacgtatgatgaatcgttacccagcaaattcattacaccagaaccagatcagttgcaaacactaatcattaatgcagtggcccacaagactggcgttcgagttctgtctaccgaacccactgctgattccattaagcttgtgctcgaatctgaatcgctgggtcaggaggtgatcacacctgttgctgagtcccacaaagtagatggcaagttcgcctaccgctatgacacgtatttgaaaccggaacaggtacttcgtattacaccagtgagcgatgtcctactgtttgcgccccagcaacacgaaattgttggcagcagcgattgtgtagatattgccttcaactttgtggctaccagaggtttgattctacgcggaaaggttgttcctgccattaaggatgcaaagatcacactgtctttccctgatcagcctgagttggagagcctggaagtactcacgtccgtcaccggagaatttaagtttggcccaattgaagagtctcttgcttttgaccttaaggccgaaaaggagtcgtacgttttcagcgactacaaccgccagacagcttcgtttagtgctcacaaactctgcgagatttcggtggttgtcaaggatgaggctggtcagacattgggcggagtcctcctttcgctgagcggtggggagagctatcgcaagaacctcgtcaccggcgataatggagctattaacttccactccctttcgccatcgcagtactacctgcgacccatgatgaaggagtacaaattcgagcccaactcaaaaatgattgacattaaggatggcgagactgtttctgttacccttgtgtaagtaaaatttctgatcattcctcaacatacatataaagaagcatttctctatttttaaagtggcaagcgtttcgcttactcgatctttggcacagtgagctccctaaacggcgatcccttcgccggcgttaatgttcaggccacagccgataattcgtgcccccagcagccggaggaggccaccagcgaggcgaatggacagtatcgcatccgaggtttgcaacctggctgtagttactccgttcgcgtcgttcccgacaaggaaatcgtagagcgatctattcctgcccagcacacggttaaggtggccaacgaggatgtgcgtgacataaatctggtggctattagccccttgaagattgtagacatcactgctagggtgacggccacactcaatgaacactacaagacgctgcgcattgtgatgtaccgcaaaggaaactcggattctcctgtgttctcgcaacgtgtgggcaccccggtgaatcctaaagcaagactgaaccctggtatcaccgtcttcttccctcgcattcctctggacggcaagagctacgtggtagaactgcagtccaccctctccgataaaacatatacctacaagctgccatcgactacgtttgtggctgacaggggttccgtgttcgttgagttggagttcaagccggaggtgcgcgccgccgaagcggatctcaaccagaattcgatttcggctctggtgctcatcgccttggtggccattgccttctttaagcaggatctggccaccagtttcctcagcttcgtgtggagcaagcttaacgatgtcgccgccgatctcgcccagcgacagaaaagcaagacacaggtgcgcaagaacgagccaatcaaccagcgcgagattgaacagatggccgaccagataaatgccatcaagaagaaaaagaccaagaagatttagttccgactgatagtcgcattagttgttcaatttagtcacatttcgaggtattcgcggtaggtattcatttggtttttgtttctgtgagattttgtttaaccctttttaatttgaattgcatttaagaaaacgttgtaatttttcactttccatacatagattgaggcaagtttatttgtgttcgttatccactcttatagctaaaataaataaatacaattaaatagattaattagacaaggctgttctactgcatcaggatgtgctcggcaatggagctgagcttgcgattcttgtgcttggctcgtcgcctttcggcttggaggttgatctcattctgggaatcctcagcggcagattcctcggtgactgcctgctcctcctgttgctgatcagcctcctggtgtgcctccgactccggattttcctcgccgttgtcgttctccacgaaaatgcactcgggattgacggcagcacactcgccaaagctggtggccctggccataggatttctggcattggtgtacttctcaaagaaaccgcgacccacaatgcggaaagccatgctggtcaagggattcaacttggatctaaactccatttcgcagacaaatcggcgtcggcacgcctttgagtccaggcccaaaaaggcgaacataaaatcggcaatcctaaagatgaattttgaaaatgttaccttatatagtgaataagaaacgttctgtacttactgctcttcggcgggcatttggcgagccacgctctctgaaatttcctcatccacaatctccacatgctcttcctcctgctcatcttggatcaaatgggcgttatctgcagcgctacggcgtccgcgacggcgcgtgtctacgggaccagatgggccacttggtccagagggagattcgctatggtagtcgccatgcacatcagagacaatgtccgatccagcatagctgctgtatccggaatagggctcgaaactggcgccggagtcaaa

SEQ ID NO: 947 - DNA, 3620 bp, DROSOPHILA
actctgggcacgtagtcaaaatgaggtttttttccggcgttttcgtaattttattaattaaacttttccaaaatgccaacgccggcgaggtggaagtcgtcggctgcggtggattcatcaagagccacgccgagattgacttttcccgggtggagatcaaactgctgaccaagcagggatccctgaaggacaagacggactgctcaccctctaacggatattacttcctgccgatttatgataagggcgactacctgctcagcatttctccgccaccgggttggagcttcgagccggaacaggtggagttgaacttcgatggcaagaccgacgtttgcagccagggtcgcgatgtgaactttgtgttcaagggctttggcatcaccggtcaggtggctctcgccgccggcggcggtgcccgaggcgtagacgtggagctgcgatctgaacagggcgaagtccggcgcacaaagagcgatgcgaacggagtgttctcatttacgcccattattcccggtaactacgtggtcaaggcatcgcacgcaaggtggcacttctccaaggcggagcacaaggtggttgtggttagcggcaacaccgagctgccggcgaactctttggtagtctcaggattcgatgtggttggtcgctttgattccagctcgccgcttcctggaaatctgggtgtggctctttacaagaagaaaggacaatctttagtgccaaaatgtgagacatcctccccagcgccgcctaatagtgttaatagcgcatacgaatccgcatcctcctgcttctcccagttggacaaatcgggagagtatattttcaagaacgtgccatctggaaagtacctgttgcaagctatcaacctagattccaagttgaagctgcacttgagtcctgagctgttggaactagaagtgggcaaggatacgctgcaaatcaaggacgaatttaagatcacaggcttcaccgtttctggtcgagttctgacctccgccggaggggaaccgctaaagtcagctgttattaaagttaatggaaagaaggtggccgagactgatgcccagggctcatatacgttggaaaacttaaaggcaggcacagtcaacatcgaagtggagtcctcccagctgcagttttctcccctgcaagtcaaggctcagatcaacacagcttccctgcccaccattgtgccatctgcttatgaggtgtgcggaaaagtagtgtcgccgaaatcacataatgtgggacttaccaagatcggctccaccttccactcgtcggcttccacaaacgcggagaccggaaactggtgcgcctttcttcctgttggcaaatataccattgaagtgctgacgacggatgctgacaaggccgctggagtgcagttcttccctgttcagcagcagacggaggttcgcgatgcacccgtcaatggcataaccttttcccagctgcgcgcaaagattcgcggcgaactgcagtgtctgcctgatgctaccgccacctgcacttccgctgaggtcaccctgcaggccttagatgccaccggtcagcccacggagaacaagtggaaggccagggcacatcgtggcaaatacgtttttaaggatatgcttcccggtccctatgaacttacaattccccagggaaatctctgctacgaatcgacccgcgtgttcctgaacgttgcttctgctgaagaagatgctcccccatttgtacacaagggctacgaggtgtccattatctctagccatcgggcactgatgaaatacacccacgtcactggaccttctgagccaaaggcacctactgaatcgctgaagattgcgtcaggagtgaataccttttgcgtgaagaagtatggtagctacgattttaagctagagggctgccacacgtatgatgaatcgttacccagcaaattcattacaccagaaccagatcagttgcaaacactaatcattaatgcagtggcccacaagactggcgttcgagttctgtctaccgaacccactgctgattccattaagcttgtgctcgaatctgaatcgctgggtcaggaggtgatcacacctgttgctgagtcccacaaagtagatggcaagttcgcctaccgctatgacacgtatttgaaaccggaacaggtacttcgtattacaccagtgagcgatgtcctactgtttgcgccccagcaacacgaaattgttggcagcagcgattgtgtagatattgccttcaactttgtggctaccagaggtttgattctacgcggaaaggttgttcctgccattaaggatgcaaagatcacactgtctttccctgatcagcctgagttggagagcctggaagtactcacgtccgtcaccggagaatttaagtttggcccaattgaagagtctcttgcttttgaccttaaggccgaaaaggagtcgtacgttttcagcgactacaaccgccagacagcttcgtttagtgctcacaaactctgcgagatttcggtggttgtcaaggatgaggctggtcagacattgggcggagtcctcctttcgctgagcggtggggagagctatcgcaagaacctcgtcaccggcgataatggagctattaacttccactccctttcgccatcgcagtactacctgcgacccatgatgaaggagtacaaattcgagcccaactcaaaaatgattgacattaaggatggcgagactgtttctgttacccttgttggcaagcgtttcgcttactcgatctttggcacagtgagctccctaaacggcgatcccttcgccggcgttaatgttcaggccacagccgataattcgtgcccccagcagccggaggaggccaccagcgaggcgaatggacagtatcgcatccgaggtttgcaacctggctgtagttactccgttcgcgtcgttcccgacaaggaaatcgtagagcgatctattcctgcccagcacacggttaaggtggccaacgaggatgtgcgtgacataaatctggtggctattagccccttgaagattgtagacatcactgctagggtgacggccacactcaatgaacactacaagacgctgcgcattgtgatgtaccgcaaaggaaactcggattctcctgtgttctcgcaacgtgtgggcaccccggtgaatcctaaagcaagactgaaccctggtatcaccgtcttcttccctcgcattcctctggacggcaagagctacgtggtagaactgcagtccaccctctccgataaaacatatacctacaagctgccatcgactacgtttgtggctgacaggggttccgtgttcgttgagttggagttcaagccggaggtgcgcgccgccgaagcggatctcaaccagaattcgatttcggctctggtgctcatcgccttggtggccattgccttctttaagcaggatctggccaccagtttcctcagcttcgtgtggagcaagcttaacgatgtcgccgccgatctcgcccagcgacagaaaagcaagacacaggtgcgcaagaacgagccaatcaaccagcgcgagattgaacagatggccgaccagataaatgccatcaagaagaaaaagaccaagaagatttag

SEQ ID NO: 948 - protein, 1199 aa, DROSOPHILA
MRFFSGVFVILLIKLFQNANAGEVEVVGCGGFIKSHAEIDFSRVEIKLLTKQGSLKDKTDCSPSNGYYFLPIYDKGDYLLSISPPPGWSFEPEQVELNFDGKTDVCSQGRDVNFVFKGFGITGQVALAAGGGARGVDVELRSEQGEVRRTKSDANGVFSFTPIIPGNYVVKASHARWHFSKAEHKVVVVSGNTELPANSLVVSGFDVVGRFDSSSPLPGNLGVALYKKKGQSLVPKCETSSPAPPNSVNSAYESASSCFSQLDKSGEYIFKNVPSGKYLLQAINLDSKLKLHLSPELLELEVGKDTLQIKDEFKITGFTVSGRVLTSAGGEPLKSAVIKVNGKKVAETDAQGSYTLENLKAGTVNIEVESSQLQFSPLQVKAQINTASLPTIVPSAYEVCGKVVSPKSHNVGLTKIGSTFHSSASTNAETGNWCAFLPVGKYTIEVLTTDADKAAGVQFFPVQQQTEVRDAPVNGITFSQLRAKIRGELQCLPDATATCTSAEVTLQALDATGQPTENKWKARAHRGKYVFKDMLPGPYELTIPQGNLCYESTRVFLNVASAEEDAPPFVHKGYEVSIISSHRALMKYTHVTGPSEPKAPTESLKIASGVNTFCVKKYGSYDFKLEGCHTYDESLPSKFITPEPDQLQTLIINAVAHKTGVRVLSTEPTADSIKLVLESESLGQEVITPVAESHKVDGKFAYRYDTYLKPEQVLRITPVSDVLLFAPQQHEIVGSSDCVDIAFNFVATRGLILRGKVVPAIKDAKITLSFPDQPELESLEVLTSVTGEFKFGPIEESLAFDLKAEKESYVFSDYNRQTASFSAHKLCEISVVVKDEAGQTLGGVLLSLSGGESYRKNLVTGDNGAINFHSLSPSQYYLRPMMKEYKFEPNSKMIDIKDGETVSVTLVGKRFAYSIFGTVSSLNGDPFAGVNVQATADNSCPQQPEEATSEANGQYRIRGLQPGCSYSVRVVPDKEIVERSIPAQHTVKVANEDVRDINLVAISPLKIVDITARVTATLNEHYKTLRIVMYRKGNSDSPVFSQRVGTPVNPKARLNPGITVFFPRIPLDGKSYVVELQSTLSDKTYTYKLPSTTFVADRGSVFVELEFKPEVRAAEADLNQNSISALVLIALVAIAFFKQDLATSFLSFVWSKLNDVAADLAQRQKSKTQVRKNEPINQREIEQMADQINAIKKKKTKKI

SEQ ID NO: 949 - DNA, 8725 bp, DROSOPHILA
gagtggcaatgctagaaaataaagcccttgttaatttttaaaaaaataaattaattttccagataaccgttttatttccattaaatggactgcaaattgaatttagtctttgctctcggcctttgtgggaaccgtctgcgcgatccaatcgagatacggcggattgccattctggatgggcagcgcgatgacctcggcgacgctgtagggatgattctcgcggatgaacttgctcagatcgtcgatgcggctggtgcgcgtcttgatcatcaacagatattcggagtcctcgctaatctcgccttcccacttgtagatagactcgacttgggacacaatgttcacgcatgcggccaatttcaactcaacgatgctgcggcccagctttctggctgactcccgatccggagtggtcacaaatgccaccgagctgctgcccgactgataggcattgcctgtcgccgctgattgttgctggtcgcccattttggagcattcactggaattggaattcgaattcgaattggtactggaactggcgttggcggcactggaagagaagcaacaacttttgtgactgctcgctgtggcgaatgccggcgggttggcgatggcggtggtgacgctggcagcgatcaacaggttgcgcaccagcgaccagcgaaggggcaagcaactggcggagatgcgatattgcattcagatgcactttgcacggtgaaaagcaaaacaataatgaaacaaaaaaccaagtgccacagtcggcggcgttgccagacattccagtcaaatgcgatgtttaacattagggctcctgcgcacgagacaagtgggattaacataaaatgtagtattttaggtatctatgttaacggtattttttttcttgaagagaaaagtaacggttcgttttttaatagatttcaaaactataaaaaataaacaaaaaaaaaaactttttcgggccacaagatgccatttaaaaaaaaaacgcatgtgttcgatttagtttttaatattttgctagctatataaactccaatcaccgattaacatttaaatacaatatcattttaacgctacaataaatacatagatataataaacagcaaacagcagcaataataaaataaataaataaccactgccactcatttacgacacaaatcgtgcattcgcatcattgcctgcgtaatttcccccgaactgtccggctgatttggcggcatcgtcgtccatgtcagccaccaggatgtccggcacctgccgcccaactccgcgtccgccatcgccatcgcctccggccccacctccgtccagcgcatgtagtttgctttcctgttgagcagacgatagtagtaagggggcaatcgtcacatatcttccacggccatctgacccccatcgctactcactctgctggggctctcgagaagcaattcctgagccatcggatcgccggacgccgactgtcgtggacggagcagtcgctggagcgcattcggcacactaaactgctgagccgcgaacgaggacgtggcgctggtggtggtgaatgtgtcgttgctgccgcggctggacaccgttcccgtttccgtggtgaagccgactcccgcctcggcgcgttcgtgctccaggaacgctttggtgccgccgagcgtcgccagcggattctggaaatgcatgttaatgttgagatccgtgtggccgcgctgccggtactgatagtacatgtacccgagtccggcgatcagtgatccggcggctaggacgaacagtgccatcagccagtgaaagtgaccgttctgctcgtgttcatgttccaattccaggctgttgaccgcacccaacacggccacctcattgccagagccatggggacaccgttcgccttcggccaccagacgattgccacacatgcattcgtaaccgtagtccgcctgcaggcacagtccatggcagtgggcatgggcgcatggatgcgacgccttctgcggctgacgcgacctgcccgccaccacaatgtcctgggcgttcagcacgttaatgctgatcttgtgacagatgcgggatccgtacagtgcgcactgcaccgcctccacggagcccaggttcacgatgaacgcattattttcgtacacactcagcccagatggatgcatcagagcgttggacttttgcagcattatctccggtcgacgcatgggacccgttttaagcctatagctaatcctctccagcgtgcgcatatgctggtccacaaagtacaatagctgctgatgcggatcggtggtcagggcggtcatgaagctttcgcttcgctgcagcagcatatccctgcgactgccgtccagtcgagccatgtgaatctccgagctcgtctggccatagccctcggtgcgtatgactatgtagaagatccgggcgtgatagccatccacagccaaatgcttaacgtgcctgggactcttcacgtgcacaatgcggccgcacatgcgtcccacgaaactgcacgcttggatctcctgcgctccactgagcacataaacatttccggtgacccaatccacggagagtttcgtcggtgcgggcagacccagagcccgcacaatcaccttcgtttgcagatcgatctgatagacgatgccctcgtcctcggcggaaaagtaacccatttgccggtgcatggccagatcgaaaccggtgatcctcgaatcattcgccgaccaggccacattgagcataacgggctgttcgcttaggtttcgcacttcgttgaagctgctgaagagcagagtggcgccagactgcaggctcttgcagctaacgcgatcctggcgcagcataaagtccgcatggcactggcactgatagccgccgagggtattctcgcatagctgagcgcatggctgctgctcctggcactcgtcaatgtctaaacagctcttctgatccgcgtccaggcgatagccatcgaagcaggagcacacggcgccggctggtgtggcgcggcacttgtgctggcacacctggcgacccgatgccgaacggcaggcggtggcgcacttgggtccctcgtcgtggccgttggtacagtccgggaaattgttgcatacccgcgacaagtccacgcactcgccgtcttgacaatcgaagagatgtggccgacaggatcggctcgaggtgctccacggctgaatttggctctgattgtgatggcccttttccagttcgcagctcaactcgtcactgccgtcgccgcagtccttctggccatcgcagcggaactcccgccggatgcactctcgaccggagcggcacttgaactcatatatgctgcacacatcaccgcaatcggcctcatcctcgccgcgcggacactcggtggtgccattgcagcgaaccgtagacggcagacagatcttgagattgctcgtgcattggtattgatcttccgcgcaggatatgttcatcgtggatgagtccgtgccgcaattcagttcgtcggacttatcgccacagtcgttgtggccatcgcacaccagactccggtccagacactgacccaacagacagcgctgcatgtccggcggacagctgcgatggacacacttgtcgtgctcgtcggatccgtcgctacaatcgatccgcccgtcgcactcccagctgcccgctatgcaggatccgctgccgcactggaacattcccggttcgcatcgcgatgtcgcctcgcacagcaattcgtcggaattatcgccgcaatcattggttccatcgcacaccaggctcgagtccacgcactttccattgtcgcacccgtgctgatggacatggcacttcttgctcttgtctgtggagtagagagagtattcaaattcaaattatccaccaagtgcagctcgtttcgcttaccgaacttctcgcagtgctgctcatccgaatggtcgtggcaatccttgcgattgtcgcatcgccgctccttgtcgacgcactgctccccgctgtggcaggcgaattggttgggcgagcacagaacctttggcttgcgccgatgctcctcgtcgcagttcatctcatccgaattgtccacgcaatcgcgtcgtccgttgcaacggtgattcattgtgaggcactcgccactgtggcaacggaactcacagtccagagcctccacgcaggtgcggttacccgcatcccggtaaacgaatccggccggacatagacagatcgagtggtagggtccctcgcccacacagatgtgcgaacagccgccattctgctgctggcagggatgcgattcctggccgacgggtgagctggcggccagcggaattccattgggcgtggccacaggcacgtacggcataatggcggccggatcgtccttctccattatatcgatcacctttcgcggccccatattgctcttgtgcgtccagtaaatccttggcgtacccaattcattccaaaacagatcgtgatgcaccatggccaggctatagggacgcctaagcttgccccgaaagatttggctgtgcggcaccctgtaattcgagtagctaatcctgcccagatcgctgtctgaccaaaagatcgtttgggtctcgtaatcggtgaccagcttgatatcatcatcgcccagatcgtcctcgaatacatgcacctgttcgcccttgccgctcagcggtatcttgtcaatgtggctgtgccgcttggccttgagcacaacatacagatagccctccgcgggcataacagtgagtccaattggcacctcctggcccggaaagaagcggatcagcgcacgatggcgcgtctgcagtgagagcacctcaatcacagcccgctccgtatccgcccagtatagattcctgctcaaatgatcgaaggccagggcactcacattgcccaaattggagcggaccaggacgttgctctcgtgcgactctggctgaaactccaggatcagtcgctggtcattgtccgctattatcaggctgccattgatgcgattgtacaccatttcgttgatcaagcagggcagcgtgtatgacttgctcacctgatggcgcccaaaggcggtgtgctcgatctcgagcagcacctgaccgaggccaatgaacaatcgttggcgcttctccattagcatgcagcgccgatgatccggcgccagccgcatgccatccggacaggcgcagctgtgaccaccgatttcgggttcggccagcaggcataggtgcgagcatgtggcattttcgcaaccatgcggcgagttgggctgcttggccggatgatagatgtgtacggcgtaaatggtacgatccttggccaggatgcgatgatccttgccggagaatttgtgacacgcatgcacactcttcgttgcccaatctgaccagtacagctgatcctcgaatatggccaggccatagggatgcttcagcatgccgtccagcaccgtgcgccgaccagtgccgtcgggtcgaaccgtttgcacgctgcccaacttggcatccacccagtagatcctttgctggtgcatgtccagcgcaataccattgggccattcgatattatcgctgacaatcggtcgcgaccgactgccgtccatggatgcgcgccctatcatgggcttctcaccccaatccgtccagaacatcaagcccttctggggccaaacagccagtgatcgcggctggtgaacatcctgggtgaccagaacggcacagtttagtccatcgttcgagcacacggctatgtgccgcattatgttgtccgagaagtaaatgttctgcgtcagccaatcgacagccaggtcctctggtgcatccaggccggaggtcagcaaaatttccgcattcgaaccgtctccgttagccttcacaatgctctccgcttcgttctggatgttggtccaatagatgtggctgccatcgtaggccacgccaatgaccttgctcagattcccggccacctggtagacatgatttcgtacgttatcctcgcgcagatgcattcccataatcgtcatctgggtggtgtacagcagaaggggctgctgttccttagagccgtaaacgactgcgcgacacgtacgattatccttgtccagcagatagcccgcatcacagacgcatcgatatccgcccgatgtgttctcgcatccctggctgcacaaatcatcttgctccttgcactcgtcaacgtcctcgcacttgtcctcgaatttagccagccggaatccctttgggcagaagcactcggctccgctggcaggcatcatgtggcatttggctcccagcgcacacttcttcgcatcgcagtccggcttggagtgacagaggtcggtctcatcgctgccgtcggaacagtcgctgtgcccatcgcacacttcgctcagggtcagacaggtttctcggttccggcataggaatttccccttttgtggctcacatagatttactgaaatgatgccgagtcgcatgtttcaagagcatcaggcttggagtatccaacaaagaattttaacttacagcatcctcgttcgtcgcttccatcgccgcaatcgtcaacgccatcgcagacccactgcttccggcgcaagcaccgtccgttggcgcacaggtgaccctcgccggggcaggtgatctccgcctgcttgcagccagccacctcgtccgacttgtccgtgcaatccggccggccgtcgcacatgaaatcaatgggaatgcaggtgcgatcctgctggcacatgaactcgtacttgctgcagctgcgcatgcgatgagcggtgtcaccgaatcggaatcctggccgcaccgggcagttgagctcatcctcgccgccgggacagttgtcgatgccgttgcacattagttccgctgccaggcaggctccgtgtggctgggcacacgggaaccaatgtggcggtcggcacagtcggtagtctggatatccggattggaatgaagattatatgttattcaactacatataagattgtcacaacacgtttatatattattggatatattagtctcactagtaaattcattggaatatggggatgtggcatctctagataggattccctaaccatcaaaattatagctaaagaaatctggttaatccgactccatagtagctatgccctctccatttaaagccaccccctgctgaacgacggcattgattccacccatgctcaccgcagtccaattcatccgagctgtccttgcagtctccgcgtccgtcgcacatcttcgcctgtaagatgcagccgccgtctctgcactggaattgtcccgcatcgcaccgcgtgtccgctgatcccggcgtgccggcagcagtaccaccgcaaagtcccacgagcaggagcagcgagattgccacgtggcgtccattgatgatcagatgtgttcgctggcaatttccgtatcgactggacgttgagccaccactggatgggtgagcgcgtgtctgcgaggttaggttgaatcctcgccggctggcggtcatcttcgggctctctacccggatcctttgctcgctggggtgcacctggtgctcggcctggcacatttaacacgaaacacacacaatttgaacgatgattaacacgcaggactggttaattgaaattaaaacgggaatgggaaacagaaagtatggcttgcagcttggaaagctgaaagcgaattgaacgaggaaaaccgttcggttccaacggaacacgtcgatcagggcagggctttggaaaagcaccgttatttcggagtgaccagatgccagatggttgtacaccgatataaaccgtttggtaatagtttaattggtatttaaaactacatattttaaggcgccaaatttgaaaacagtttcatcataaaagctcacagcaatttattccagtgcatgccaaataccgtacctgggtggcaacgccgttcgacatcaatttaaaaacttgaccatcaaatatcgcaaaaggattgcaccaaatacagcgtgattaattgcccgttcatgatgtcagcggtgtctggaaatttacaaaaaaaaaaaccaaattattgcagtgggaaacgacgggatccgaaacagaaaccgacacagaaacatttacccatttggatgacccattgcaacaattaataacggttatgcccgcaagatttatgagcaacgacagataaacaagaccgaagcgttttggccgcctcaaccgccaaatgtcataaaaaatcagagacaaaacccgaattgctgaattgcttagaaaccagaagagcactcagaaatttgtataattaaggaaaagagcgagtgcgagttcgaattcacacgcggtagggggcgtgccgcgctcgtaaaaacaaaactaacgcgaagccaaacccaaatctgggaatacactggaagaaattagcaggtgcagcttatattacatttaattttctttactaagaattcgaacatacatatatttctgaacaattatggaactagggcaacttacccatattactttaatgcagtcgaaattaaatatttacaacttcaatcaaattttacttattgtattgtatcattgtcttggtatatttattccaataagaaaaaatactggcttagcactagattttctccgtgtgcatggactccataaggcgaacgtggtttttccacgtcgagacaatttgttgcttctatgccggatgagtcg

SEQ ID NO: 950 - DNA, 6254 bp, DROSOPHILA
tggaaccgaacggttttcctcgttcaattcgctttcagctttccaagctgcaagccatactttctgtttcccattcccgttttaatttcaattaaccagtcctgcgtgttaatcatcgttcaaattgtgtgtgtttcgtgttaaatgtgccaggccgagcaccaggtgcaccccagcgagcaaaggatccgggtagagagcccgaagatgaccgccagccggcgaggattcaacctaacctcgcagacacgcgctcacccatccagtggtggctcaacgtccagtcgatacggaaattgccagcgaacacatctgatcatcaatggacgccacgtggcaatctcgctgctcctgctcgtgggactttgcggtggtactgctgccggcacgccgggatcagcggacacgcggtgcgatgcgggacaattccagtgcagagacggcggctgcatcttacaggcgaagatgtgcgacggacgcggagactgcaaggacagctcggatgaattggactgcgactaccgactgtgccgaccgccacattggttcccgtgtgcccagccacacggagcctgcctggcagcggaactaatgtgcaacggcatcgacaactgtcccggcggcgaggatgagctcaactgcccggtgcggccaggattccgattcggtgacaccgctcatcgcatgcgcagctgcagcaagtacgagttcatgtgccagcaggatcgcacctgcattcccattgatttcatgtgcgacggccggccggattgcacggacaagtcggacgaggtggctggctgcaagcaggcggagatcacctgccccggcgagggtcacctgtgcgccaacggacggtgcttgcgccggaagcagtgggtctgcgatggcgttgacgattgcggcgatggaagcgacgaacgaggatgcttaaatctatgtgagccacaaaaggggaaattcctatgccggaaccgagaaacctgtctgaccctgagcgaagtgtgcgatgggcacagcgactgttccgacggcagcgatgagaccgacctctgtcactccaagccggactgcgatgcgaagaagtgtgcgctgggagccaaatgccacatgatgcctgccagcggagccgagtgcttctgcccaaagggattccggctggctaaattcgaggacaagtgcgaggacgttgacgagtgcaaggagcaagatgatttgtgcagccagggatgcgagaacacatcgggcggatatcgatgcgtctgtgatgcgggctatctgctggacaaggataatcgtacgtgtcgcgcagtcgtttacggctctaaggaacagcagccccttctgctgtacaccacccagatgacgattatgggaatgcatctgcgcgaggataacgtacgaaatcatgtctaccaggtggccgggaatctgagcaaggtcattggcgtggcctacgatggcagccacatctattggaccaacatccagaacgaagcggagagcattgtgaaggctaacggagacggttcgaatgcggaaattttgctgacctccggcctggatgcaccagaggacctggctgtcgattggctgacgcagaacatttacttctcggacaacataatgcggcacatagccgtgtgctcgaacgatggactaaactgtgccgttctggtcacccaggatgttcaccagccgcgatcactggctgtttggccccagaagggcttgatgttctggacggattggggtgagaagcccatgatagggcgcgcatccatggacggcagtcggtcgcgaccgattgtcagcgataatatcgaatggcccaatggtattgcgctggacatgcaccagcaaaggatctactgggtggatgccaagttgggcagcgtgcaaacggttcgacccgacggcactggtcggcgcacggtgctggacggcatgctgaagcatccctatggcctggccatattcgaggatcagctgtactggtcagattgggcaacgaagagtgtgcatgcgtgtcacaaattctccggcaaggatcatcgcatcctggccaaggatcgtaccatttacgccgtacacatctatcatccggccaagcagcccaactcgccgcatggttgcgaaaatgccacatgctcgcacctatgcctgctggccgaacccgaaatcggtggtcacagctgcgcctgtccggatggcatgcggctggcgccggatcatcggcgctgcatgctaatggagaagcgccaacgattgttcattggcctcggtcaggtgctgctcgagatcgagcacaccgcctttgggcgccatcaggtgagcaagtcatacacgctgccctgcttgatcaacgaaatggtgtacaatcgcatcaatggcagcctgataatagcggacaatgaccagcgactgatcctggagtttcagccagagtcgcacgagagcaacgtcctggtccgctccaatttgggcaatgtgagtgccctggccttcgatcatttgagcaggaatctatactgggcggatacggagcgggctgtgattgaggtgctctcactgcagacgcgccatcgtgcgctgatccgcttctttccgggccaggaggtgccaattggactcactgttatgcccgcggagggctatctgtatgttgtgctcaaggccaagcggcacagccacattgacaagataccgctgagcggcaagggcgaacaggtgcatgtattcgaggacgatctgggcgatgatgatatcaagctggtcaccgattacgagacccaaacgatcttttggtcagacagcgatctgggcaggattagctactcgaattacagggtgccgcacagccaaatctttcggggcaagcttaggcgtccctatagcctggccatggtgcatcacgatctgttttggaatgaattgggtacgccaaggatttactggacgcacaagagcaatatggggccgcgaaaggtgatcgatataatggagaaggacgatccggccgccattatgccgtacgtgcctgtggccacgcccaatggaattccgctggccgccagctcacccgtcggccaggaatcgcatccctgccagcagcagaatggcggctgttcgcacatctgtgtgggcgagggaccctaccactcgatctgtctatgtccggccggattcgtttaccgggatgcgggtaaccgcacctgcgtggaggctctggactgtgagttccgttgccacagtggcgagtgcctcacaatgaatcaccgttgcaacggacgacgcgattgcgtggacaattcggatgagatgaactgcgacgaggagcatcggcgcaagccaaaggttctgtgctcgcccaaccaattcgcctgccacagcggggagcagtgcgtcgacaaggagcggcgatgcgacaatcgcaaggattgccacgaccattcggatgagcagcactgcgagaagttcgacaagagcaagaagtgccatgtccatcagcacgggtgcgacaatggaaagtgcgtggactcgagcctggtgtgcgatggaaccaatgattgcggcgataattccgacgaattgctgtgcgaggcgacatcgcgatgcgaaccgggaatgttccagtgcggcagcggatcctgcatagcgggcagctgggagtgcgacgggcggatcgattgtagcgacggatccgacgagcacgacaagtgtgtccatcgcagctgtccgccggacatgcagcgctgtctgttgggtcagtgtctggaccggagtctggtgtgcgatggccacaacgactgtggcgataagtccgacgaactgaattgcggcacggactcatccacgatgaacatatcctgcgcggaagatcaataccaatgcacgagcaatctcaagatctgtctgccgtctacggttcgctgcaatggcaccaccgagtgtccgcgcggcgaggatgaggccgattgcggtgatgtgtgcagcatatatgagttcaagtgccgctccggtcgagagtgcatccggcgggagttccgctgcgatggccagaaggactgcggcgacggcagtgacgagttgagctgcgaactggaaaagggccatcacaatcagagccaaattcagccgtggagcacctcgagccgatcctgtcggccacatctcttcgattgtcaagacggcgagtgcgtggacttgtcgcgggtatgcaacaatttcccggactgtaccaacggccacgacgagggacccaagtgcgccaccgcctgccgttcggcatcgggtcgccaggtgtgccagcacaagtgccgcgccacaccagccggcgccgtgtgctcctgcttcgatggctatcgcctggacgcggatcagaagagctgtttagacattgacgagtgccaggagcagcagccatgcgctcagctatgcgagaataccctcggcggctatcagtgccagtgccatgcggactttatgctgcgccaggatcgcgttagctgcaagagcctgcagtctggcgccactctgctcttcagcagcttcaacgaagtgcgaaacctaagcgaacagcccgttatgctcaatgtggcctggtcggcgaatgattcgaggatcaccggtttcgatctggccatgcaccggcaaatgggttacttttccgccgaggacgagggcatcgtctatcagatcgatctgcaaacgaaggtgattgtgcgggctctgggtctgcccgcaccgacgaaactctccgtggattgggtcaccggaaatgtttatgtgctcagtggagcgcaggagatccaagcgtgcagtttcgtgggacgcatgtgcggccgcattgtgcacgtgaagagtcccaggcacgttaagcatttggctgtggatggctatcacgcccggatcttctacatagtcatacgcaccgagggctatggccagacgagctcggagattcacatggctcgactggacggcagtcgcagggatatgctgctgcagcgaagcgaaagcttcatgaccgccctgaccaccgatccgcatcagcagctattgtactttgtggaccagcatatgcgcacgctggagaggattagctataggcttaaaacgggtcccatgcgtcgaccggagataatgctgcaaaagtccaacgctctgatgcatccatctgggctgagtgtgtacgaaaataatgcgttcatcgtgaacctgggctccgtggaggcggtgcagtgcgcactgtacggatcccgcatctgtcacaagatcagcattaacgtgctgaacgcccaggacattgtggtggcgggcaggtcgcgtcagccgcagaaggcgtcgcatccatgcgcccatgcccactgccatggactgtgcctgcaggcggactacggttacgaatgcatgtgtggcaatcgtctggtggccgaaggcgaacggtgtccccatggctctggcaatgaggtggccgtgttgggtgcggtcaacagcctggaattggaacatgaacacgagcagaacggtcactttcactggctgatggcactgttcgtcctagccgccggatcactgatcgccggactcgggtacatgtactatcagtaccggcagcgcggccacacggatctcaacattaacatgcatttccagaatccgctggcgacgctcggcggcaccaaagcgttcctggagcacgaacgcgccgaggcgggagtcggcttcaccacggaaacgggaacggtgtccagccgcggcagcaacgacacattcaccaccaccagcgccacgtcctcgttcgcggctcagcagtttagtgtgccgaatgcgctccagcgactgctccgtccacgacagtcggcgtccggcgatccgatggctcaggaattgcttctcgagagccccagcagagaaagcaaactacatgcgctggacggaggtggggccggaggcgatggcgatggcggacgcggagttgggcggcaggtgccggacatcctggtggctgacatggacgacgatgccgccaaatcagccggacagttcgggggaaattacgcaggcaatgatgcgaatgcacgatttgtgtcgtaaatgagtggcagtggttatttatttattttattattgctgctgtttgctgtttattatatctatgtatttattgtagcgttaaaatgatattgtatttaaatgttaatcggtgattggagtttatatagctagcaaaatattaaaaactaaatcga

SEQ ID NO: 951 - protein, 1963 aa, DROSOPHILA
MTASRRGFNLTSQTRAHPSSGGSTSSRYGNCQRTHLIINGRHVAISLLLLVGLCGGTAAGTPGSADTRCDAGQFQCRDGGCILQAKMCDGRGDCKDSSDELDCDYRLCRPPHWFPCAQPHGACLAAELMCNGIDNCPGGEDELNCPVRPGFRFGDTAHRMRSCSKYEFMCQQDRTCIPIDFMCDGRPDCTDKSDEVAGCKQAEITCPGEGHLCANGRCLRRKQWVCDGVDDCGDGSDERGCLNLCEPQKGKFLCRNRETCLTLSEVCDGHSDCSDGSDETDLCHSKPDCDAKKCALGAKCHMMPASGAECFCPKGFRLAKFEDKCEDVDECKEQDDLCSQGCENTSGGYRCVCDAGYLLDKDNRTCRAVVYGSKEQQPLLLYTTQMTIMGMHLREDNVRNHVYQVAGNLSKVIGVAYDGSHIYWTNIQNEAESIVKANGDGSNAEILLTSGLDAPEDLAVDWLTQNIYFSDNIMRHIAVCSNDGLNCAVLVTQDVHQPRSLAVWPQKGLMFWTDWGEKPMIGRASMDGSRSRPIVSDNIEWPNGIALDMHQQRIYWVDAKLGSVQTVRPDGTGRRTVLDGMLKHPYGLAIFEDQLYWSDWATKSVHACHKFSGKDHRILAKDRTIYAVHIYHPAKQPNSPHGCENATCSHLCLLAEPEIGGHSCACPDGMRLAPDHRRCMLMEKRQRLFIGLGQVLLEIEHTAFGRHQVSKSYTLPCLINEMVYNRINGSLIIADNDQRLILEFQPESHESNVLVRSNLGNVSALAFDHLSRNLYWADTERAVIEVLSLQTRHRALIRFFPGQEVPIGLTVMPAEGYLYVVLKAKRHSHIDKIPLSGKGEQVHVFEDDLGDDDIKLVTDYETQTIFWSDSDLGRISYSNYRVPHSQIFRGKLRRPYSLAMVHHDLFWNELGTPRIYWTHKSNMGPRKVIDIMEKDDPAAIMPYVPVATPNGIPLAASSPVGQESHPCQQQNGGCSHICVGEGPYHSICLCPAGFVYRDAGNRTCVEALDCEFRCHSGECLTMNHRCNGRRDCVDNSDEMNCDEEHRRKPKVLCSPNQFACHSGEQCVDKERRCDNRKDCHDHSDEQHCEKFDKSKKCHVHQHGCDNGKCVDSSLVCDGTNDCGDNSDELLCEATSRCEPGMFQCGSGSCIAGSWECDGRIDCSDGSDEHDKCVHRSCPPDMQRCLLGQCLDRSLVCDGHNDCGDKSDELNCGTDSSTMNISCAEDQYQCTSNLKICLPSTVRCNGTTECPRGEDEADCGDVCSIYEFKCRSGRECIRREFRCDGQKDCGDGSDELSCELEKGHHNQSQIQPWSTSSRSCRPHLFDCQDGECVDLSRVCNNFPDCTNGHDEGPKCATACRSASGRQVCQHKCRATPAGAVCSCFDGYRLDADQKSCLDIDECQEQQPCAQLCENTLGGYQCQCHADFMLRQDRVSCKSLQSGATLLFSSFNEVRNLSEQPVMLNVAWSANDSRITGFDLAMHRQMGYFSAEDEGIVYQIDLQTKVIVRALGLPAPTKLSVDWVTGNVYVLSGAQEIQACSFVGRMCGRIVHVKSPRHVKHLAVDGYHARIFYIVIRTEGYGQTSSEIHMARLDGSRRDMLLQRSESFMTALTTDPHQQLLYFVDQHMRTLERISYRLKTGPMRRPEIMLQKSNALMHPSGLSVYENNAFIVNLGSVEAVQCALYGSRICHKISINVLNAQDIVVAGRSRQPQKASHPCAHAHCHGLCLQADYGYECMCGNRLVAEGERCPHGSGNEVAVLGAVNSLELEHEHEQNGHFHWLMALFVLAAGSLIAGLGYMYYQYRQRGHTDLNINMHFQNPLATLGGTKAFLEHERAEAGVGFTTETGTVSSRGSNDTFTTTSATSSFAAQQFSVPNALQRLLRPRQSASGDPMAQELLLESPSRESKLHALDGGGAGGDGDGGRGVGRQVPDILVADMDDDAAKSAGQFGGNYAGNDANARFVS

SEQ ID NO: 952 - DNA, 3535 bp, DROSOPHILA
taaaatatattaaactcaatgtgttccattcactaaagatagtaaacaccattatcgtatagataaaagttatacctttccattttgggttaagataagcgaaagtcaagttgaatgagcctaataagcgatttgaaatggttaaaaaacaaaaggatatgcacttggttttatattagcaattttttgtttttgttttttgaagttgaagcgagaagagcccatgtgtaagttattcgaaagtatggagcacttggtggccagccactcacctcgcgcagcaatccaaagagcacgtccgtcgaaagggatcgctcgtgggcctcgtccataatgatggcggagtagctgtctagttccggatcacgcagactctcgcggagcagaataccatccgtcatgtacttgatgaccgtgcgctccgacgtgcagtcctcgaaacggatggcatagcccacgtcctcgcctgcaaacagaaaggatggcgtgggattaggcttaagcttaagcaaagattggaatttcatggttgactgtttaggaatcactctttcacacagattgagaaacattgagaaagaaagagagcgcttcctaaacacttctagagtaaattgcctacccagctgggtgtccatctcgtcggagactcgcttggccaccgacatggcggccacacgacgcggctgcgtgcaaccgatcatgccacgcttgctgtagccatcctcgtgaagatactgggttagctgtgtcgtcttgccgctgcccgtctcgcccacgataatgatcaccgagttctcgcgaataacgttgagcaactcttgacgcgatgcgaaaacgggcaggaagcggcgctgctccgagatggtctttttgcgcgagaaatcgctcttgccacccgtatcctggtcgcgcatatggtcggcgaacttctgatccttgcgatagtcggccttgtccttctccttgtcgaaacgcatatcgtcctcgtcctgcggccgctgtacacccataatgttgcccagcttggtgccgctcagctcccagtgcttcttttgcgccttgcgccgctccttttgctcgcgatagttgcgcaccagggcgctgcccttgcgcgccagcagtgccatatccgaggtgggatccttgacgggcaccaccggctccggttgcttggtgaacacgatgcggccgtcgagaaatggcggtattatgtgatgcaccaggagatgcactcgctccagcgcctcctcatcgaaatcgtcgttgacgctgatcaatgtgaccacgcccgaggtgagcatacgattgcgctcccacaactcgttgtcacggttattctggcgctgctgagcgctgattctctttgttctcttctgctccagctgctcttcgcgcttgcgaaagtactcggagttggggccaccgaatggattgttctcatcgtcgtagccctcgtcaatgttgtaccactcgcggtcgaggcgacgctgctcctcctcccacagatccagcgattcgggatcctcgccccatggcgttgcgccgcttcgcttgcgaccgtgtgcccactgattgtagcgatgcgctggcgttggccggacagtgtcatcctggcgtccgtgattacgccgactgccgccgctccgcactgaccaatcacccgacttgttgccatggcgtctgggcgttggcatatcccagtccgacttgcgctgtccaaactcgccgtcctcgtcgtcccacgagctattggatatgccaccgctgctgccgcctggtgttcccggctcacgcggcgtatggacactgcgctcggacatggagcgatcacgatcacgatcacgaccacgatcccgatcccagctgcggtgccgatcgcgctccctttctctgtgttggcgccggtcgcggtcacgatcccgatctctgtcccggtccctgcgtcggtcacgatcccagtcgcgatccctgtccctgccctctgccgctgtgctgctgactgggccacgttttctgtcccgctggatgtgctcgcgcagacgctcgcgtgccttctcggaaacgccgccggtgtgcgagggtgtatcgtctttgtgctcgcgcagctggccgcgcagcttttcgaagctcttggtgtccggtttcttgaaggcaaactcactggaagcgccagaggcgttggcctgcggcgtggagctcccgccgccggtgtcatcgaattcgctgtccttgaaggagatcagtcgctcggatcgctccttttcggcccgtcgcttggccgccagcttgtccaggcccaacatcgatccctgcggcaccttgaatccaccgccaccgccagcgccggcatccttgggcttccggatgaccaggccgccgcgcgtctcctggccagcggtgccctccagccgatggacacccgactcgtcgtcgtcggacatcctgttgtgctggttagtctgttgctccttggctatttcgcgagtcttgctcgttgtcgcaaaaacgattcattcgcgttggcgttcttgggcacagctgatcggcggggctgccatcccgctaaaaaaaaaaatgctggacagcagtaatgccactctgggttaattgtcgttacgaatttacattttattctaatgcagaaaattagtttttaaatacttacttttaaatattatttagcttgaaatatttatgtgcatgtgcgcaactgtaaaattatatctatttcgtttttccacttattattttctttgttgcattttgttttgtttaatttattggtagaacttgtaaccgcataataagatggtaagttgtatttgaaatggaataactaagctttatatattgcaagatacaataattatgattatgtgatcaaatgtccatttccattttctcaaaacatttaaattacattaaaagtttacagctaaacaaagagtggcaatgctagaaaataaagcccttgttaatttttaaaaaaataaattaattttccagataaccgttttatttccattaaatggactgcaaattgaatttagtctttgctctcggcctttgtgggaaccgtctgcgcgatccaatcgagatacggcggattgccattctggatgggcagcgcgatgacctcggcgacgctgtagggatgattctcgcggatgaacttgctcagatcgtcgatgcggctggtgcgcgtcttgatcatcaacagatattcggagtcctcgctaatctcgccttcccacttgtagatagactcgacttgggacacaatgttcacgcatgcggccaatttcaactcaacgatgctgcggcccagctttctggctgactcccgatccggagtggtcacaaatgccaccgagctgctgcccgactgataggcattgcctgtcgccgctgattgttgctggtcgcccattttggagcattcactggaattggaattcgaattcgaattggtactggaactggcgttggcggcactggaagagaagcaacaacttttgtgactgctcgctgt

SEQ ID NO: 953 - DNA, 2122 bp, DROSOPHILA
ccaagaacgccaacgcgaatgaatcgtttttgcgacaacgagcaagactcgcgaaatagccaaggagcaacagactaaccagcacaacaggatgtccgacgacgacgagtcgggtgtccatcggctggagggcaccgctggccaggagacgcgcggcggcctggtcatccggaagcccaaggatgccggcgctggcggtggcggtggattcaaggtgccgcagggatcgatgttgggcctggacaagctggcggccaagcgacgggccgaaaaggagcgatccgagcgactgatctccttcaaggacagcgaattcgatgacaccggcggcgggagctccacgccgcaggccaacgcctctggcgcttccagtgagtttgccttcaagaaaccggacaccaagagcttcgaaaagctgcgcggccagctgcgcgagcacaaagacgatacaccctcgcacaccggcggcgtttccgagaaggcacgcgagcgtctgcgcgagcacatccagcgggacagaaaacgtggcccagtcagcagcacagcggcagagggcagggacagggatcgcgactgggatcgtgaccgacgcagggaccgggacagagatcgggatcgtgaccgcgaccggcgccaacacagagaaagggagcgcgatcggcaccgcagctgggatcgggatcgtggtcgtgatcgtgatcgtgatcgctccatgtccgagcgcagtgtccatacgccgcgtgagccgggaacaccaggcggcagcagcggtggcatatccaatagctcgtgggacgacgaggacggcgagtttggacagcgcaagtcggactgggatatgccaacgcccagacgccatggcaacaagtcgggtgattggtcagtgcggagcggcggcagtcggcgtaatcacggacgccaggatgacactgtccggccaacgccagcgcatcgctacaatcagtgggcacacggtcgcaagcgaagcggcgcaacgccatggggcgaggatcccgaatcgctggatctgtgggaggaggagcagcgtcgcctcgaccgcgagtggtacaacattgacgagggctacgacgatgagaacaatccattcggtggccccaactccgagtactttcgcaagcgcgaagagcagctggagcagaagagaacaaagagaatcagcgctcagcagcgccagaataaccgtgacaacgagttgtgggagcgcaatcgtatgctcacctcgggcgtggtcacattgatcagcgtcaacgacgatttcgatgaggaggcgctggagcgagtgcatctcctggtgcatcacataataccgccatttctcgacggccgcatcgtgttcaccaagcaaccggagccggtggtgcccgtcaaggatcccacctcggatatggcactgctggcgcgcaagggcagcgccctggtgcgcaactatcgcgagcaaaaggagcggcgcaaggcgcaaaagaagcactgggagctgagcggcaccaagctgggcaacattatgggtgtacagcggccgcaggacgaggacgatatgcgtttcgacaaggagaaggacaaggccgactatcgcaaggatcagaagttcgccgaccatatgcgcgaccaggatacgggtggcaagagcgatttctcgcgcaaaaagaccatctcggagcagcgccgcttcctgcccgttttcgcatcgcgtcaagagttgctcaacgttattcgcgagaactcggtgatcattatcgtgggcgagacgggcagcggcaagacgacacagctaacccagtatcttcacgaggatggctacagcaagcgtggcatgatcggttgcacgcagccgcgtcgtgtggccgccatgtcggtggccaagcgagtctccgacgagatggacacccagctgggcgaggacgtgggctatgccatccgtttcgaggactgcacgtcggagcgcacggtcatcaagtacatgacggatggtattctgctccgcgagagtctgcgtgatccggaactagacagctactccgccatcattatggacgaggcccacgagcgatccctttcgacggacgtgctctttggattgctgcgcgaggctcattcaacttga

SEQ ID NO: 954 - protein, 676 aa, DROSOPHILA
MSDDDESGVHRLEGTAGQETRGGLVIRKPKDAGAGGGGGFKVPQGSMLGLDKLAAKRRAEKERSERLISFKDSEFDDTGGGSSTPQANASGASSEFAFKKPDTKSFEKLRGQLREHKDDTPSHTGGVSEKARERLREHIQRDRKRGPVSSTAAEGRDRDRDWDRDRRRDRDRDRDRDRDRRQHRERERDRHRSWDRDRGRDRDRDRSMSERSVHTPREPGTPGGSSGGISNSSWDDEDGEFGQRKSDWDMPTPRRHGNKSGDWSVRSGGSRRNHGRQDDTVRPTPAHRYNQWAHGRKRSGATPWGEDPESLDLWEEEQRRLDREWYNIDEGYDDENNPFGGPNSEYFRKREEQLEQKRTKRISAQQRQNNRDNELWERNRMLTSGVVTLISVNDDFDEEALERVHLLVHHIIPPFLDGRIVFTKQPEPVVPVKDPTSDMALLARKGSALVRNYREQKERRKAQKKHWELSGTKLGNIMGVQRPQDEDDMRFDKEKDKADYRKDQKFADHMRDQDTGGKSDFSRKKTISEQRRFLPVFASRQELLNVIRENSVIIIVGETGSGKTTQLTQYLHEDGYSKRGMIGCTQPRRVAAMSVAKRVSDEMDTQLGEDVGYAIRFEDCTSERTVIKYMTDGILLRESLRDPELDSYSAIIMDEAHERSLSTDVLFGLLREAHST

SEQ ID NO: 955 - DNA, 9381 bp, DROSOPHILA
aaaagaagcgagatccacgaagaagctgcagaaaggcgaacaaaagttgacagcagagggtatgaaggaaggtgagcgagagggaagaggctaaaagtgacgagggcgaaaagctcagagagcaacaactactgtttattttgaaaagaaataaaaacagagcagggaccgacacagtttgagtggctgcgagcaggacggcgcatgcgagtgagagcatttttgttaaactgtcataaatcttaattgtgatggaatcggattcggaataggacaaaagaagggtgacgaaacgacaaaacagatttcacacactttcggagcaagcgagacggagcggtcccacaacgctatctctttccctagcgatttcccctgtttcagttccaagcgttcacttgccagcacaggggaaagtctgcgctcttgtcgctctctctctctcttctctctcgcgctctcttttggctacccatcggtttcgggttcttttcgccaagagtcagtcagtcgacaagaaaccgttactgcgtacgatcgtgcgaaaaagctcggcgcacttggaaaaatcgtacggtaattagttagccgagtgccggcgagtgcgagcgagagagtagcacatttaatcacgctgacagccagcttgtcctgcaagggtgtgggtggcacacacggcacacacaacacacacacaagtgcgcagccgtcgccagaacgcaaaatcgaatcagaaattgccgtcgccaaaacgcgggcttcgtgtttgctcgtcaacagcagcgcagcttccaatcgctgcgcgtccgtcgcgtcgcttcattttttcatccgtatcaatcagtgaaggcagagcagcagcgccccgttgttgttgtttgtcagcttgacagcgacggcagcgcagcagcagcgcaccggcagagcaccgcagcagaggctagtgacgaaggaacccggccagcgggattcaatcgcctttggactttcgttcgagtagtgacgacgaatccggatgagaagacgcacgcatcgcgacccgcggttccgccagaacagtgaattctcagtttaaaacgcgtttttgggggaggatagaacgagtgttttccaggccgccatcatatctagtcaaagaagcagaggtttgatactctcgaacgcaaatgctcgatcaagactgaaacatacgagaaacatacaactacaaatggttcaacaaagtatacgtaaaactaccacaagctaaacaaaatataccacaaaaatatatttattaccaaaactaaagataaactattgcaaatatttacattaaacggtatttaattcaccaaaattacactacatacataatgtaaagccagttacttaaatcaacaaaccttaacgaagtatacgattcaatgcaattaataaattaaatttaaatcaacacaaattaggaattaaaaatacaaacgcctcgaaacgtcattttttgtctgacatacgaaagtttataaattacaaaatccaaaaaatataaattaatcagttatacgctgcaacaacaacaagttatactacaacgtaccaagtgcaaaacaatagattatatgatcattgtgtcaaactaaagttaagttccaaaatccaactaaaatcctcgttgtttgctccaaaaagagcaaaccatccaagttccagcaaaccgtcaaaattcagcaaaatttaaaaatgttacacgaggctctgatgctcgagatctacagacaggcgctaaatgccgggtaagtgttatatggaagattatttccatagaacagtgaaagatgtagaattaagaaaaagattcacatggccttattcgggggattcaaaaatgtgactactctgggtatgaaggataaacgaactgagattttactaccaaagtgcatcaaagtgtttttcattatgaaatagtgaaatattgaattcttaactaaaagtggccatactcaaaatattcacatataaaataattacattcatctcattcagttaatattatttttttgcaattgctttttatgtgcgttcaagtatctggttaaatagaatattatatataccaagtatatacgacatatattgaatatagaacgttttcaatcaaaatcaaaaaccattgtcattgtgaactgatagccgaacttgttgaaatagtattgcagactctcaaccacaaatcggccaaataaatatatcaagaaactatgatttcatggcatttgatgattggcattggcggttcggcgtagtcgcacacctgtcgttataaattcagcgcctcgccaatagcgcgcccatatatcacaacacccacccgcagaaccaagagtactgagttcacgactacgagtccagaccctcggatcgggaaaagcagaacttgatttgaaaagggtggctggcaggggaaatccgaaaataacagaaaaatcgccatagttcgatgatgggatactaacttggggtaagcgtttgtgtatctgtatctgggtttctctgaaattatgattaaacaagttcaagatatttttcgaactcgctctcgaacagtcactcgagtgagcctgagtctgagcaaattaactgaaggctaaaaacgggttttatgacactatatttgcgggggcgagggtattcgggggtgcatctggagtattaataataaagtgcgacaaattgtctcgctctcgtttgatttgcatgcagatacacacgaattttcaagattttccaaggcgatgacgtagtcgaattgaataaatcatgcgaaaaagtgaaaaactcaaaatacgctacgctctgcttgccatcttttccattctccaccccctccaatttccccgtgtgcgcctattaccggagagatttatgttcacaatttgccgctggcgtgtgcgtgtgcgtgtggctgtatctccgggtgcatgtgtatgtttagtaatatttactctgctaccttaacggatttgtcgtgccttagatttgctttaacagggacagtgtgttgtattcggcacaaatagatatactgttattaataaccttcatttcgcagtatatagtaaaaatatactagggaataaacattttaaacaataattctactataaaaaaattcagatcggtcaactcatatttatttatattctcacctgaggtccaaccaactctcccatatcacaccaatgggtgtactcccactattttagttagcctgagcgttacgggtgcatatcaatatgcaactctctcgattattaatgagacatttcaacttgtaattaactgcacttgctggagttgcgtataaatcattttgatttaagcctaatcgaataacgagatttcagattatgatatgctggcggagaaaactcgttgccaagtattttatactagtcaagcaaaataatggagaaacgagccgctaaatgggttgtttgcgggctcaatcgccccttgcaatctggatagctaattagcggtgagtgattgcgcggtgtgtgtaataactatctttgataaactgtcacctggcaggtgactgagttcaaaataagctgcacatgaatcagattttgttccgacgttccttaagatatcatcaatattgcgctaggccggatttgttagtaaacaatccatcaattaaacactgactttctgatagggcccagtgacaaaactcctccgaatcaaacaacttaatgccggttaagaatttcatttttcggtgaacgatcgctcgtcacacaatagcacatgacaattacttgatattcgacgcttcgaccaacttaggcagattttacaggctgattttcacgttcaaatattgattaagtttggttatttccgtccgtttcaaatgcaaacccaatcagcaaagcacaatgcgcacccacacacaaatacaaagttattatatagagctatcatcaaaaatttataacctttgcatatacttcaaagttaatcagacaatcattcaaaataagctaaacggaatccgctgaattatgtttctgtgaaatattttctaagcaaacaatcggtgctataaaaattataagtggttttgatttgaatgttacacacttgaacaaatgtaggaaataaagtttaaagattcggtttctctgatggcaaattattttccttattcttttttttgttttctctgctatgagggcaataaaatttgtttattccatctctatttatgcacatttttcaacagcccaattaatttattcaaaccatgaggaatttgtggtcggtcagccaaacgataattgcctccaagtttgtcaaatacttgaatctcttctcggattccgatttttgattatgatcggcattgctcataacgcacgcctaaagtctcgaattaatcgccattgtttcatttggatttttactacccatgttggaggggggtgtgtgtgtgttgccgactaaaacacatctgcgtgcgcaagagttttattttttctattcgggtttgccttatggcgctcagaaatttgaataacaaatcgaaatgttgacatatgtttgccattgatggcattgtaggttccccttgccggcgaatgatttagcacagagcgaagccaaataaatagtaaaccgcactataacgatttccaatgcttttgattgcttatctaccggtctcatccggagaaatgtttggcctgcgaaagtcaaaggcggttggcgaaaaggggcgagatagctctgtcgtttaaattgttttctaattcagatattcagaggtgatagattgctgattaggtctaaacgattagcttaattgtctgaatgcggcgaatgcgaataataaaatgaaaagtaaaaccccctattgatgcgttacacgttcgttttttttttcgttcgatggctattcttctgtttggtattattccccccatcagtaatttcattttgaattccatattaatcaatacttcctatagtgcaacaaatatcatgccacttactgcaataataagcatctattgttcttaggagttcttatgttggcataatcaatcctgggtgcgcggacttagatccgtactatagtcttaagcttttatttaagcaattgctattgcaatattgagttattgcaacttatttgagttatttattttgagttatatttttaaagtaaaatttaataactgaacttcaaattaattattaaaatcattaatcaccattattttatttgcagagctctgcccacagctcgaccacgttccactgagtcggcgaattccagcgagcggtgtccgtcacacgactcaaactcctcggaacatggtggtggtgctggcagcggcggagtaggtcatcggttggacgcagccgctctatcaaccggggtgatgcccggagaagggcccaccactctgcactcatcatttccagcagttccgcagtccctgccctcccagccgccctcaatggaggcgtacctgcacatggtggcagcagccgctcagcagtatggattccctttggccgctgctgcagcggctggggcgggtccacggctgccactcccactcgctaatgaggcggcggctccatttaagcttcccccacaggcttcgcccactgcatcgagtaataactcggaggctctagactttcgcaccaatctttatggaagggcggaatcggctgagccacctgcctctgagggcgaggaggaggaattcgatgacggtgccaacaatccactcgatctctctgtaggtacccggaaacggggtcacgaatcggagcctcaacttggtcacattcaggttaagaagatgttcaagtcagacagcccacccgcgaattccgtggcttcaccctcagccagtcaactgttgccaggagttaatccttatcttgccgctgtggcagccgccaatatttttcgagcgggtcaattccctgactggaatagcaaaaatgatttggttgtggatccgctggaaaagatgtctgatattgtaaagggtggagcgagtggaatgggtaccaaggaaaaaatgcactcctccaaggccacaacaccacaggcagcatctcagccgccaaaaagtccggttcaaccaacacccaaccaaaattccgaatccggaggagggtccggaggcggtgctgctggtagtggcgcagtgaccaaagcgaggcataacatttggcaatcgcactggcaaaacaagggtgtggccagttcggtgttcagatgtgtgtggtgcaagcagagtttccctaccctggaagccctgaccacccacatgaaggacagcaagcattgcggcgtgaatgtaccaccttttggtaatctgccaagcaacaatcctcagccgcagcaccaccatccaactccacctccaccgccgcagaatcataacctccgaaagcatagttcaggaagcgcttccaatcactcaccatcggcaaatgtcaagaatgcattccaatatcgaggggatccacccacgccactaccacgaaaattggttagaggccagaacgtttggcttggcaagggtgtggaacaggccatgcagatccttaagtgcatgcggtgtggagagagcttccgatctcttggcgaaatgacaaagcacatgcaggagacccagcactacacgaatatcctatcccaggagcagagtatatctatcaaatcagggaatgccaatgccaactcagatgccaaggagagccacaacagtctgagttccgaagaaagtcgcactctcagtgctgtcctcacatgtaaagtgtgcgacaaggcttttaattctttgggtgatttaagcaaccacatggccaagaacaaccactatgcagaaccgctcctacagtctgcgggagcacgaaagcgaccagctcctaaaaagcgcgagaagtccttgccagtacgcaaacttttggaaatgaagggcggatcaggaacgacgcaagaagatcattcaaacgaaaaaacctcggtgcaaggaaaaccaggcttgggacctggtggaggcgataaaaacgatgctgccctttttgccgaacgcatgcgacagtatattacaggggtaaaagctccagaagaaattgccaaagtagctgctgcccaactcctagcgaaaaacaagtccccagagttagtggagcagaagaacggcggcagcgcaaaggctgccggtgcctcgtctgttttaagtgccattgagcagatgtttacaaccagctttgacacgccacccagacacgccagcctgccagctagtagtccatccaactcatccaccaaaaacacttcgcccgtggcctccagcatactgaaacgattggggatcgatgaaactgtggactacaacaagccattgattgataccaatgatccctattatcagcactatagatatacaagcagcgaaaggagtggcagtgagtgcagtgcagaagccaggcctagattagatgcaccgactcccgaaaaacagcagcaaggaggagggcatgacgaggaatcttcaaagccagcaataaaacaagaaagggaagcggagtcgaaacctgttaaaatggagatcaagtctgagtttgttgatgagccaaatgaagccgaggagacatccaaaatggaggcagctgtggtaaatggaagtgccaccaataataacaataatattgtggaaaggagttccccaaaaacaccgtcttcggcagcaagtcctcagacaaggttgctacctccccgaagccctgccgagagtcagagatcagttactcctaaatcacccgcttcgagccacaaatcgtacgatgggagttcggaaggcacaaagaagtttccaagtgattccctcaacgcattgtcatctatgtttgattccttgggtagcagtggggccggtgctaactccagagctaagctagcagccgcagctgctgctggaggatcagaatctccagagaacctcaccgccggggggaactccttggcggccttgcgacaattctgcgtgaagaaggagaagaccgcctaagtccgcgagctgagacgaaaagagaaaccgaatcatttgccttgttttcgttgtttcgagcaaaacgcattttcaacattttttggtttgtcagcgccttgccttcgccccgaatctaaacaccctcccccagcgccagtcggggttttgagttcagggtggctttggcctggtgaaccgagattcaagtcaaagtgccacggatagagccactggatgcatctgtctttaaaagtatggcgggcatgatttgttttaactggacaaaggaacaagtataaacagaagaatccgccttggaaactgggaaattttgcgatgattgtgacgattgtgttaacgactgtacagaatggtataatactcgatacagtgagggtgctatcttggcccagcatgattcctgccacgttcagttccactggcccttcagcaagcccttaggcctactttttcaaggtaagttttacgaaagatttaatggtagttgtttaattttaattatggttttagtgttcgtagatttgtattgggagtttgaaatctaaaataagtcaaaattagacagagatttgtgctctataaaaacgatttactaagaattcccttctgtttttttgttttaccattttaggatagaaatcagaaagcgccatttgaattccttgaaagactggttctatctgctgatcggagattgaacggaaactggacgaaccctacacccgaaaacacgagtccttgttggggatgtcacatgccaaggcgaaaagatataaaattggataagaaaacattgtgatcaaatacaagataaaagtttttatgcaactattaagagattatgtattggtggggcaaaacgggacagttagataaatggaaacagttctcctccttcgctttggggtctttggcaatttttggaattaccagcataagctaaagcggaactaccacaatcacaaccaggggatagaaagaacatcgccattattgccgctttctgaattactttcgacggttgaggggttgaagacgcagtggaaaggctgcttgattgatcagtgatggctgaatgtagtctacattgctggcccggtccatttcctcatgtgctatttccacattcactggctgaaaaataatatccgggtgccatatgtgcctcccgttgggcatcccagatatcaaaaaacgcacaaatctcttgatacttacgttgttgatctacagtgttatatatcgccctttttgggttcagttttatatcgcgtaccaagat

SEQ ID NO: 956 - DNA, 3869 bp, DROSOPHILA
tgacgacgaatccggatgagaagacgcacgcatcgcgacccgcggttccgccagaacagtgaattctcagtttaaaacgcgtttttgggggaggatagaacgagtgttttccaggccgccatcatatctagtcaaagaagcagaggtttgatactctcgaacgcaaatgctcgatcaagactgaaacatacgagaaacatacaactacaaatggttcaacaaagtatacgtaaaactaccacaagctaaacaaaatataccacaaaaatatatttattaccaaaactaaagataaactattgcaaatatttacattaaacggtatttaattcaccaaaattacactacatacataatgtaaagccagttacttaaatcaacaaaccttaacgaagtatacgattcaatgcaattaataaattaaatttaaatcaacacaaattaggaattaaaaatacaaacgcctcgaaacgtcattttttgtctgacatacgaaagtttataaattacaaaatccaaaaaatataaattaatcagttatacgctgcaacaacaacaagttatactacaacgtaccaagtgcaaaacaatagattatatgatcattgtgtcaaactaaagttaagttccaaaatccaactaaaatcctcgttgtttgctccaaaaagagcaaaccatccaagttccagcaaaccgtcaaaattcagcaaaatttaaaaatgttacacgaggctctgatgctcgagatctacagacaggcgctaaatgccggagctctgcccacagctcgaccacgttccactgagtcggcgaattccagcgagcggtgtccgtcacacgactcaaactcctcggaacatggtggtggtgctggcagcggcggagtaggtcatcggttggacgcagccgctctatcaaccggggtgatgcccggagaagggcccaccactctgcactcatcatttccagcagttccgcagtccctgccctcccagccgccctcaatggaggcgtacctgcacatggtggcagcagccgctcagcagtatggattccctttggccgctgctgcagcggctggggcgggtccacggctgccactcccactcgctaatgaggcggcggctccatttaagcttcccccacaggcttcgcccactgcatcgagtaataactcggaggctctagactttcgcaccaatctttatggaagggcggaatcggctgagccacctgcctctgagggcgaggaggaggaattcgatgacggtgccaacaatccactcgatctctctgtaggtacccggaaacggggtcacgaatcggagcctcaacttggtcacattcaggttaagaagatgttcaagtcagacagcccacccgcgaattccgtggcttcaccctcagccagtcaactgttgccaggagttaatccttatcttgccgctgtggcagccgccaatatttttcgagcgggtcaattccctgactggaatagcaaaaatgatttggttgtggatccgctggaaaagatgtctgatattgtaaagggtggagcgagtggaatgggtaccaaggaaaaaatgcactcctccaaggccacaacaccacaggcagcatctcagccgccaaaaagtccggttcaaccaacacccaaccaaaattccgaatccggaggagggtccggaggcggtgctgctggtagtggcgcagtgaccaaagcgaggcataacatttggcaatcgcactggcaaaacaagggtgtggccagttcggtgttcagatgtgtgtggtgcaagcagagtttccctaccctggaagccctgaccacccacatgaaggacagcaagcattgcggcgtgaatgtaccaccttttggtaatctgccaagcaacaatcctcagccgcagcaccaccatccaactccacctccaccgccgcagaatcataacctccgaaagcatagttcaggaagcgcttccaatcactcaccatcggcaaatgtcaagaatgcattccaatatcgaggggatccacccacgccactaccacgaaaattggttagaggccagaacgtttggcttggcaagggtgtggaacaggccatgcagatccttaagtgcatgcggtgtggagagagcttccgatctcttggcgaaatgacaaagcacatgcaggagacccagcactacacgaatatcctatcccaggagcagagtatatctatcaaatcagggaatgccaatgccaactcagatgccaaggagagccacaacagtctgagttccgaagaaagtcgcactctcagtgctgtcctcacatgtaaagtgtgcgacaaggcttttaattctttgggtgatttaagcaaccacatggccaagaacaaccactatgcagaaccgctcctacagtctgcgggagcacgaaagcgaccagctcctaaaaagcgcgagaagtccttgccagtacgcaaacttttggaaatgaagggcggatcaggaacgacgcaagaagatcattcaaacgaaaaaacctcggtgcaaggaaaaccaggcttgggacctggtggaggcgataaaaacgatgctgccctttttgccgaacgcatgcgacagtatattacaggggtaaaagctccagaagaaattgccaaagtagctgctgcccaactcctagcgaaaaacaagtccccagagttagtggagcagaagaacggcggcagcgcaaaggctgccggtgcctcgtctgttttaagtgccattgagcagatgtttacaaccagctttgacacgccacccagacacgccagcctgccagctagtagtccatccaactcatccaccaaaaacacttcgcccgtggcctccagcatactgaaacgattggggatcgatgaaactgtggactacaacaagccattgattgataccaatgatccctattatcagcactatagatatacaagcagcgaaaggagtggcagtgagtgcagtgcagaagccaggcctagattagatgcaccgactcccgaaaaacagcagcaaggaggagggcatgacgaggaatcttcaaagccagcaataaaacaagaaagggaagcggagtcgaaacctgttaaaatggagatcaagtctgagtttgttgatgagccaaatgaagccgaggagacatccaaaatggaggcagctgtggtaaatggaagtgccaccaataataacaataatattgtggaaaggagttccccaaaaacaccgtcttcggcagcaagtcctcagacaaggttgctacctccccgaagccctgccgagagtcagagatcagttactcctaaatcacccgcttcgagccacaaatcgtacgatgggagttcggaaggcacaaagaagtttccaagtgattccctcaacgcattgtcatctatgtttgattccttgggtagcagtggggccggtgctaactccagagctaagctagcagccgcagctgctgctggaggatcagaatctccagagaacctcaccgccggggggaactccttggcggccttgcgacaattctgcgtgaagaaggagaagaccgcctaagtccgcgagctgagacgaaaagagaaaccgaatcatttgccttgttttcgttgtttcgagcaaaacgcattttcaacattttttggtttgtcagcgccttgccttcgccccgaatctaaacaccctcccccagcgccagtcggggttttgagttcagggtggctttggcctggtgaaccgagattcaagtcaaagtgccacggatagagccactggatgcatctgtctttaaaagtatggcgggcatgatttgttttaactggacaaaggaacaagtataaacag

SEQ ID NO: 957 - protein, 948 aa, DROSOPHILA
MLEIYRQALNAGALPTARPRSTESANSSERCPSHDSNSSEHGGGAGSGGVGHRLDAAALSTGVMPGEGPTTLHSSFPAVPQSLPSQPPSMEAYLHMVAAAAQQYGFPLAAAAAAGAGPRLPLPLANEAAAPFKLPPQASPTASSNNSEALDFRTNLYGRAESAEPPASEGEEEEFDDGANNPLDLSVGTRKRGHESEPQLGHIQVKKMFKSDSPPANSVASPSASQLLPGVNPYLAAVAAANIFRAGQFPDWNSKNDLVVDPLEKMSDIVKGGASGMGTKEKMHSSKATTPQAASQPPKSPVQPTPNQNSESGGGSGGGAAGSGAVTKARHNIWQSHWQNKGVASSVFRCVWCKQSFPTLEALTTHMKDSKHCGVNVPPFGNLPSNNPQPQHHHPTPPPPPQNHNLRKHSSGSASNHSPSANVKNAFQYRGDPPTPLPRKLVRGQNVWLGKGVEQAMQILKCMRCGESFRSLGEMTKHMQETQHYTNILSQEQSISIKSGNANANSDAKESHNSLSSEESRTLSAVLTCKVCDKAFNSLGDLSNHMAKNNHYAEPLLQSAGARKRPAPKKREKSLPVRKLLEMKGGSGTTQEDHSNEKTSVQGKPGLGPGGGDKNDAALFAERMRQYITGVKAPEEIAKVAAAQLLAKNKSPELVEQKNGGSAKAAGASSVLSAIEQMFTTSFDTPPRHASLPASSPSNSSTKNTSPVASSILKRLGIDETVDYNKPLIDTNDPYYQHYRYTSSERSGSECSAEARPRLDAPTPEKQQQGGGHDEESSKPAIKQEREAESKPVKMEIKSEFVDEPNEAEETSKMEAAVVNGSATNNNNNIVERSSPKTPSSAASPQTRLLPPRSPAESQRSVTPKSPASSHKSYDGSSEGTKKFPSDSLNALSSMFDSLGSSGAGANSRAKLAAAAAAGGSESPENLTAGGNSLAALRQFCVKKEKTA

SEQ ID NO: 958 - DNA, 4006 bp, DROSOPHILA
atttataaaaattattattaaaaacgcaatctgagctccgcaataattttcataaagtatttttagattgaacctaaaaagttgccaaagctggctaagaaatgcaaatatttgttttttattttaatcagtgcatatattttatataggaaatacgttgtatttggttagcagaagttattccaaaatttaattttatgggggaatcgaagaatttgtttagatgctcaacattataatgcactttcttaattaaaaaatgttgagtacattttttaaaaattacgatacaaaattcatactcagatttgtgtaaaattgataagctcaagaaatctgtacaatctgatatctatcaaagtctttagatttatcatttccctaaacatttatatggttgcatcataaaaacctaattactgaatggaaaacaatcaatagtgcgtggtattcaacccctgctgctactatcgccactcgaaaaggactcgcctcgcaggactagaagcgaacccacaggtacttcacacaaatcacaaagcggcaataatggcagcgccataaaatactcggccatggatatggaaggatatctcttcattaacaactgtcgcaggacgggcagagattctctgctgcgagagagggtagcagacggacgaggagttcgcgtgagagagcaggtagtgaatcctgcggaaaagggccataaaaaccgaaagaattgagaatgagaatgagcgacggctgctgcgttccttgctcaatgaatttttcgcaatggcagcctgccgcaggatcgaaggattctccaggggagagtgagagaggatatgcgagagagggcattagaagcaaccctctcccgagtttcgaccaatgaacgcggagtttgtctacctaagggtgatcgactgctcgatgaatggatttggtctgcaggactattaaaacgccggcggtcctcacagcagacaacacaacccatcgtgatctcagcgagtccacatcggagtaaccaaggatatatcgaatatatcacacaatccgcaataccgccgtccacccaaaccgttaaaacaaaaatccaaaacgactcaaagatacaccagtgccaagtgaaattcaatttgtgcaagcgtttctacaaaaatcgccaaaattacgccccacatcggtatgcagtcgtcggagggttcaccagacatgatggatcagaaatacaacagcgtgcgtctttcgccagcggcatcgagtaagtatagcaaaaaaaaaaatcagatagcaatgaaaaaagaagaaaacaatcttcctaatatataaaattaagacaatcctttacttataccaactttccccccttcttgaatttccaggtcgcattctataccatgtgccctgcaaagtctgcagagatcacagctccggcaagcattacggcatctacgcctgtgatggctgcgccggattcttcaagaggagcattcggagatcccggcagtatgtgtgcaagtcgcagaagcagggactctgtgtggtggacaagacgcacaggaaccaatgtagggcttgccgactgaggaagtgctttgaggtcggaatgaacaaggatgcagtgcagcacgagcggggaccgcggaactccactctgcgtcgccacatggccatgtacaaggatgccatgatgggcgccggcgagatgccacaaatacccgccgaaattctgatgaacacggctgccttgaccggctttcctggagtaccgatgcccatgcctggcctgccccagagggctggtcatcatcctgctcacatggctgccttccagccgccaccatcggctgccgctgtcttggacttatccgtgccacgagtgccccatcacccggtgcaccaaggacaccacggtttcttctcgcccaccgccgcctacatgaatgccctggccactcgggccctgccccccactcctccgctgatggcagctgagcacatcaaggaaaccgcggcggaacacctattcaagaacgtcaactggatcaagagcgtacgggccttcaccgaactgcccatgccggatcagctgctcctgctggaggagtcctggaaggagttcttcatcctggccatggcccagtacctaatgcccatgaatttcgcccagctgctgttcgtctacgagtccgagaatgccaaccgggagatcatgggcatggtgacccgcgaggtgcacgccttccaggaggtgctgaaccaactgtgccatctgaacattgacagcaccgagtacgagtgtctgagggctatttcgctcttccgtaagtcaccaccgtcggcaagttctaccgaggatttagccaacagctcaatcctgacaggaagcggcagcccgaactcctcggcctctgctgaatccaggggtcttctggagtcgggaaaagtggcggccatgcacaacgatgcccggagtgcgctgcacaactacatccagaggacccatccctcgcagcccatgcgattccagacgctcttgggcgtggtgcagctgatgcacaaggtctcaagcttcaccatcgaggagctgttcttccgaaagaccatcggcgacatcaccattgtgcgcctcatctccgacatgtacagtcagcgcaagatctgaaaagtatgtagagcctagactaatcgccgcactcgaagtgccttccaagtgctgggaactgtgataatctcggaagaagcgctttggacaatactcgatcagtgaaatcaacgatttctcatatccaggagtcgagccttaaaatacgtacacaacactcaccttaataccttacctaaacagaactcgaagtaatcttagctaaagtctctcagaccatccagatgtgtttcaaattgcattcgcaaaagtttcaactttgcctgttaaatacgtcaatcgtagttttaaacactttagttttaagcgcatattattagctttaggatttggaaaaataattattcaaaataaacctaaaggttttcgaaatgaacattaatgggtctttttgggtggatgcaatattttggaagaaatggaactgacagtttcagaacttggatttggactatcggaagttttaaacttgaaaaaatatatttcattaattaaatgaaaaaacgtagtattcacattatttgaaaggtcttttggttttcaaaagctatgcttagaaaaaatatatctaaactaaacaagaagtaggtcctagttatttgcgcaacttttgtaagcagctgaaagtgttatgccaaacatggaatcatgagattacacacggaattatcattctttttatggccatttcgtgaggcttttcgcatccttagagacgacaaagcaaccgcacagggcaacccagttaatcacaaatgaattatgcaaatactggaacaaagaaatattagatcgcagaagaaaccgtggaaaattagcatagtttttctgcatgaacagaccaaagtcggcattaatttgggaacctgagggacgcagtgcaatggccgccccagttttgatatcctttctctcccgccccgaaattcgaaaagttaaaaagcaaaaattcacttttgtgactttgtcgagcggcgttggatcgtcgcattgctggcaggaccgggaacggggtttcggggatcggggatcgctctgccggaaggacaattgaatcctttcacaatggccaagcaacgtgcagccggaggtaaatgagttttcgctggcaaaggctgaacaaacagttgccaaattgttcgaattgcgttggccaaaataaacagagatgagtgtattccactgacacacatccatggcagtagcgatgaggatgtgcaaaaacctaccctaactgagagtccggagcccaagcctgattccaatccaaccacggcacccagaacatcctgcggggattgggattgggaattaagcatgcttcgttggtgctgccatttcgacttt

SEQ ID NO: 959 - DNA, 1885 bp, DROSOPHILA
gagtccacatcggagtaaccaaggatatatcgaatatatcacacaatccgcaataccgccgtccacccaaaccgttaaaacaaaaatccaaaacgactcaaagatacaccagtgccaagtgaaattcaatttgtgcaagcgtttctacaaaaatcgccaaaattacgccccacatcggtatgcagtcgtcggagggttcaccagacatgatggatcagaaatacaacagcgtgcgtctttcgccagcggcatcgagtcgcattctataccatgtgccctgcaaagtctgcagagatcacagctccggcaagcattacggcatctacgcctgtgatggctgcgccggattcttcaagaggagcattcggagatcccggcagtatgtgtgcaagtcgcagaagcagggactctgtgtggtggacaagacgcacaggaaccaatgtagggcttgccgactgaggaagtgctttgaggtcggaatgaacaaggatgcagtgcagcacgagcggggaccgcggaactccactctgcgtcgccacatggccatgtacaaggatgccatgatgggcgccggcgagatgccacaaatacccgccgaaattctgatgaacacggctgccttgaccggctttcctggagtaccgatgcccatgcctggcctgccccagagggctggtcatcatcctgctcacatggctgccttccagccgccaccatcggctgccgctgtcttggacttatccgtgccacgagtgccccatcacccggtgcaccaaggacaccacggtttcttctcgcccaccgccgcctacatgaatgccctggccactcgggccctgccccccactcctccgctgatggcagctgagcacatcaaggaaaccgcggcggaacacctattcaagaacgtcaactggatcaagagcgtacgggccttcaccgaactgcccatgccggatcagctgctcctgctggaggagtcctggaaggagttcttcatcctggccatggcccagtacctaatgcccatgaatttcgcccagctgctgttcgtctacgagtccgagaatgccaaccgggagatcatgggcatggtgacccgcgaggtgcacgccttccaggaggtgctgaaccaactgtgccatctgaacattgacagcaccgagtacgagtgtctgagggctatttcgctcttccgtaagtcaccaccgtcggcaagttctaccgaggatttagccaacagctcaatcctgacaggaagcggcagcccgaactcctcggcctctgctgaatccaggggtcttctggagtcgggaaaagtggcggccatgcacaacgatgcccggagtgcgctgcacaactacatccagaggacccatccctcgcagcccatgcgattccagacgctcttgggcgtggtgcagctgatgcacaaggtctcaagcttcaccatcgaggagctgttcttccgaaagaccatcggcgacatcaccattgtgcgcctcatctccgacatgtacagtcagcgcaagatctgaaaagtatgtagagcctagactaatcgccgcactcgaagtgccttccaagtgctgggaactgtgataatctcggaagaagcgctttggacaatactcgatcagtgaaatcaacgatttctcatatccaggagtcgagccttaaaatacgtacacaacactcaccttaataccttacctaaacagaactcgaagtaatcttagctaaagtctctcagaccatccagatgtgtttcaaattgcattcgcaaaagtttcaactttgcctgttaaatacgtcaatcgtagttttaaacactttagttttaagcgcatattattagctttaggatttggaaaaataattattc

SEQ ID NO: 960 - protein, 452 aa, DROSOPHILA
MQSSEGSPDMMDQKYNSVRLSPAASSRILYHVPCKVCRDHSSGKHYGIYACDGCAGFFKRSIRRSRQYVCKSQKQGLCVVDKTHRNQCRACRLRKCFEVGMNKDAVQHERGPRNSTLRRHMAMYKDAMMGAGEMPQIPAEILMNTAALTGFPGVPMPMPGLPQRAGHHPAHMAAFQPPPSAAAVLDLSVPRVPHHPVHQGHHGFFSPTAAYMNALATRALPPTPPLMAAEHIKETAAEHLFKNVNWIKSVRAFTELPMPDQLLLLEESWKEFFILAMAQYLMPMNFAQLLFVYESENANREIMGMVTREVHAFQEVLNQLCHLNIDSTEYECLRAISLFRKSPPSASSTEDLANSSILTGSGSPNSSASAESRGLLESGKVAAMHNDARSALHNYIQRTHPSQPMRFQTLLGVVQLMHKVSSFTIEELFFRKTIGDITIVRLISDMYSQRKI

SEQ ID NO: 961 - DNA, 3614 bp, DROSOPHILA
cagatattcagggaaatgcccgaggtactttgtcaacaggccaacaaacaattcatcagctccattgtccaattagtgaatcccgggagttgcaaatgaattgtacgcaattattttggctccgcttcgtcctcccacgcataaaaatatatatatgtatataatatatacacacacgcccaccagcgaaatcaatggaaacggaaaatcctgtgcaacatttgcgtaattccttcgccacacacacaatcactggccaaaaagtttgcacttttcacaactcacttggattgttttaacaatgctctttatttccacgactttcgagtgcagttttccgtgcgaattttccactttctgtcagacacttttcacaacatggcgtcacgcctacgccagcaacacaaaggaagcgctcgtcactgccagccagtagccactgtacccacctctgtgctcagccaaggcggaaccaagagtgtcgccagtctctggagcttccatgctttatacaggacccgcgaggaccgacggcacccgaagctcgccgagcgcctctcgtcctcgcgagacggggagcgtgggagtcgcggagagaaagcttttagctgcagccgagcttcgttcgggaagacactgaacaaaattcttagaaatagttaaagtgtatgcaaaaatttcttcgaatatatacaaaatgatattatgtctctactaataactgttgcaaaataataattaaatattaaggaaaaacatttttttgatctaataaatttgcattctacaataaatcgattggaaaattaaaatattttatagttactaattattattaatgcaacaagcaatccaagttttcaccacaattcgaatccacaatttcttatgaaaaatgtaacataacagcattataagacttcattcgaacttagtagtatatgattcttacgttcagtagaacgaactattgatactaggcagtctttgcacgcacacactaatagttagagtgtaatttgcctctgtttcaaaattgtacaaatataaatcgaaacactgattttttcatcgcgcattttatgtaaaaatgggaactgccactcagtttattgttggtttcatcggcgccctgggcgccttttgtctaggcgcagtgatcggctggtcaggaccggtggaaaatgaagtcaagaattctaacgcgtacaactttacccctcgtcaaacggaatggggcctggtgggatctctgatgactctgggtgcagctttctcgtgcattccggtgggcgtgctcattggtaagatcgggcggaagacgacaatgctaatcctgctgccaccgttctttatcggatggctcctgatcctcctggcatcgcacatagcaatgctgctgctcggacgcttcgtagtgggattctgcggaggagccttctgcgtgacttgtcccatgtacgtgactgagatagcccaggtccagtaccgcggaaccatgggatgcttcttccagctgctaatcgtttttggtattctgtacgcctttgtggttggaggttttgtaaagaccttctactttaatattgcttgcgcaattttgcccgtaatcttttttgtcttgatgatttttatgccggaatctccgatttttctggcccaaaagggaaaagccgagaaggcggagaaatctcttaaatttctgcgcggaaaggatgcggatgtgagcggtgagctgaaggaaatgagcgccgagggccaaaaggagaaggctagcgttgggaaaatcctatgccgcaggattaccctcaaggggctgttcctctccatcggtctcatgttgttccagcagatgacgggcatcaatgcgattattttctattctacattcatctttgagacggctggatcgaccctggagcccagaatatctacaattattgtgggcattgtgcaggctattgccactatcatttcgatcctggttattgagaaagtcggtcggaagatactcctattggtgtccgcctgcatgatgggtatcagcaccctgatcatggctctttactttggcatgttgatgaaatctggagtcggctggctggccctaattgccgtttgtgtttttattattggattctccctgggattcggtccagttccctggctgatgatggccgagctctttgccgaggatgtaaaggccctagcaggatcgattgccgggactacaaattggtgttttgcttttatcgtgacccttcttttccctgttcttaacgatattattggagcaaccgcgtgctttgcaatcttcttcggatttgcggtggccgcctttgtcttcattctcttcctaattcccgagacaaagggaaaaacgcttaacgagattcaggccaagatgggcgagaaggccgaatagtacttgcaatcttttgatatcatcagggattcaagtctatggatctctgaccaaacttttgataaattttcgtggaattggaactgaatatttgtaccgtcaaatgcaatcaaatgcatttaaatttatgtcttaacatttttctacatgatgttattatgaataaaatgccacctcttgacattttaagtgttgtgccgactcaccatttcgcgcaacgtattccttgcagatccttcaatccaactacttgaactacttggaaagagaaatcgacacacactgcactgaaatcagaaacgaattgccaattgccaggctctatatgcaaaatagatgcgctttgacttcgtatgcaatcggagggtaaatagcaaataagtccaggtaaatagtagaaagctttccggctgacaggatgccatttccccagcaatttcgggcctggttgcgatttcccgaccagtgcgcatggcacacggaacatctgacgggcgctgcagctgggggttatgtacacacgttatggccaggccaaaagcacaaaccaattccgggaacgaactgttgctctctcccatcagcaggaccccaattcgagccacctgttactccgcccgcccgacaatcggcgtgcatacgccccacaatcatatccggagttccccctcccaaccactagaaatttgtctttggctgaagatgggaaaacaaaaataagtattcaaaatgtatatatcattttgtcattttcaggtattttaagcttgtctttaaatttacgacatgaacaggtcgtgtgacgtgtagtcaaaaatgaattgttgtatccattctcattaatccttgctaattgttgtcaaggagtatacactagaaaacaccaggtacaactaattgattatttgatcaatcaagcttagcatgaaaatgccacctcaacattttcttgtacatgacgtctgcaagactgatttggtcgtcttaccgatgactgtactttggcccctccttcgtgtccaattgtccgaattctcggaacatgtgggtaaaaagatttgaagttcggacttccttactctcctgtggtttccatgactatgacgatggcgatgcagatgttgcccgggacagacgctcgagctgcaatacaactcccggtccggatattatccagttgcaaagcaat

SEQ ID NO: 962 - DNA, 1614 bp, DROSOPHILA
ctaatagttagagtgtaatttgcctctgtttcaaaattgtacaaatataaatcgaaacactgattttttcatcgcgcattttatgtaaaaatgggaactgccactcagtttattgttggtttcatcggcgccctgggcgccttttgtctaggcgcagtgatcggctggtcaggaccggtggaaaatgaagtcaagaattctaacgcgtacaactttacccctcgtcaaacggaatggggcctggtgggatctctgatgactctgggtgcagctttctcgtgcattccggtgggcgtgctcattggtaagatcgggcggaagacgacaatgctaatcctgctgccaccgttctttatcggatggctcctgatcctcctggcatcgcacatagcaatgctgctgctcggacgcttcgtagtgggattctgcggaggagccttctgcgtgacttgtcccatgtacgtgactgagatagcccaggtccagtaccgcggaaccatgggatgcttcttccagctgctaatcgtttttggtattctgtacgcctttgtggttggaggttttgtaaagaccttctactttaatattgcttgcgcaattttgcccgtaatcttttttgtcttgatgatttttatgccggaatctccgatttttctggcccaaaagggaaaagccgagaaggcggagaaatctcttaaatttctgcgcggaaaggatgcggatgtgagcggtgagctgaaggaaatgagcgccgagggccaaaaggagaaggctagcgttgggaaaatcctatgccgcaggattaccctcaaggggctgttcctctccatcggtctcatgttgttccagcagatgacgggcatcaatgcgattattttctattctacattcatctttgagacggctggatcgaccctggagcccagaatatctacaattattgtgggcattgtgcaggctattgccactatcatttcgatcctggttattgagaaagtcggtcggaagatactcctattggtgtccgcctgcatgatgggtatcagcaccctgatcatggctctttactttggcatgttgatgaaatctggagtcggctggctggccctaattgccgtttgtgtttttattattggattctccctgggattcggtccagttccctggctgatgatggccgagctctttgccgaggatgtaaaggccctagcaggatcgattgccgggactacaaattggtgttttgcttttatcgtgacccttcttttccctgttcttaacgatattattggagcaaccgcgtgctttgcaatcttcttcggatttgcggtggccgcctttgtcttcattctcttcctaattcccgagacaaagggaaaaacgcttaacgagattcaggccaagatgggcgagaaggccgaatagtacttgcaatcttttgatatcatcagggattcaagtctatggatctctgaccaaacttttgataaattttcgtggaattggaactgaatatttgtaccgtcaaatgcaatcaaatgcatttaaatttatgtcttaacatttttctacatgatgttattatgaataaaatgccacctcttgacattttaa

SEQ ID NO: 963 - protein, 444 aa, DROSOPHILA
MGTATQFIVGFIGALGAFCLGAVIGWSGPVENEVKNSNAYNFTPRQTEWGLVGSLMTLGAAFSCIPVGVLIGKIGRKTTMLILLPPFFIGWLLILLASHIAMLLLGRFVVGFCGGAFCVTCPMYVTEIAQVQYRGTMGCFFQLLIVFGILYAFVVGGFVKTFYFNIACAILPVIFFVLMIFMPESPIFLAQKGKAEKAEKSLKFLRGKDADVSGELKEMSAEGQKEKASVGKILCRRITLKGLFLSIGLMLFQQMTGINAIIFYSTFIFETAGSTLEPRISTIIVGIVQAIATIISILVIEKVGRKILLLVSACMMGISTLIMALYFGMLMKSGVGWLALIAVCVFIIGFSLGFGPVPWLMMAELFAEDVKALAGSIAGTTNWCFAFIVTLLFPVLNDIIGATACFAIFFGFAVAAFVFILFLIPETKGKTLNEIQAKMGEKAE

SEQ ID NO: 964 - DNA, 7639 bp, DROSOPHILA
cctggatgattgggcagaagaacaggttttaggccgtggcaacaacgaaaaaaaaaaaaaaatagaaaaaaaaacctgcgactggcttataccatttacgccattaacggaggtcgatggttatccctgtgtgtgtgtggtgtgtgtttggtccaatatatttggctaaattccgcaaatccaattaacgcaaacggaaaaaaagagtgcaacaatttgtggctaattgaattttacgtgtattttattttggttttcgaccagcgcaacaacaacagcgagcaacgagtagaaagagtggggagagcagtgggggtttttttggcccaaagctcaggtagaatacacacacacacgcatgattgttgggcaaaaacaataattatccaattaaacggttgtcaaagaatgcatttaatttcattggccaataggtttgcgcgtaagagagggaagcagtggcgaagagagcgcctaactaacagtatttttcacgggcacaccaatgcgagcgacactgcttcgtgtgtgtatgtgtgtgaggtgctaatgagatgctgtgacgctcttcttcttcttgccgtttgttgcttttgccatttatgcaaaaagacgcaaaacagcgaaaaaaaaacagaacaaaatacacagattttcgagctgaacaaaagatttcacgtaaaaggtgaaagccacttggagatgcgagcacacggcgtatacgcaatgcagtttctttgtgccacggaccgttaatgcaatcatctcgcgatcataaccgttctagattctcacctctccactccgcattctgcacttttccactcctccagttaccgcggagatgtcaccgattggagccacttcctcgcagcgaatcccacaacaataacaaataacgaataacaaatgatgtgatgcagcagcaggggtcgagttcgaaaaacacaaccttcgagtagtccaggccatctagaatcgcacccggatcgcacccacgatgagctggctgctgggcctcctcgggctccaggtcctgttcctctggctcctgtggctgcccggcgagatcctggccattcccacgccgctcaagctgccaggtgagtcgggctttaaaagataacccaaaatctaaaaaattaaacaatctgattttttacaaagaggcttcctcaaatatgctatttgtatatcatcatcgtatcaatatttgttttcttaagtacactgtaatcctcttaatcagttgctttctatagcctacccacaaatttgttcatcacttagttaagagaaatttcatcttgtcatcgccgctggcagctttctcccgctcccactaacccctaaaatgcccccttcctcttacaggctacacccacaggctgacgccctacatcaagcactgggaggcggcgaacttcgatcgccaggtgctgcaggcggcgcaggtcaggcacctggagcaggctcgcttccggcagaagagagaggtgaccccctcggcgagtggactggcgcacaccatccgcttgaatttctccgcccacgacaggtgagtgcactcgatatcgccagccgaaaaggtaatcacttaatcacctaaaaccgccttcctcacgcagagatttccgcttggtgctgcgtcaacagccgcattcggtgttcgcccacgatgtggagatcgagaacactctgggccccatcgactacgatgtgtcgcgcatttatacgggcagcctggaggacgacgaggcggcccacgtccaggcgatcctcaccagcgacaacctgttggacggcacgatagagacccaggcggagcactactacatcgagccggcgcatcggtattcccagcagctagccgagagcggtgtccacagcatagtctataagttaagcgatgtaaatatgcagaagcagcagttcaccggcggaggactcaactccgccactcccgccaagacgcactgcgccagcgaaaagctgaggaagaagcggtggctgccagaggaggtgagtatccgaagaatgcactctaaatcccattttaatgaatctcaccttttagctggccatgtcggatgctccggcccccacgtacaatcgtaatccgcccctgccgctggacttggaggtgccgtacaacgatgattttcgcgtcctggcctccgaagaggacaagagcgaggagtcgccgcggaagtacccgaccacgtccacaaccaggagcactgtgcgcagcaccgagagcttcctggccactctgactaagcccacgtcgaaccgcaacatacttgtaaataactacaatccctccaatctcggcgagggaagtcgcagctacagcagcggcaacaacaacgccaacagcaatagtaacaacaataacagcaacaacaacaataataataataatagtaataacaatgtgcggaagttgtacacgaaacacaagaacattattgtaagcacgtacaaccgacccatcgaaccggaattcggaacgccctacgaggagccgaataacaatggcacccgcgagctgcccagtaacttcttcaatgccaactggacgacgctctttctgggaaacaacaacaatggcaacgaccggcccagccacaagacgcatgtggagatcatcacgaagaacggagccaccaagaagccaaacatcattgtgaacaactacaatccggagatcatattcgcacccaatccgcacaatccgagttttaacagcatgatgatgacaaacctgctgagtggaaggggtggcgaggacattcacagctctcccaggctgctctacgaccgcaagaccacttgcatgctatacctgcaggcggaccacacgttcttccagaagatgggctcggacgaggcgtccatagaggccatcactcggcacgtacagcgtgcgaacacaatctaccggaacacggacttcaacaacgatgggaagccggacaacatcaccttcatgatcaagcgcatcaaggtgcacaacatgaacgcgatgaaggatcccagctaccgattccccggtaactacggcgtggaaaagtttctggagctgttttcgggtgagtgaacttaactttctggataattgatccggttttgagatcctgtgctgacttcatcttctgattaattgatatgcaattaacattatctgtgatttcttgatacatgtttaattaattatatttgtgttgcgtgtataatttatatgaacttttgttgatttattttacagaggaggactacgatgccttttgtttggcttacatgttcacctaccgtgatttcgagatgggaaccttgggattggcctggacgggagatctcaagaacgctggcggagtctgcgaaaagaatggtcactaccgggggtcccttaagtcactcaatacaggaatagtcactctgttgaactatggaaagcatgtgccaccggctgtctcccacgtgactttggcccacgaaattggacacaactttggatcaccagtgagaattctataattgtttataaaatattacacgttgttaagagtactttccaatttcagcacgatccggagcagtgtacgcctggtggcgaggatggtaacttcattatgtttgcccgcgccacttcgggcgacaagaagaacaacaataagttcagcacctgctcgctgaaatcaatagagcccgtgctgaatgccaaggcgcgttccatgaagggctgcttcaccgagccgcagtcatcgatttgcggcaatggcgtggtggagccgggcgagcagtgcgactgcggctgggaggaggactgcaaggactcgtgctgctttcccatgtcaaggcaaccgcgtctggatgaaactccgtgcacgctgacgccgcatgcccgctgcagtccttcgcaaggtccctgctgcaccaccgattgcaagctgaagttcggtgacaagtgtcgggatgataacggctgtcgggatccttcattctgtgatgggcgagtgccccagtgtccgccgtcggtgaacaagcccaacaaaaccatctgcaacaaggaattcgtctgctacatgggcgactgtacgggtagcatctgcttggcctatggtctggaatcgtgccagtgcattcccggaccgcaggacgatcggatcaagtcatgcgagctgtgttgcaagctgccgggagaggacagtccctgccggagttccttcgaatggaatgaggcgcccttcgatgtgcccgatatgtactcaaagcctggaacgccctgcaatgattataatgggtgcgtttgatctaccttggagaccacaatttacaaaactaatatatcttttacttgttcagatactgtgatgtctttcaaaagtgcagggaggtggatccctctggaccactggccacgttgcgcaagctcctgctttccgaagagagcatcgccagctttaagaagtggatgcagcacaactggtacacagtagccttagctgctgtaggcgttatactgctcctggtaagtaacactgcaggaaactggcgtaaaaaggttctttaatacactattaactattctttggtacaataagtttatgagacttctcacgcaaatgttaagggatcaggtcgaagccaaagcggaagcaacggctcagaccttgggtgagcacttagaccttcagtgcccgcaataatcctttagagtgtttggagaacattcatctagtctgtggctaatttgagggcagctttagtctagaagtcattgaaacatttaccattgctatttaccacattctaaatttgattagaatttgtttctaacacatgatttgtctttcacaggcgctgagcacaaagctgctggcgaaacggtcgaatctgaagcttaaatccgtcaccattatacacagcgccaccacggagacagtgcgtcttccggagaacaacaacggcgtgatagtgcatacagccgtgaggacaaaggtacctttcaagaagaaggttcgtggcgaacgaaccaagaagccaggaacgggagcgggagtaacagccgctgctgcagttggaacccgaaatgcagccaaaagcagtgccaatccggagccaaagaagaccactaggagccaagcgatggccaagaagaaatcgttcgaggaggagcccaagaagtccagcaagaaggtgggcaaacacatgaaagagatcatcgactattcaaaccgcaacaacaatggcgacgatgcttccaatttgtcgaccaccaacaaccacaccaacacttttggcaaggtgcaaaagtggctgctcgagtcgccaattgtggctcaacccctgtcccacatagagcacagctctcgagttcgcaaggtgatgagcaagtcgcaatcaacgccagagagactggtgcaaaagacaccgcagaaaaccaagtccatgggtaatctgtccaacgagaaggtcaaactgcaggtggtttacaagccgcccttcaagttttccctgagattgtccaagaaaccgaaagtgaagacccatgtggtgggcgcaggtgtaaggccaaagagaagccaaaagaccagtaaccgaactgggggacagtcctcctcgaaggaagtctctacgcgcgccaagagaagtgcccttttgctctgcaacgaggcggaggacgataaccagattctcaccctcaacgaacccaactacgagaccttgaaaccaccaacgcctccacgttccatggaacactgctacgagaatgtggatatgcaggcagaggcctccagttcgaagcccagcagtagcagcaaagtggctcctagctcacagaacagagccagcttagaggtgactcctccagttactgcgcagcgaaattcctatcgcaggtctaactccctgtccacccacaatccatttgcggccgctcctcgccggagcagcagcaaggccagcggatcggtgaacctcacgcggaactttggcagcacgcaaaatctgattaatctcagtcaaaatctgtccaaaaacaagaagcgcagcagtctgaacctgaaggctagcggtagtggagccaccagaagcgggaaagatccaccaactatgggagttgcctcgccacagagacgctcctcgtccaatgccaatctccgcagggacagcagcgtgtcctcctcaaaggcagtgcctgttccgcccacaaggaactcgcggaatagctttagcaatattcctagggccagtttgggaggagcaaacagcaatgccgccgttagcactggagcacctccgcccagtttctctcgccaatcttccagcagcacggccaccagcagctcatccatcactgcaggcgtaaccagcggagtggcgttgcagcaatccgcctccacaagcgccatgcagcgtcacccgccctcgcagcccacgaggagaagcctccacaacttcaggacgcgctccacaggcacaggggctgcagctggaaagccaggagcagcagtcacttctgcagcagcaacctctgcaggagcctcatctgcagcagcatcgaacgagaacaacgagctgccttcggatctggaggtggttgtgtccgatgtggagaacttggttagctaagggcagctctcccgttccagtttccaaaaccaaccaagtgaaagtgataagtcttaatgttagttatacaaattgtcgcataggtttacttgcataacactgccttaaacttgccgtttctgctgaaaatgtgaaataccacgcccactcacacgaacagacactccaccgcattccacacgcccattaatccccgaccaaggctcgccccagcacctcgaatgcatcgacacccactagggcacccaatccccacccactgatgccaccgcaatccaaaccgcagccgcactcaccgcactttgtaccttctactgtttactgtttgcattctattgcgtaaactgaaatttagccagtctgtatatgtagttccggtttccggatttgattgaacttggcggaagttgatacatacatatatgtatgtatgcatccttcctacattgatcggattacgaactggaaacggggcaaatgctcgtgattcactgacgatttcttcttatcgaaccaaaactttaatgagctttacgtaaagtcaaagtcgcatttcacagatactccatttcagaagccgccataagaagaaacccgaagtgaattacctgattatatgcccactctttgtgtttgcctgaacttggtctatactctatatcgatagttattttcaaaaacagtattactgcattgttatgtacctactatacacgtaaattgcctaagttgcctgctcttcaagtttcgaacaacgatcactattcatctgaactacgacgacacacaaaacaatataaggtgctattttagtaaggaactaaaacgataaaatattagccgagaacatttcaaaaatactttgcatattttctgaagatcaaaactaagattagagaggaataggggaataaaggattagaggaagttggaggttgctgtagcaggaggagtagcatataggaaaatataaatggggagccgggtaaagttgcaaata

SEQ ID NO: 965 - DNA, 4614 bp, DROSOPHILA
atgagctggctgctgggcctcctcgggctccaggtcctgttcctctggctcctgtggctgcccggcgagatcctggccattcccacgccgctcaagctgccaggctacacccacaggctgacgccctacatcaagcactgggaggcggcgaacttcgatcgccaggtgctgcaggcggcgcaggtcaggcacctggagcaggctcgcttccggcagaagagagaggtgaccccctcggcgagtggactggcgcacaccatccgcttgaatttctccgcccacgacagagatttccgcttggtgctgcgtcaacagccgcattcggtgttcgcccacgatgtggagatcgagaacactctgggccccatcgactacgatgtgtcgcgcatttatacgggcagcctggaggacgacgaggcggcccacgtccaggcgatcctcaccagcgacaacctgttggacggcacgatagagacccaggcggagcactactacatcgagccggcgcatcggtattcccagcagctagccgagagcggtgtccacagcatagtctataagttaagcgatgtaaatatgcagaagcagcagttcaccggcggaggactcaactccgccactcccgccaagacgcactgcgccagcgaaaagctgaggaagaagcggtggctgccagaggagctggccatgtcggatgctccggcccccacgtacaatcgtaatccgcccctgccgctggacttggaggtgccgtacaacgatgattttcgcgtcctggcctccgaagaggacaagagcgaggagtcgccgcggaagtacccgaccacgtccacaaccaggagcactgtgcgcagcaccgagagcttcctggccactctgactaagcccacgtcgaaccgcaacatacttgtaaataactacaatccctccaatctcggcgagggaagtcgcagctacagcagcggcaacaacaacgccaacagcaatagtaacaacaataacagcaacaacaacaataataataataatagtaataacaatgtgcggaagttgtacacgaaacacaagaacattattgtaagcacgtacaaccgacccatcgaaccggaattcggaacgccctacgaggagccgaataacaatggcacccgcgagctgcccagtaacttcttcaatgccaactggacgacgctctttctgggaaacaacaacaatggcaacgaccggcccagccacaagacgcatgtggagatcatcacgaagaacggagccaccaagaagccaaacatcattgtgaacaactacaatccggagatcatattcgcacccaatccgcacaatccgagttttaacagcatgatgatgacaaacctgctgagtggaaggggtggcgaggacattcacagctctcccaggctgctctacgaccgcaagaccacttgcatgctatacctgcaggcggaccacacgttcttccagaagatgggctcggacgaggcgtccatagaggccatcactcggcacgtacagcgtgcgaacacaatctaccggaacacggacttcaacaacgatgggaagccggacaacatcaccttcatgatcaagcgcatcaaggtgcacaacatgaacgcgatgaaggatcccagctaccgattccccggtaactacggcgtggaaaagtttctggagctgttttcggaggaggactacgatgccttttgtttggcttacatgttcacctaccgtgatttcgagatgggaaccttgggattggcctggacgggagatctcaagaacgctggcggagtctgcgaaaagaatggtcactaccgggggtcccttaagtcactcaatacaggaatagtcactctgttgaactatggaaagcatgtgccaccggctgtctcccacgtgactttggcccacgaaattggacacaactttggatcaccacacgatccggagcagtgtacgcctggtggcgaggatggtaacttcattatgtttgcccgcgccacttcgggcgacaagaagaacaacaataagttcagcacctgctcgctgaaatcaatagagcccgtgctgaatgccaaggcgcgttccatgaagggctgcttcaccgagccgcagtcatcgatttgcggcaatggcgtggtggagccgggcgagcagtgcgactgcggctgggaggaggactgcaaggactcgtgctgctttcccatgtcaaggcaaccgcgtctggatgaaactccgtgcacgctgacgccgcatgcccgctgcagtccttcgcaaggtccctgctgcaccaccgattgcaagctgaagttcggtgacaagtgtcgggatgataacggctgtcgggatccttcattctgtgatgggcgagtgccccagtgtccgccgtcggtgaacaagcccaacaaaaccatctgcaacaaggaattcgtctgctacatgggcgactgtacgggtagcatctgcttggcctatggtctggaatcgtgccagtgcattcccggaccgcaggacgatcggatcaagtcatgcgagctgtgttgcaagctgccgggagaggacagtccctgccggagttccttcgaatggaatgaggcgcccttcgatgtgcccgatatgtactcaaagcctggaacgccctgcaatgattataatggatactgtgatgtctttcaaaagtgcagggaggtggatccctctggaccactggccacgttgcgcaagctcctgctttccgaagagagcatcgccagctttaagaagtggatgcagcacaactggtacacagtagccttagctgctgtaggcgttatactgctcctggcgctgagcacaaagctgctggcgaaacggtcgaatctgaagcttaaatccgtcaccattatacacagcgccaccacggagacagtgcgtcttccggagaacaacaacggcgtgatagtgcatacagccgtgaggacaaaggtacctttcaagaagaaggttcgtggcgaacgaaccaagaagccaggaacgggagcgggagtaacagccgctgctgcagttggaacccgaaatgcagccaaaagcagtgccaatccggagccaaagaagaccactaggagccaagcgatggccaagaagaaatcgttcgaggaggagcccaagaagtccagcaagaaggtgggcaaacacatgaaagagatcatcgactattcaaaccgcaacaacaatggcgacgatgcttccaatttgtcgaccaccaacaaccacaccaacacttttggcaaggtgcaaaagtggctgctcgagtcgccaattgtggctcaacccctgtcccacatagagcacagctctcgagttcgcaaggtgatgagcaagtcgcaatcaacgccagagagactggtgcaaaagacaccgcagaaaaccaagtccatgggtaatctgtccaacgagaaggtcaaactgcaggtggtttacaagccgcccttcaagttttccctgagattgtccaagaaaccgaaagtgaagacccatgtggtgggcgcaggtgtaaggccaaagagaagccaaaagaccagtaaccgaactgggggacagtcctcctcgaaggaagtctctacgcgcgccaagagaagtgcccttttgctctgcaacgaggcggaggacgataaccagattctcaccctcaacgaacccaactacgagaccttgaaaccaccaacgcctccacgttccatggaacactgctacgagaatgtggatatgcaggcagaggcctccagttcgaagcccagcagtagcagcaaagtggctcctagctcacagaacagagccagcttagaggtgactcctccagttactgcgcagcgaaattcctatcgcaggtctaactccctgtccacccacaatccatttgcggccgctcctcgccggagcagcagcaaggccagcggatcggtgaacctcacgcggaactttggcagcacgcaaaatctgattaatctcagtcaaaatctgtccaaaaacaagaagcgcagcagtctgaacctgaaggctagcggtagtggagccaccagaagcgggaaagatccaccaactatgggagttgcctcgccacagagacgctcctcgtccaatgccaatctccgcagggacagcagcgtgtcctcctcaaaggcagtgcctgttccgcccacaaggaactcgcggaatagctttagcaatattcctagggccagtttgggaggagcaaacagcaatgccgccgttagcactggagcacctccgcccagtttctctcgccaatcttccagcagcacggccaccagcagctcatccatcactgcaggcgtaaccagcggagtggcgttgcagcaatccgcctccacaagcgccatgcagcgtcacccgccctcgcagcccacgaggagaagcctccacaacttcaggacgcgctccacaggcacaggggctgcagctggaaagccaggagcagcagtcacttctgcagcagcaacctctgcaggagcctcatctgcagcagcatcgaacgagaacaacgagctgccttcggatctggaggtggttgtgtccgatgtggagaacttggttagctaa

SEQ ID NO: 966 - protein, 1537 aa, DROSOPHILA
MSWLLGLLGLQVLFLWLLWLPGEILAIPTPLKLPGYTHRLTPYIKHWEAANFDRQVLQAAQVRHLEQARFRQKREVTPSASGLAHTIRLNFSAHDRDFRLVLRQQPHSVFAHDVEIENTLGPIDYDVSRIYTGSLEDDEAAHVQAILTSDNLLDGTIETQAEHYYIEPAHRYSQQLAESGVHSIVYKLSDVNMQKQQFTGGGLNSATPAKTHCASEKLRKKRWLPEELAMSDAPAPTYNRNPPLPLDLEVPYNDDFRVLASEEDKSEESPRKYPTTSTTRSTVRSTESFLATLTKPTSNRNILVNNYNPSNLGEGSRSYSSGNNNANSNSNNNNSNNNNNNNNSNNNVRKLYTKHKNIIVSTYNRPIEPEFGTPYEEPNNNGTRELPSNFFNANWTTLFLGNNNNGNDRPSHKTHVEIITKNGATKKPNIIVNNYNPEIIFAPNPHNPSFNSMMMTNLLSGRGGEDIHSSPRLLYDRKTTCMLYLQADHTFFQKMGSDEASIEAITRHVQRANTIYRNTDFNNDGKPDNITFMIKRIKVHNMNAMKDPSYRFPGNYGVEKFLELFSEEDYDAFCLAYMFTYRDFEMGTLGLAWTGDLKNAGGVCEKNGHYRGSLKSLNTGIVTLLNYGKHVPPAVSHVTLAHEIGHNFGSPHDPEQCTPGGEDGNFIMFARATSGDKKNNNKFSTCSLKSIEPVLNAKARSMKGCFTEPQSSICGNGVVEPGEQCDCGWEEDCKDSCCFPMSRQPRLDETPCTLTPHARCSPSQGPCCTTDCKLKFGDKCRDDNGCRDPSFCDGRVPQCPPSVNKPNKTICNKEFVCYMGDCTGSICLAYGLESCQCIPGPQDDRIKSCELCCKLPGEDSPCRSSFEWNEAPFDVPDMYSKPGTPCNDYNGYCDVFQKCREVDPSGPLATLRKLLLSEESIASFKKWMQHNWYTVALAAVGVILLLALSTKLLAKRSNLKLKSVTIIHSATTETVRLPENNNGVIVHTAVRTKVPFKKKVRGERTKKPGTGAGVTAAAAVGTRNAAKSSANPEPKKTTRSQAMAKKKSFEEEPKKSSKKVGKHMKEIIDYSNRNNNGDDASNLSTTNNHTNTFGKVQKWLLESPIVAQPLSHIEHSSRVRKVMSKSQSTPERLVQKTPQKTKSMGNLSNEKVKLQVVYKPPFKFSLRLSKKPKVKTHVVGAGVRPKRSQKTSNRTGGQSSSKEVSTRAKRSALLLCNEAEDDNQILTLNEPNYETLKPPTPPRSMEHCYENVDMQAEASSSKPSSSSKVAPSSQNRASLEVTPPVTAQRNSYRRSNSLSTHNPFAAAPRRSSSKASGSVNLTRNFGSTQNLINLSQNLSKNKKRSSLNLKASGSGATRSGKDPPTMGVASPQRRSSSNANLRRDSSVSSSKAVPVPPTRNSRNSFSNIPRASLGGANSNAAVSTGAPPPSFSRQSSSSTATSSSSITAGVTSGVALQQSASTSAMQRHPPSQPTRRSLHNFRTRSTGTGAAAGKPGAAVTSAAATSAGASSAAASNENNELPSDLEVVVSDVENLVS

SEQ ID NO: 967 - DNA, 3029 bp, DROSOPHILA
ttaattctaatttggatttcattgaattggtgcactcacacataaaaacgagatatccacgtacttatgattttcgtgaggtgaggcagggcctacgattgtgggccggaagttaaggcgaggatttaacaatcaatttctagttctaattatacttagtcctgtcaatatgggataattcgacaaaattagagtatattcttttgagtcttcttctattgttaattatacaataagaaaatatatttaatattctatgatgtttttgtattacattaagcataatgttcaagtcattaaaaaaaaaaaacggtaattaggtgtacgaggaattttctaaataatcgtgtaagtgtattgcaattcaactcgtgcgtggcgaagacatgctcacgcgctcatctctacattttactacagctcacaaagaacaagacggaaaaaattacgtcatcggcgtcctatttggttgcggtaatgaaaaattgctacgtccatttccaattgtaatgggattttcgcaaggccagtaccgcacgcaatcaaatgcggagagcccaaggggcaggtggcatccaattaggaggccaacggaatcgataaagtgcgtgggcgcacttattcggggaaaattttatccgccgacaatatggcggtcgcaagccgacacacgacgcactaggtgaaactacttactgcgcctgggttttcaagcgaatatcgaatatatgcgtaatccttgggctctcagcacacgacttttaacttagttttaaacgagcaagcacttattaattagttaattcacctcttacggctcggacgtgaaggttcttcttcttctctacgcgcagatgtgttggaaaacgaggaaagctgaagtagggattggcccgcaggaattttccaacccgcacggtgcgaaattccgatacacgatagagctatcgattgttggttaggaacatttaccatctctagaaggccgcacgtgtttacgttcggtgggaaatattcttggtttctgttaagaaaacgttgctatttaaaggctacagatatgccgcgctccaaacgtgataagaaaggtgagagtttcggctttaatatatacgatttgtacttataacgtgcgatactcttcttcccttagtttccctgaccaaaaccgaccgcaagggtctggcttggaaacagcgcattgtggacgacattcggttctgcgtgggcaaatacccaaatatattcgttttccaagttcagaacatgaggaatagcttgctgaaggatctgcgacaggagttgaaaaagaattctcgttttatctttggcaagaatcgtgttatgcagattggcttgggtcgcacgaagagcgaggaagtggagccggaattgcacaaggtaattaagtttaagtggattaacatatatcagacactaatcacaggctatgtctattagctatccaagcgattaactggccaggtgggactgcttttcacggacaaatccaaggaggaagtcctggagtgggcagaaaactactgggccgtggaatacgcacgcagtggctttgtggccacggaaacggttaccctgccagcaggtcccctagaggacttcgcccactctatggaaccgcatctgcgttccctgggcctgcccaccaaattggagaagggaatcgttacgctgtacagtgactacacggtttgtgaggagggcaaagttctaacacccgaacaggcgagaatcctcaagctggtgggcaagcccatggccaaatttcggctgaccatgaagtgctcgtggacaaaaagcgaaggcttccagctgcatgtcgaggatgatgtgaacgacgaggaacaggctgatagcgcaatggaagaggaggccgaggccgaggccatggatgacaacgacgacgatgatgacgaagaggaggatgatgaataaataagtttaaggcgtagaaataatttttttatgtatatatcaagtgcagaaaatatacgtatattttaaaagtacattacatattatcttacgttcaacacagataatacttgattaacactagcttatactaataactaagtaaacaaaacacttaagaagcatttcagatattgcagctaaaaccaaagaaaggcacaaagcctcaggttgcgtcgtccgcgaggatgtagagcaccagaggctgttcgttatcgctctcctcctccaggagttcgctgttagttagggaaatatcctgagaggccgagccctccagctccaaggcaccggtgctagcacttgaaaagaattccagaggcatgggttgctcgggatcttcaggattcgagggggtttcagtctccagtgccacgtcctcctcatcattctccccggctgacaactccaaatgttattggtctgtcgagttcggcggcaccgtgcagcccgcggcaatgtgctccatcacctgctgcttcagctgcgccacatggtccttgaggttcttcacgatgctagccaggtcgacgttctcgcccttaagtaccttcacgcgatcctccagctttgagatgcgctccaacttgcgcttgcggcacttggatgcagccacacggttacgctgcctcttgcgctccagcttgatcttctcctgcgcttccatgtcaatgggattaacggtgggcgagctggcttgattgacgggctcgtccttaatcaccgagaagccctcggtcatgttggtgtaggtgaaggtgcctccgctgatgccattgttcaccgctgtcatggctgccgcagttgtgttattggcggcggaattagcggcggaattggcggacggaaatgcctgggagttagtgtgaagattgtgtaaggcctcctcgaatcccctgccgaagtccaactgctccacggtgacgggccccgccttggtggggaacacctttcccggctgcggtgtttgcatcagattgttggatagcaggatcttctccaaatcgggtgtgtttaccgtcttggatgacaga

SEQ ID NO: 968 - DNA, 904 bp, DROSOPHILA
ttcggtgggaaatattcttggtttctgttaagaaaacgttgctatttaaaggctacagatatgccgcgctccaaacgtgataagaaagtttccctgaccaaaaccgaccgcaagggtctggcttggaaacagcgcattgtggacgacattcggttctgcgtgggcaaatacccaaatatattcgttttccaagttcagaacatgaggaatagcttgctgaaggatctgcgacaggagttgaaaaagaattctcgttttatctttggcaagaatcgtgttatgcagattggcttgggtcgcacgaagagcgaggaagtggagccggaattgcacaagctatccaagcgattaactggccaggtgggactgcttttcacggacaaatccaaggaggaagtcctggagtgggcagaaaactactgggccgtggaatacgcacgcagtggctttgtggccacggaaacggttaccctgccagcaggtcccctagaggacttcgcccactctatggaaccgcatctgcgttccctgggcctgcccaccaaattggagaagggaatcgttacgctgtacagtgactacacggtttgtgaggagggcaaagttctaacacccgaacaggcgagaatcctcaagctggtgggcaagcccatggccaaatttcggctgaccatgaagtgctcgtggacaaaaagcgaaggcttccagctgcatgtcgaggatgatgtgaacgacgaggaacaggctgatagcgcaatggaagaggaggccgaggccgaggccatggatgacaacgacgacgatgatgacgaagaggaggatgatgaataaataagtttaaggcgtagaaataatttttttatgtatatatcaagtgcagaaaatatacgtatattttaaaagt

SEQ ID NO: 969 - protein, 256 aa, DROSOPHILA
MPRSKRDKKVSLTKTDRKGLAWKQRIVDDIRFCVGKYPNIFVFQVQNMRNSLLKDLRQELKKNSRFIFGKNRVMQIGLGRTKSEEVEPELHKLSKRLTGQVGLLFTDKSKEEVLEWAENYWAVEYARSGFVATETVTLPAGPLEDFAHSMEPHLRSLGLPTKLEKGIVTLYSDYTVCEEGKVLTPEQARILKLVGKPMAKFRLTMKCSWTKSEGFQLHVEDDVNDEEQADSAMEEEAEAEAMDDNDDDDDEEEDDE

SEQ ID NO: 970 - DNA, 7529 bp, DROSOPHILA
attacggttgctaggctttgtactatatgtaaatatatgtcggtaccaaatgattattcacataatttgtgtttatttttggctatcgtcgtctcccaattaccatacataatactaatctcaattctcgtggaacgcaggagaacacggccttatcgctagggcacgtctcttttccgcttatctgaaaatggttcttggtttgttgttttgctgtttttaaatatatttactcggtattgctccgtattggtccactcaatgaaattatgtttattcgattaattcatagtatataaagtctagcattattatacatatttctccatttaattcacaattttcctccaagagcaaaacctcaataatgaaatcgaaaaatgcattgcaaatatggctaaaggcggctaacacgcacacactcacacacacacagacagtcactcacctagagacccgcttcttcttcttcttcgatttatcagctgagcgagcaacacccgcatatattgcagtgcagtggaaagaaagagtggggcagagagagtgtgagagggggagcgagatcgaccgactaacccaaagttgtagttgtgtagtgcttgcatgcgtgtgtgtgtgtgtgtgtgtgtgtgtgcccttctaaaaagccccaaaagcattaaactcactcaaacggcattccactcaagcgcctcgtgacgtcagctgcgagagtaagcgagtgggagagagctttcgctctctatatagtttcttgttcgcaattcagattggagttattttttttcagagcaggcggcggcgtcgacgtcaattcatttggttttcgaacgcacaactcaacagtcgttcttctctgcgcgaactagaaaaattagaagcaatcgagagtgtgagagccgaaatttaaattaaaaatcgtacgaattaaaaagtgtacagtgctcaaaggaaaagaaacaacaagtgtgtgtgtgccattcgcaagcagattgtatttaattcacattcaaacacgcgaattaagttgaagtcgcgtcgaaaaccgtcggagtcgcttagtcgcgttcagtaggcgccaattgtgggcaccagccaccccaatccgccacccaccgcttcctcggcttccttcacttcctccgctcgttttccttcttcttcgacggtgatgcggtgctaaaacaaaatccacacgaagtccatatttgtttaagcctcagtttacactaggtatgttaaaaaaaaatatggttaaccagaaaagaagtacgcgagtgtgatgaaattggaaataaaatcaaattcatagtgcataatcctgatatttgtattgaaagtaacaaaaagtttggaaagcgttgcgatttagtttgtcaaaaataacccaaaatttctgatttaaataatattgaaaattttaaaatcagtatatcgttttttcgtgtgtgtgtgtaggctttgaattttcgtgtttttctcgtcgtttatttttttctataatagactttctgccattgttgggctatttgctgctgctttccttagccgcgaaagaggagagagaaggaaggcaaaaaacaacgattttcacttttatttgagaccagtctaggccaacacacacaggcaaacgcacacaaacacactcgcaagcactggcgcataaactattgcacctgtttgcatgtctctgtgaagcacctgcactgccaccgaaacaccgttatgataatgataaagccaaagataatgcatttcgaattgtgcacttacgaatcgtacgcaaatcggtgaaaattagctggataatttatgcgaaattgtgaaattaagctcttattcacaaagaacagtgtgtgtgaacttgcttagaagggcgaatatctaatgctcatatgatgagcactacagcataacatacttttttttttactttcaaatacgtcgaaagcagtcgaaaactatatagaaagtaattaacagggaaataattaaatttgtatttgatttgatttcacacgttgactaaacactaagtagtggtagcgaaaaggtgttgattaaatcaaagaatagtattagttcctgcctgcaatgcctcaagggcgaattctcatcaaatcgattgccgtctgaaatgaaaatgcagtttaagcaattacaataaatacatgacagcggcaatttgtgcttgtgcgcgacgtcaatggcaattaataaataactaattgttcggctgggcaaaagcaacaagaaggctaacttaactggaactgagtgaataacaataccgcgtttttccgcacacaaacacccacccacccccacccgttcaattcacagtaatgtatattatacatatgtaaagtgtgaactcagccacgcggcagttctcaagatgcaaagatccaaaacgaaatcgcaccgaccccggagacccgagacaaaatttagttatattacccaattcacacgaaaactgagcgcaaattaatacgcccgtagtcgcacttcacggagttgcgcgaagttggccaaaacagctagaactacacctacagctatataatgacataaacaaaaaatgcttatcaaaaaagttattaaaacgatacggttaagttattgcatcagccgcagaagccaaagtattgcaaacaatcacaattaaataataatcctttactgaaagttagcgctgcaaaagcgatccggataaaactctttcgatataataccaatgggatgtgcatgtcattcgaaatagtcggggctactaagttgtcttggaaactggtcgatccgatcgccatgtgtgaatcatttgaggcagagaaatgcatttgcatggcattacgtttccaattgcgattcatcacccgttcatcaccgcacctcgctaatcggcgctcggctctattcgtcgtccgcctttcatatttgtgtataatatatattttgtgcggtcgccggtcggttatgccagaaaattaatttttttttgtgagcgcacaaacaaattgataaaaagagaacccaaacccactttcgcacacacacacacacacgcacgcacatacagttgcagataaaagtcatgcaggagatagagctaaacgatataatagccatgccatgtacatatgtacatacatacatgcatgcatacatacaacggtggcaccaaacagaaggcgaaaaggggtagttggggggtagtaaggaaatagggaatagggaattttgatggggaggggggaggctcgcctcgataacaacgcggaactttcgactgggccatgtagatccgattcgatctcattcgatgtgatgccaaccaaaactgtggtggcttctcgtttgggcgaaaacacgaaaagtgaaaaaaaaaaaaaaatgaaataagcaataaatagctcagcatttagtgttgtttggcgcgtaggccgctctagcgcacagcaacagtcgaatttagcgaatttaaagcaaattaattaattaaaagaagaagccccgggcggcgtttggcattggctagataaactggcaaaaaacaaaaaaataaataaataaataaataaaagcggcgacaatatcatgatggcgatacaacgacacgaaaacaatcgcaaaagacgaggagataatggaatagaacaggaatacacaaatatgtatgagaggtgtatatgtatcaactgcctttggttctgcaaaacaaacaaattattaataatcaaggcagatgaaaactatagtagcgaatgaaaaataaaaaattgtgcgtatccttgccatatttgatgattcttattcgaaaacacttattctacgaattttcgcctgttgaaatatcgaagccacgttggctctcgaaatgtaatcaaacatttgccttttaaccagcaccactccactcattcgttagacctcgacatttccacatccacccaaaattcctaatacaaaattcggtttgttgaaaaccccgaaagcaagccaaccacatacgccacgccacaattacaataacgatggtagtttagatcagtgaaggaatcgaaccagcagcacccaaaagtcatagctgtagactattgttagtagttgttgttaagccatcgatatccacgacgccctactaaccttgaactctctctcttgctctctctttgtttgattgcagtgcgggacactagacggagccgaaccgttgtatcatcaacagcgcagcaacagaatggacgtctaccagatcgacgatggattccactcggacggcggcaccgagactccgccgccgtcacccagttctgggtcatcgatcgcctcgacctcggaccacggatcgctggagagcgtggacactggggggacgcagcggctggccgtgctatcgttcgagcaggtgagcaaactgcacgacgtcatggacgagaaggtggccatccatgggcgcggcaattttcccacactggaggtgaagctcaaggatctggtcaacctggtgcgccgcaagctggaggcggaggtgaacgccggcggcgccggggtgttagttaaggacatccgtctcaatggcggggcagctagtcatgttttagccagcgaggatcagccgtacaatgacctggacctgatattcgccatcgagctgagttcgccacgcgtctttgaccgcgtcaaggtggcggtgctcaacaccctgctggacttgatgcccgagggcgtctgcaagcgacgcatctacacgtgctccctgaaggaggcctacgtgggcaagatggtcaaggtgaacaacaacaatgacggcgatcgctggtccctcatttcgctgggcaactcgccgggccacaagaacgtcgagctgaagttcgtggacacgatgaggcgccagttcgagttctcggtggactcgttccagattgtgctggactcgctgctgctcttctacgactgcgccgctctgcccatctcggagaacttctatccaacggtggtcggcgaatcggtctacggggacttccaggaggcactctaccatttgcaaaagaaactgatctcaacgcgtcagccggaggagatacgaggcggcggcctgctcaagtactgcaatctattggtgcgtaactacaaggccgtcgactcgcagctcatcaagaccctggagcgctacatgtgctcgcgcttcttcatcgatttcccggacatcaatacgcagaccaccaagctggaggcctacttgcgtaaccatttctggggcgtcgatgaggaaccgctgcagtatcagtacctgatgcatttacgcgaggtagtcgagatgtcgacggtctgtctaatgggccacgagcggcgccaatcgctccatctaatccagtcgctggccgctcaggtgctcttcaacaagcaggagaagcagcagcagcagcaggcccaggagaagtaccagcagcaacagcagcagcagcagcatcagcaaaatcagcagcagcagcagcagcagcgtcagcatcagttccttgacccagcgcagcagcaacagcagcagcagcagacacagacgcaacagcagcaggcgcagcaggcaactaccctgacccttgtcccgcaggcgccgcccacgggccaggcgcagaccatttatgtgcaacaggccgccccagccgccgtgtgctgcacgagcagcgcggatcagacggcgacagcggcaccacagaccatacagatacaggccggtccgccgggactcatctatgccaacggcgtctactatgcacctgtgatccccagcaccatctgcacgtgcaactccacctggctgagcacgtgattagaacggcaggagcaggagaaggagcaacagcaccaccagcacgagcagcaacagttccaacagcaacagtggtcagaggatgcattgggagcgacacttttggctgaaactgaaactgaaccaccactagcaacagcatcgatagcgccaccaccaccatcatctcaaccaccatcatcaccgtcaacaacagcacccagaacccaagtccaaaaccagaccagatccacgaccatcaatagcagcaacaggaagaagaagaacaaggccaagactcagagtaagcaacagacgcagacagcaacagaagcagaaagcaattgcaacgagaagccgaccacagcaaccatgacaaggacaacaacaaagaagagcagcaggatcaagcaaatggcagcagcagcagcagcaacggaagcatgtgcagcaaagggaggagccggcggaatcacgggcagcttggtgctgacacctcagcagatcaacggactgcccgtttacaaccaactggatgatggcggacgatcggcggcgggcacgtacagcggacagtttgcctacttctatccgcacgacggctcggcgcccagtatgtttctgctgggcgaggactcctacctcaatgttaccgaacaacaggagcagcaccagcaccagcatcagcaccataatcaccagtttgtctaggatgtggagaagaagatgtgggaaacggttcatgcttgctggcctggccgtgccacttggcactttacgattactgttgattcatcattactcatatattcggttggctactttcttcgttaactgtatgatcagaggtctatttcactgttccttttctatatctctaattgaatgtgtccggcgacttgaaagcctttccacgacacttggcacacacgcgctcctactttaataatgtaactatcccgagagtttgaaccgcagactgaacttcagccgctgttagatgttgaacagggacaccacctaaatcactgacacacaaaaaggacgaaaacgattgcgtatcacatcactagtttggctatatgaaaatccttttacaccatatgcacaacatttacgttatttgtgtaactttctttgcctacgaaaactaaattttactttgtaaaacctattgaaagtctaaaaaaaagaaaacaaaaaatatacaaaaaaaagtaacctgataatttaaagccaaaatttaatctgtttgctcggtcgaaagtcgttttcatcttttccaacatttatcttttttgtaataaacctacccaaacactcaaagctgtaatgtaattttggatttgccaaccacccacatgtccccgcacacctatcattgtattttttaataaacaaacagacacacacaaaacctaaaaaaaaaaacaaaaatgtgaaaaaatacggcatgcatatgtagcacgttaatttcgaattgacctttttgtatgccaagtgcaacagacgaaggcggcgttttgggttccagtctagaaattccaagcaacaatctaattgcaggctgaaatgataatttaaagcgatgatatgtaaatattagtcaaattaatatgtggacgaggattcggaagtgtagaggatttatatatatatatatatatatgtgtctggtgtaccagaagttgctcaatgaaattcaatccac

SEQ ID NO: 971 - DNA, 2453 bp, DROSOPHILA
tttaattcacattcaaacacgcgaattaagttgaagtcgcgtcgaaaaccgtcggagtcgcttagtcgcgttcagtaggcgccaattgtgggcaccagccaccccaatccgccacccaccgcttcctcggcttccttcacttcctccgctcgttttccttcttcttcgacggtgatgcggtgctaaaacaaaatccacacgaagtccatatttgtttaagcctcagtttacactagatggacgtctaccagatcgacgatggattccactcggacggcggcaccgagactccgccgccgtcacccagttctgggtcatcgatcgcctcgacctcggaccacggatcgctggagagcgtggacactggggggacgcagcggctggccgtgctatcgttcgagcaggtgagcaaactgcacgacgtcatggacgagaaggtggccatccatgggcgcggcaattttcccacactggaggtgaagctcaaggatctggtcaacctggtgcgccgcaagctggaggcggaggtgaacgccggcggcgccggggtgttagttaaggacatccgtctcaatggcggggcagctagtcatgttttagccagcgaggatcagccgtacaatgacctggacctgatattcgccatcgagctgagttcgccacgcgtctttgaccgcgtcaaggtggcggtgctcaacaccctgctggacttgatgcccgagggcgtctgcaagcgacgcatctacacgtgctccctgaaggaggcctacgtgggcaagatggtcaaggtgaacaacaacaatgacggcgatcgctggtccctcatttcgctgggcaactcgccgggccacaagaacgtcgagctgaagttcgtggacacgatgaggcgccagttcgagttctcggtggactcgttccagattgtgctggactcgctgctgctcttctacgactgcgccgctctgcccatctcggagaacttctatccaacggtggtcggcgaatcggtctacggggacttccaggaggcactctaccatttgcaaaagaaactgatctcaacgcgtcagccggaggagatacgaggcggcggcctgctcaagtactgcaatctattggtgcgtaactacaaggccgtcgactcgcagctcatcaagaccctggagcgctacatgtgctcgcgcttcttcatcgatttcccggacatcaatacgcagaccaccaagctggaggcctacttgcgtaaccatttctggggcgtcgatgaggaaccgctgcagtatcagtacctgatgcatttacgcgaggtagtcgagatgtcgacggtctgtctaatgggccacgagcggcgccaatcgctccatctaatccagtcgctggccgctcaggtgctcttcaacaagcaggagaagcagcagcagcagcaggcccaggagaagtaccagcagcaacagcagcagcagcagcatcagcaaaatcagcagcagcagcagcagcagcgtcagcatcagttccttgacccagcgcagcagcaacagcagcagcagcagacacagacgcaacagcagcaggcgcagcaggcaactaccctgacccttgtcccgcaggcgccgcccacgggccaggcgcagaccatttatgtgcaacaggccgccccagccgccgtgtgctgcacgagcagcgcggatcagacggcgacagcggcaccacagaccatacagatacaggccggtccgccgggactcatctatgccaacggcgtctactatgcacctgagcaggagaaggagcaacagcaccaccagcacgagcagcaacagttccaacagcaacagtggtcagaggatgcattgggagcgacacttttggctgaaactgaaactgaaccaccactagcaacagcatcgatagcgccaccaccaccatcatctcaaccaccatcatcaccgtcaacaacagcacccagaacccaagtccaaaaccagaccagatccacgaccatcaatagcagcaacaggaagaagaagaacaaggccaagactcagagtaagcaacagacgcagacagcaacagaagcagaaagcaattgcaacgagaagccgaccacagcaaccatgacaaggacaacaacaaagaagagcagcaggatcaagcaaatggcagcagcagcagcagcaacggaagcatgtgcagcaaagggaggagccggcggaatcacgggcagcttggtgctgacacctcagcagatcaacggactgcccgtttacaaccaactggatgatggcggacgatcggcggcgggcacgtacagcggacagtttgcctacttctatccgcacgacggctcggcgcccagtatgtttctgctgggcgaggactcctacctcaatgttaccgaacaacaggagcagcaccagcaccagcatcagcaccataatcaccagtttgtctag

SEQ ID NO: 972 - protein, 738 aa, DROSOPHILA
MDVYQIDDGFHSDGGTETPPPSPSSGSSIASTSDHGSLESVDTGGTQRLAVLSFEQVSKLHDVMDEKVAIHGRGNFPTLEVKLKDLVNLVRRKLEAEVNAGGAGVLVKDIRLNGGAASHVLASEDQPYNDLDLIFAIELSSPRVFDRVKVAVLNTLLDLMPEGVCKRRIYTCSLKEAYVGKMVKVNNNNDGDRWSLISLGNSPGHKNVELKFVDTMRRQFEFSVDSFQIVLDSLLLFYDCAALPISENFYPTVVGESVYGDFQEALYHLQKKLISTRQPEEIRGGGLLKYCNLLVRNYKAVDSQLIKTLERYMCSRFFIDFPDINTQTTKLEAYLRNHFWGVDEEPLQYQYLMHLREVVEMSTVCLMGHERRQSLHLIQSLAAQVLFNKQEKQQQQQAQEKYQQQQQQQQHQQNQQQQQQQRQHQFLDPAQQQQQQQQTQTQQQQAQQATTLTLVPQAPPTGQAQTIYVQQAAPAAVCCTSSADQTATAAPQTIQIQAGPPGLIYANGVYYAPEQEKEQQHHQHEQQQFQQQQWSEDALGATLLAETETEPPLATASIAPPPPSSQPPSSPSTTAPRTQVQNQTRSTTINSSNRKKKNKAKTQSKQQTQTATEAESNCNEKPTTATMTRTTTKKSSRIKQMAAAAAATEACAAKGGAGGITGSLVLTPQQINGLPVYNQLDDGGRSAAGTYSGQFAYFYPHDGSAPSMFLLGEDSYLNVTEQQEQHQHQHQHHNHQFV

SEQ ID NO: 973 - DNA, 10997 bp, DROSOPHILA
gtgtcgatttcctgcaattctactgcggcatttataagatttataaaccacatattcccgagacattctacaactctatatggatgatattataatatatggacagacgaatgacgaatgtattaagaaactaaagttggtgctattagaatcagcgaagttcggcttacgtataaagtgaaagaaatgtcatttcatacgcacgatattggaagaacgaccttacaatgaccttaaactgaagggaggagttttattcatgtttgtcaaaggaaatgatttgcttattgtacctaaaataatcgaacgtaagattataaacgaagctcatggattcggacattatgcaaaccagaacaaaccgtacattctatacaacagcagttttggattccacacctagagagcaaggtcgaaaagcttatagacgcgtgtattccgtgtattattacgaacaaaaagctgggcaaacaggatggacttttatgatgcattgagaaaggtgacaagccgttacacaatataagtacatcttcgcacttgttggtggatttttgaaattcgtgtggatttttactacaaaatgtcttaacaacaactggagttgccagaggaaatgggcgggtagagagaattaaatagatctatcttatcgttttaaaaatacaacaacgattgaaaactctcgaaatgggatgtactggcgccatctatcggaggtaataggtaccccgagacgcatgcaaagcgccagagggcgacacagctcctctgacgagatggcatcactatttttattgggagtattggtatctcgggtgtaaaaattaaattgatgcctaatttttgaaaatatgtcacacaaataataagtatcttttaagtggatagatccattgatgtcgctggaattaaaaatacaaataccaatgttatcgttatcggcgagtccacactgtgctaggcaaaaatatcgacgtaccttgcgcccgatatctggcactaatgtatcgatgacggtcttgttaaattattaaaaaaaaaacaagtttgtacttgaaaagtacggcgtatatctacagcgaagaacgcaagaacccgccaaggcagcgtccgatgcagacgccatctgttcaagcattgagcccggaatccggaggaatcccggccaggatgtgatgtgcgcactgggccctctccgctggtcgatataaactcgtgcccccctcttctagccaccttcttgctgtcaaccgcctgctcattctaccccacagttccagtcccagtcctgcacagcaatcatcttcgcctggagaagtctaccggtagcacgagtggtggaaccaggcagactacaaaggacacggagaccgcggtgtctgggaaatcggctgagcacggaaaccgatccactagggttggcatcacgcaccactttgtccaggaacctgcagctgaggaatctagataacatctgaagtctcctgggaactgcgaaacacaccatatcttagcaaaatgacgtggtaaaagttgtcagtcgcaatctatacaaaggcaagaaactttatgatgaatccaggtctagatcttgcaaagattccgaaaactctgtccccaagagggaaccaaaggcacagttagccagcaatgaaatcgggaacccacggaatcgtagccactaaaaaggcgaaatcccggtaattctaccaaaatagcgcaccacctggacaccatagaagagagccttaaggcaaggaatcggtggcatacttggacagttgaagagaactttaaatctggtaatcagcggcgccaaatgcaactgcaactggtaaactagtactcatttgtaagccaaaacactgacaaacaaaagctgcatctgaaaagcaagtagagaacaccaggatacttagcgttccacggagatggccacagcatcgctggacgcactgcaggcagcctatgtggacttcagtgagataacactaagagaggtgtgcataccaaacggaatatacccaaagtctagagctcctattggtgtatacgtatacgcaatcttgaaacgataaacaaccagtaatcatataccatttagggcagagcaagtactcattcttagttagtcagacgattatcgcactttcaaaaagcatgttttaatctataaacggttattttttcgttttaaaagtgtatgctttgtaacagctctgttaaaaaacccaagaaaggttttatattttaaacttacgcattcctaaatgcttacattcgttttaggatttcgtttcaaacttattaaaacaaactacagactgtatacaaatatcagcatatttattaacgatacgatcttatcagtttgataagaaacgaatttcaaatttacccatcacaatgcgttcgtgtgttctacttgaagtcaattcaaactgtgttagaccaaggtgtataacgtaattagtattgaggagttttgcacaaggagggtacaactgttgaatcagatctaataatctttttccccgcagaaagtcggccatgggtcctacggagtggtctgcaaggccgtttggcgcgacaagctggttgccgtcaaggagttcttcgccagcgccgagcagaaggacatcgagaaggaggtgaagcagttgtcgcgcgtgaagcacccgaacatcatcgctctgcacgggatatcctcgtaccagcaggccacctacctgataatggagttcgccgaaggtggatcgctgcacaacttccttcacggcaaggtgaagccggcatattctctggcccacgccatgagctgggcgcgccaatgtgcagaggtaggtcgtcgtcgaggggcggggcggttataacgtagggctcaaccccgtagcgctttccatccaattcgttgaaattatctggtgaaataatgactcaaatggattgtggtaattcacattgcttgcatgattacttaaacaatttcaatagctattccgcataaccagaattaaaataatagtaatttgtttaaagtttagccctaattacatttccatttgttttcctctctagggtctggcatatttgcatgccatgacgccaaaaccactaatacatcgcgacgtgaagccgctgaacctgctcttgaccaacaagggacgcaatctgaagatatgcgacttcggcacggtggcggacaagtcgaccatgatgaccaacaatcgcggcagtgccgcttggatggcgcccgaggtcttcgaaggctccaagtatacggagaagtgtgacatttttagctgggccattgttctatgggaggttctgtccaggaagcagccctttaaaggcatcgacaatgcctacaccatccagtggaagatctacaagggtgcgtcctccaattcactctttttccatcgagcttatcgagatctgtgctcctcgcaggtgaacgcccgccgctgctgaccacttgccccaagcgcatcgaggacctgatgaccgcctgctggaaaacggtgcccgaggatcgcccgtcgatgcagtacatagtgggcgttatgcacgagatcgtcaaggactatacgggggcggacaaggccctggaatacacgtttgttaatcaacaggtgagacagctttattgggtcaatacacaattgtaaaagagtcaattggtgtttttatctattgaggaaagcgttcttttactctgcccgtctttaaaacctaatttaaattcgatattgtttggcactaaatgcaatcattaccctatacggataacatcacttttgcgttattttcctttgccacacattgctaactcttgatccttgaactgctcgcagattgtcaccaaagagagcgacggcacggtggccgctcaaccggatagcctcagttcgcaggagggggaactgagcccctcgtccacacagttaacaccgacaacggcggccaacgccaatgtgaacgcgatagcaatatcaaaaacaacgactagctcaatgaccgaaaatacctcatcaacatcatcggacatcacgccgacgaactcgggccaactggacaataatccgctattctatatggtcaccaatcgctgggacgcgattcccgaggaggagagcaacgagagccggaacgatagcttcaacctcacctcgtcggctgaggccactcagcgcctcgaaacgatccggaacggcatgatcctgatggcctgcaagcccatggagcagctcaccctcgacgtggaggcggtacgtcttgcgctattatgttcttggtgctattggtgttattgggaacatttgatgctctcactagtgttttttttatctttaagtattgatcttgaatgcaaattatgtttgtttatattccgaagtgtatagatctaaattaatatagatctaatttaatgtgtacacatagccttggcagtaagattaatttaatagcataaaaggatacaacgggccaaaaaccataagttgtaaatgaatagtaatttagcattgagaattgtcgaaattgttcccaaaaacaccaataacttgtagatgtaacatgttgagcaattagtaatagttacccacgatctttttcctccagaatggctttgatctgagtcccagcgaaagcagcagcagcagcacgaacggtgagtttgccatcgataatgtctgatcttgcatacgtctatgaacccacctgctgtccgtttgttttccgaccgttttccttcgtctggcatgaatcacacgcactttgccgtcgttcagagacacaatggcgtggtccggtttttatataatagcatttaataagaacaatatttttgaatgcccaaaggaaacgtcttagttgcaaaaatattccgtagtgattttatcaattgaatatgctatgctatcttatttgtgaaacattagtaatagacactattgtataactacttcgaatcctgctagacataatagcgcctacgacatgaatttgacgaattcgtattgggaacgcaaagaataattcgaatactgtcaaagtgatcatactcatgtattaagaactctttgaatagactcacttaaatcgtggaactagggtatccgagtttcgactctattgccgcaggtcacttttactagagcgtcccagcttgacgcattgtgtccacttctgtggcacgacagctgttcgatttcggctcccgccaaaatagccgcaggtgacgcattttcgcccagtgtaaacaatgcactcaccatccctgtcccgcgcattgcccaatgctagtttaattggacgccgcggtgtttttgcattatgtatgtatgtacatatgtacttgcgaatgcacaaggaatcttttgaacattattcaattgtcaatggtctggctgtgcggccatataaattataaatatttagtgcgctcattcggatcggaacggatcggattggatgggattaggaatgggatctcgcaatgctgtggggcgtacatagttgggatagatcgggaattgcttagccatgaatctagcctatttttaaattcagatgtttacaaacagcagattgctttcattagctatgaaagaaaagaaaatgcagcgcataaatataagacccatttaatactattccttcgctaaatttcatgatctagccttttttacgtagtttttaccatagtttccatcaaaaaagcatatacgaatgcattagaagtgtaagaaacgtaaacggatttgcacagaaaccgatatacccgcggatattccacggtagcggccccaaatagttgcacacaatttcgctgcacaattaaataatttgtaatttgttagcctggcaattttgggacagatttatagccgaaggcatgctccgtcgctgctgcccggcgagcataaacaacaacagcagggtgataatggggggggggggggcggttggcaaggggtggtgctcggggagatcggagcagcagatatatgtagaaataaaggaacgcacacatgacgatgcgatcgccacggacttttgagcatcagccccagcgaaacgcgaaacatgactcacccggcaataatctcacttttatttcgatttcgtctatatggcgcacatacacacaaatggcagatcgtagaacttatatatagatcggggcatatagcggatatatgtacatatgtgcgggacgatgttaccgatttgtataatcggtgggagccgtcgaatcgagcgggcaaatctcacttggctctcggttgacacagacggtcggagatctccgacttacatatgcacatagatgccatatgctcatactatatgccatatattgcccagaactcgtacatacatataagcatatagtatatgctatataggatttgtatctgacacatggtatatggagcccatgtacatgtacgctggcaatgtgtaaatagtaaatgcatcaacggtcgagtccgagatactttttggctctcgatgctctcgaagttcgccggctgcgtcagaatcgaatacacagcaagaaatgggctgggaagcgtcctaaaagccagtaataaattctatcttcaccttgagtagtagtaacaatctaaatgaaaatgggatttgcaaaaaaaaaaaaaaaaatcatccatttcaaggccagcatttaacccatatcctttcgctattttcttcggaactaatattttctttcagtgcagggtaattattccgttttacgtgcgcgccctactcccctgagatttcccaactgcagatgccaactgcattaatcaccgatttcgatcgatgttcgccgcatcgaatttgaatgaatcttcattgacttttggttcgtcatggaatttggtgggtgggttgttgtctatttatcggggatctcgctcgaaagggttatattttatcaggagggtgacttacgaactatactgtagatggaaaactagtttttcctgcgaccataaatggtttctatcatctagcgaaatgatagcatcttgcccaatgatccaatccaatgcctgtattttcgataataacatgaccaggttttggtgagtcattcgctacagtagccgattcaaactgttcagatacatgcatttttaataggataggcatatattttcgaaaactttgtacattgtagtatttcgaatgtattgcaatcgcctgtaattggtacctgtacctgtaaatgctgagtcaccgagtgcggttttcgaaaacgtttttcaaatcaattcgccaaatgactcatccaccaccaccgattgccaccgattgctaactgcgtgtcccaggcaaagaaaccacttaacccgcacatcttgggtcgttttccgccccgccgagtgggaatgatgccacggatttgcgttctggccgcgtcatcgtcatcggggcctccgtatatagtatataacctccgacacaccgaattcccccggcggtgccgaccaaatacgagcgatcttgccacatctgcggagcgtttagaaggcaatccccggcgcgagaattggcgcgtttgtttgctctacggcggacgtggatgtggatgtggacgtctcggctttggcctcagtgtgcgtccgagagccgtgcgatattgagtggtacgcgaaatgttccggagtgatcgggatcgtctgcagcgtactttgccgcggaacttggccgaaacgaacctcgcgtttggccaggaaatgccccctaaaaaagcgtcgaaaccgcccgtttgcgaatgagatttccacaacattttcgcgatttgtttgcggtttgttttccccccgaatcgaaagcaacaaaataggaaaaaaaaaagtgttgttcggtggaaaatagcgagcagatctgaagcagaactgaactgaactgagttgtgtgtgcggaaaacacgtcatccatcgcaagaaaatcagcggcggagaaaagaaaagtgccagagtgcgggtacaaacaatgtaaacgattttcattcgcatactgttgagtgtgttggagtgtggagcatcttccgatgccatcttccatatagccacagtggcaccacaaaaatcctgcaatcccaagatgtgcgacacacgcgccctgatcaacaccaaacagaccagcgatctgcacagttgttggattatatatagtaggtgatcgatcgcaaacacgcatcctttggaggatcctctaatctggcagaagttgctcttaagttgattgtatttccttcggactcttagtttttttttttcagtaattcgaatacttagtatttattgaaaacgtgcactgctttgcgacacttcatagatttatatattgatgcatatatttcaatttgctttgatacatttaggtaaatattatgttttggttagcagttaaagggaaattcgtttgaatagccatttatttggaagtctgatatgaatggcacaaagccgtttattttccatatacataaagcccgaaggaagtaatcgactatcttaaagatgctgcgattgtgctaaataaaatatttattagcgttcgaggctgtcgaagttcagtttcaagttcaacactaatcgcataagagtagtactagttggatttgaactaaatcatttccgaagtgtatggttgaaactatcttattcaaatctgaatctaaattggcactactattctatactatacgctattaatatgcttaatatcaacggaattgtcattgcagcaaagagcgatggccgcgaacgactcacggtgacggacaccaagccggtgatgatgaccacggatctgtccaacaacaacggcggcatccacgcccactcgaacggactgctgagccatgcgaatggttggcaagcaagagatgaggagctgcaggagcaagagcatgagcaggagattgtcaactcgttggacgtcgacgtggatcccgacgaggatgagaacgacggcaccgaacagtcactggccgagattcttgatccggagctccagccagagccgccgatacccaacgatgccgaatcgcagctcatctaccgggaccaccgacacatggccaaggagtacctgagcgtcgacacgaacctctactacgcgcaggacttcaaggacaagctcatcgtgcagatggaccgaaccgagcgcgaacagaagcaggagcttctgcgcaagatgaaggacaaggtgagcttagctcattatttcctctcagaatcgaagttctcaaacctttttattaactccataaaatgaccttacaaaaatataatatctgtgaatttgtttcatatttactcaggagggtcttcagagtctttacaacaatctgcagcagcagtacgcttcacgccaacttgcggccggccatcatccgcaacctcatcctcatccgcatccaaatcagcttcagcatccacactcacatccgcctatgcatttcctgcaggatgagggctgtggactgctgcccggatcggtgtgcggaggctctgagtccgtggaagaaggctgggtggtcatcccaccgcatcacaatgcgtagtctcgtgcgctgccgattcgatcgatcgactctctatgtcttataggctagtactctactttaatccgcaatatgttatatgttatctgtaatctgtaatccaatattcgtagtctgtatctgtacgattaaccatagcactttgtttatttctatatctatgactatttcgttgtaatcgttttttgtttaagtctaagcgtattcagtccgtgtttcttttaatttagcgaacaattgtttcgatccattagcagtctcgcaagcttcgtttaggttttaatattatgattaagcttaaaacacacttagcattagcacatgtatctgttcgaggaagctgacaaggagtagaccaaaaaaatataaaaaccatcgaaagcaacgacaaacaaactggagcccttttttattacatggaaatgtagtaatccaaattcaatacaaagaaaaacgtactgaaatcacatcgatttagaattctatttattgccgacgaccttaaatactgagtaataaattctatatacaaaatgtaagcctagaaagtccttccatttatcgtcaattcaacgaagaacgttttagtgcaataaattaggcagtgtccttgtctcagaatcgcaagaaaatactacttttaatgtttacttaaatggggatgttgaaaaaaaaaattgatatatgaatgaatgagtgatttagcttcgacgaagaaggacagtccagaattaggaacgaactttttctagtttatacaaattaagtacatgttctacatattttacactctattatcagagctcgtaaaaaaggttttttttttgcgtaaagaactctacgaaataacttaatagcaagtatgtgcaaaatgaattggccgtaattggtcaagtttaacaaattcgatataaatcataaaggtggtgggtgtatgcctttcgacgcagtgaatgctaattctttataaacattatgcttcgttaaatttacttaattttatcacaacatagctctaaaatgtttgctttttcattcttcaaaaaagtgactgcattttcaaacacatgaatgacaagtatctgccatttttatacattatgtttgcttatggatgaactatgcatggcaattaaagaagggtctcagccacacaaataaatcctatttttcgagctctgacttatcaatcaagtgagaaatgaaggcatatgcggtttatacaagttaattaaaagttatttaataatttaccattgtctgtgtattcgttcgagagcgaaattaaggcatatgcggtctttacatgtttcatttccgtgcttggcacattttcgttactgcagtcatcacaaaatctcgcatgtacataggtctacgctagctacacatagta

SEQ ID NO: 974 - DNA, 3367 bp, DROSOPHILA
cactaatgtatcgatgacggtcttgttaaattattaaaaaaaaaacaagtttgtacttgaaaagtacggcgtatatctacagcgaagaacgcaagaacccgccaaggcagcgtccgatgcagacgccatctgttcaagcattgagcccggaatccggaggaatcccggccaggatgtgatgtgcgcactgggccctctccgctggtcgatataaactcgtgcccccctcttctagccaccttcttgctgtcaaccgcctgctcattctaccccacagttccagtcccagtcctgcacagcaatcatcttcgcctggagaagtctaccggtagcacgagtggtggaaccaggcagactacaaaggacacggagaccgcggtgtctgggaaatcggctgagcacggaaaccgatccactagggttggcatcacgcaccactttgtccaggaacctgcagctgaggaatctagataacatctgaagtctcctgggaactgcgaaacacaccatatcttagcaaaatgacgtggtaaaagttgtcagtcgcaatctatacaaaggcaagaaactttatgatgaatccaggtctagatcttgcaaagattccgaaaactctgtccccaagagggaaccaaaggcacagttagccagcaatgaaatcgggaacccacggaatcgtagccactaaaaaggcgaaatcccggtaattctaccaaaatagcgcaccacctggacaccatagaagagagccttaaggcaaggaatcggtggcatacttggacagttgaagagaactttaaatctggtaatcagcggcgccaaatgcaactgcaactggtaaactagtactcatttgtaagccaaaacactgacaaacaaaagctgcatctgaaaagcaagtagagaacaccaggatacttagcgttccacggagatggccacagcatcgctggacgcactgcaggcagcctatgtggacttcagtgagataacactaagagagaaagtcggccatgggtcctacggagtggtctgcaaggccgtttggcgcgacaagctggttgccgtcaaggagttcttcgccagcgccgagcagaaggacatcgagaaggaggtgaagcagttgtcgcgcgtgaagcacccgaacatcatcgctctgcacgggatatcctcgtaccagcaggccacctacctgataatggagttcgccgaaggtggatcgctgcacaacttccttcacggcaaggtgaagccggcatattctctggcccacgccatgagctgggcgcgccaatgtgcagagggtctggcatatttgcatgccatgacgccaaaaccactaatacatcgcgacgtgaagccgctgaacctgctcttgaccaacaagggacgcaatctgaagatatgcgacttcggcacggtggcggacaagtcgaccatgatgaccaacaatcgcggcagtgccgcttggatggcgcccgaggtcttcgaaggctccaagtatacggagaagtgtgacatttttagctgggccattgttctatgggaggttctgtccaggaagcagccctttaaaggcatcgacaatgcctacaccatccagtggaagatctacaagggtgaacgcccgccgctgctgaccacttgccccaagcgcatcgaggacctgatgaccgcctgctggaaaacggtgcccgaggatcgcccgtcgatgcagtacatagtgggcgttatgcacgagatcgtcaaggactatacgggggcggacaaggccctggaatacacgtttgttaatcaacagattgtcaccaaagagagcgacggcacggtggccgctcaaccggatagcctcagttcgcaggagggggaactgagcccctcgtccacacagttaacaccgacaacggcggccaacgccaatgtgaacgcgatagcaatatcaaaaacaacgactagctcaatgaccgaaaatacctcatcaacatcatcggacatcacgccgacgaactcgggccaactggacaataatccgctattctatatggtcaccaatcgctgggacgcgattcccgaggaggagagcaacgagagccggaacgatagcttcaacctcacctcgtcggctgaggccactcagcgcctcgaaacgatccggaacggcatgatcctgatggcctgcaagcccatggagcagctcaccctcgacgtggaggcgaatggctttgatctgagtcccagcgaaagcagcagcagcagcacgaacgcaaagagcgatggccgcgaacgactcacggtgacggacaccaagccggtgatgatgaccacggatctgtccaacaacaacggcggcatccacgcccactcgaacggactgctgagccatgcgaatggttggcaagcaagagatgaggagctgcaggagcaagagcatgagcaggagattgtcaactcgttggacgtcgacgtggatcccgacgaggatgagaacgacggcaccgaacagtcactggccgagattcttgatccggagctccagccagagccgccgatacccaacgatgccgaatcgcagctcatctaccgggaccaccgacacatggccaaggagtacctgagcgtcgacacgaacctctactacgcgcaggacttcaaggacaagctcatcgtgcagatggaccgaaccgagcgcgaacagaagcaggagcttctgcgcaagatgaaggacaaggagggtcttcagagtctttacaacaatctgcagcagcagtacgcttcacgccaacttgcggccggccatcatccgcaacctcatcctcatccgcatccaaatcagcttcagcatccacactcacatccgcctatgcatttcctgcaggatgagggctgtggactgctgcccggatcggtgtgcggaggctctgagtccgtggaagaaggctgggtggtcatcccaccgcatcacaatgcgtagtctcgtgcgctgccgattcgatcgatcgactctctatgtcttataggctagtactctactttaatccgcaatatgttatatgttatctgtaatctgtaatccaatattcgtagtctgtatctgtacgattaaccatagcactttgtttatttctatatctatgactatttcgttgtaatcgttttttgtttaagtctaagcgtattcagtccgtgtttcttttaatttagcgaacaattgtttcgatccattagcagtctcgcaagcttcgtttaggttttaatattatgattaagcttaaaacacacttagcattagcacatgtatctgttcgaggaagctgacaaggagtagaccaaaaaaatataaaaaccatcgaaagcaacgacaaacaaa

SEQ ID NO: 975 - protein, 678 aa, DROSOPHILA
MATASLDALQAAYVDFSEITLREKVGHGSYGVVCKAVWRDKLVAVKEFFASAEQKDIEKEVKQLSRVKHPNIIALHGISSYQQATYLIMEFAEGGSLHNFLHGKVKPAYSLAHAMSWARQCAEGLAYLHAMTPKPLIHRDVKPLNLLLTNKGRNLKICDFGTVADKSTMMTNNRGSAAWMAPEVFEGSKYTEKCDIFSWAIVLWEVLSRKQPFKGIDNAYTIQWKIYKGERPPLLTTCPKRIEDLMTACWKTVPEDRPSMQYIVGVMHEIVKDYTGADKALEYTFVNQQIVTKESDGTVAAQPDSLSSQEGELSPSSTQLTPTTAANANVNAIAISKTTTSSMTENTSSTSSDITPTNSGQLDNNPLFYMVTNRWDAIPEEESNESRNDSFNLTSSAEATQRLETIRNGMILMACKPMEQLTLDVEANGFDLSPSESSSSSTNAKSDGRERLTVTDTKPVMMTTDLSNNNGGIHAHSNGLLSHANGWQARDEELQEQEHEQEIVNSLDVDVDPDEDENDGTEQSLAEILDPELQPEPPIPNDAESQLIYRDHRHMAKEYLSVDTNLYYAQDFKDKLIVQMDRTEREQKQELLRKMKDKEGLQSLYNNLQQQYASRQLAAGHHPQPHPHPHPNQLQHPHSHPPMHFLQDEGCGLLPGSVCGGSESVEEGWVVIPPHHNA

SEQ ID NO: 976 - DNA, 2279 bp, DROSOPHILA
caagacaagacaacctggtcgataacaaaggtaaacaggcaacggccagccaaggagcagggcaactgaaaaagcctcggtcgtgggattcgatcgggattgtcggctcagcgcgactgggctgagaaccagatgcagatgccgatacagatatagatacacgtacgcgcagatacggattcagatacaagtacacccgcccctgccgctgtatgcccaactaatcattgtgtgattcttgtttgtttatttgcccggcattatgaagagacttttcggtagaaattatttattgtcgcatgtgtttatgtatccgtaaccgagtatctcagttgcttgagccaactgtgtagctgtgtagctgtgagtatagcccttaaagtggcacccaatcggtcagttagctagaaattcagatgattaaatatggattcccctacatcagctaatttcaacagtttgggagtaataaaatcgaaattggatgctactaaagggcacatatttacttaggcttttatcaacgttgcatatatacaaatatcctgcatatttcgcaaaccaaagattctttctcaagtaaggcctaaacaatttgaaatggttaatttcgtagatgttgctttttacaattaacttgtcatgtggaatatactttactgcctaaaatttaaggcagttaaaatccctagaaatgcaaataacttattgcagaaacgggctctgtcggctgtattttgctcttatctatgaaatattgtcaatattttccaggcaaagcacatgaaataatgatctagacaacggtttctcccatttgcagtgaacttaaaaattaaaaacccccgagacgtgtcttcctgcacagaaaaagagacaatgggaaggtaagtcaccgggtgggagtccctgggccgaatcgatcagcccgtcgcattgctatataagctcggcgaaaccacaatctgcaacaacagtatctctccagttgtattccaagatgaagttcttcgttctcgtggctatcgcttttgctctgcttgcttgcgtggcgcaggctcagccagtttccgatgtggatccaattccagaggatcatgtcctggtgcatgaggatgcccaccaggaggtgctgcagcatagccgccagaagcgagccacatgcgacctactctccaagtggaactggaaccacaccgcctgcgccggccactgcattgccaaggggttcaaaggcggctactgcaacgacaaggccgtctgcgtttgccgcaattgatttcgtttcgctctgtgtacaccaaaaattttcgttttttaagtgtcacacataaaacaaaacgttgaaaaattctatatataaatggatccttttaatcgacagatatttaaatattataatgatttgtaattattactaattactttttatggaaataattggtaagaaggaactgggactgtaaaaatttcttaatagttaagctactattttaataataaatattgatcacagaaaattttcaaaatattttatatttctttggctttataactttcaaagtcatagaagaacgacttaattattccttgtgtatgttccttagtcttagtctgtgaaaataatctgcgtttatcattaccaattcgtacaacaaaatatcggtcattagcgttagcgacttaccatataagttaactaaacctaatcgagctaaaaaaaaaattgaggtcccgaggagcacgatctatatataccaaatatatacgtatatatttactttgtttaaaaaagctcttaacgggagcagttattggtcttcatggcgattcaaggcagattttaataaagaaatattaagctcagtaaactttacttaaaaaagcaatacaaatttgaaattctttttaaatttgtataatttctcccatcgattgtttgcgttgtactttaatataatttggttacataaagcttttgctgtagtttccaaacatacaatgtcatataacggcataattagtcagtttctaactgagcaacaaacggaaacagctttcgcatatactttattccgcataactttgaaaagaaacaataatattttctattcttacgacaaaaatactcattatcataaaccggcagcctttcaatttactataaaacacgaatgcaacctgaacgagctggaacagttctcgatttcatatcacaacatgaagatcacgattattctggcgctaactctagttgcggtttgcttaatgcaggttcg

SEQ ID NO: 977 - DNA, 279 bp, DROSOPHILA
atgaagttcttcgttctcgtggctatcgcttttgctctgcttgcttgcgtggcgcaggctcagccagtttccgatgtggatccaattccagaggatcatgtcctggtgcatgaggatgcccaccaggaggtgctgcagcatagccgccagaagcgagccacatgcgacctactctccaagtggaactggaaccacaccgcctgcgccggccactgcattgccaaggggttcaaaggcggctactgcaacgacaaggccgtctgcgtttgccgcaattga

SEQ ID NO: 978 - protein, 92 aa, DROSOPHILA
MKFFVLVAIAFALLACVAQAQPVSDVDPIPEDHVLVHEDAHQEVLQHSRQKRATCDLLSKWNWNHTACAGHCIAKGFKGGYCNDKAVCVCRN

SEQ ID NO: 979 - DNA, 5574 bp, DROSOPHILA
caggttttttgttttctttattttttggtttctctagatcctcgaagaagcggagttgagtccgcttatatggccagtcatgtggcacgcatcatcatttatcaaagaacgcggcaacaattcgcagggctgacaacaagccaaaaaacaacctccaatctttcgtaacgaaagacacccaacttgttccacccacaaaagacgccgccgttttcgtgtcgctactatttttacccactcccagaaatttttgtttttgtttttttctttttttttctgtctattcggtctcctgcgtttccttggatgctttattgttgttgtcgacgcttatctgccgtttgacattgatgtgctgggagtacagtggtcgaaatggagaagtacacttgattatctaccaaaagtaaaaaaaaaccgttagtttaagtagatttatcggatagttgctttataatagaccacactgcgtatgagtaatattttacagagcttatacataaaatattgcaagtggaatagttaacatttctctaaatgatttaagtattcaattattttagccactttggtagtaggggtttcactgtacgcggcgcttgttggtcctgtcatgtaacggttaaatctgcatgaaaaattaatgctgtgttgttgatacggggaaagtggagagggaaaatggtcgccgtattgcgtatgtatgtatgtacatacatatgtacatttatctgcctctgcgaattgttgttgtgtcgaaattagcatctcgaacagcttgcgttactattccacccgcagatttacagttacccacttacatatgcacacttggtttacccttgcatttgctgtttttaaagacattgatttcgtgagattttattgtactattaagttgaccgttacattggatttatctctgtctggctcatgggtgggaacaatttgcgagagtaagtgggtgagcacgggcggcataacgggatacagtgaacactcagtagctgggacgccatgggggatatggacagtgaaactggcgccgctgctgcgtcgactgcgacgccgacggcgactgcgactgcaactgcaactgcaactgcgacagcggctcgtctgcgtcgcgtcgctgcagcagcgctgccgctgcgcggttaaccgtttcgcgccgatagccaagcagcgagttaccgttacgcgattgctgctgctgagctgccaccgtcagcgtttcccttcccgctctccgaacagctccaccaactccaactccccttccccctccaccaccaaaaatcgcagctccatttccccttttcgttgttgtttttgccgttaacactatatgctgcgcagtccgcttcgctgttaggggtgctgctgttgcagtagcagctgtaaagagttaacatgatttttttttaactaaaagaagtacaaaatgttaaaggaatttatcaaaatccgaaattgtaccctcgtaaaccggcttacctgctgtcttcttcatctgtgatcgatttaatcccttcgttttcagaaccattccattagattccggcttggctgtcaacgaagaatgagttccacataccgctttggatgacagctgatcgtccaacggcggagccttgccacccgaaccggctgcactgcgtctgaccaacgttcgaacattggtccgattagagatagattgttgtatcgagccctggtggctctgcagcttggcggtttgtttcgatccctcgatggcagacggacttatcggggactcctgcagatgctgcgcctgctgttggaggatctccgccttgcgtatctgctgctgggtgcggaaggcacgcttgtaggccgaaacctgtcaaggatcatgggatatctatgagatatatgtgagttagacatattacctacctgcgaggcactcgccaccagcagctgattggctcccttgacctggcctggtgtcctgtcctcccgcttctgattcgcctttctttccggtttctttccgagctttggatgcgatttcttggaggcattagccgccgtcacgtcatcatctttggccggctgcaggaaggatcgatggctggagcggctaacctggttgctggtcaccttggtcactcgcggcttatcatgcagagtctcaagcagctgcttcttcttgacattttccttagccttctccttgaccgtgtccttgacctcgtggggactgattggcacatcctcgcacttgggttcctccactttggttgagttctgcagactctgttgctgcaggtggacgcgacgcacgggtgccagggtggctctattggactcatcttgaactgaagccgcttccgaatttgcttgcgaagtgtcgtgggaagtggaaccggaattggaattggctttaccatgctccgaattcaatttcgtcgattccaaagtatcgtctttggtttttccctcaatcgagcgtaattttgtcgcagatcccgatgggattgcccaattttgactactggcatttgagttacccaccgaagcgttgtctgattttgctacatttgacatcaaacccttgccgcacgggctacttgatctggggtacttgggccaatcttcacctggattaacatcccaatcgcctgatgtgtcttccgaactctttgcatatccgaaatcgttaaccgaccttttacctaagtcttctgcatatacaattattataattattatcactcacatacatatatgattatatcatctagttgacttaccttcatatctacccaaagaattatcccaagtgattgtcgagttgctgggcctgaaactagtccgcgaactgctgtccaagctggatccccgagtggttacatcgaagccccgtggaccgggtggagtggcgggtcgcgctatggattccagcgattccattagcttaacgcctccggactccaggcttcggctcctctggcgatagttggcgtgcaggacattgtgaaagctaagctggcgcggctgttgtctcacctccgaacgtcgcgtggtggcattggttttggtggtattaattgacatatccgagctcttctcaattcggctccttggcgaatcacggatactggcattgattggtctctgctcgttccgattgaaggcatatgtggccacgggtccatcggcgaattggatgtactcgaactgcttgatgcgatcgcccaaagtctgaaagcggtggcgcatctccgacggctgttgtccgtttctggtggtggtgctgtcatttccagtgcctagtggaccgagtccagaccgctttcgtccaccgtccagcttggtcagcaccgaaatgcgacgcttgagggcggcatccactggcatcagggagtcgccatcgctacgcggcatttggatgccctgcgccagtgagctcttcgccatggcggctatgtggtgttgcctgcttggcggcatcattgctacggatcccaaaatggctgcagatggacggggtggcatgctcatggaacggccactgaacatgcccatatcgaccagatgagactcctctttggagtccttgcttttgcgcatcgatcggctctggcgctcccgtttcgctttgcttttgcggaaggatccgaccaggaatccggtgcgggatgactcgctactgcgcccgctggagcagctcgaactggcgaccctacgcacggaactttgaccgtaaacggaggcgtaaggacgagccgccgtaaaggacatggagcgtgaacgattcgcctgcatcatcgagtacagaaattggccggaattgctattgctggccgccgatgcctgatccgcttgcatgatgtggctgcgcggatagatatcgttggcactgggcttcgcctccgccctcttgatccgtcgcaaaggaccagcgttctcagtacggaaacgtgggtgtcgattgtctacaaattgattgtatacgatgtattttactttacttatatataagaaatgttagttataacggtgaacttacgtgaactatagccgcgctcgtaataggatctaacggcactttcgtacaactcgctagtgttgcgcaaaaaccagggttgcattcgggtattcactttgatcaaacgatttatctggtcgggtttcatcgtaacgccggataatttctacgtccgaatgttggcaatattcgaatttggataaatggcacaggtatttgtggcctataataataactagtttggcttctatctattggcttgaacttgaacaattttgctttccaaatgcactgaatcgaagttaatgtttgaatttttatttgcctgttgctcagaccacttttgtattgcttgacaatttaatgctcttaaaactaatggcttggggcaaaacgggagaaaagtaatcgaaaacgtaactaactgcggtgtactaaaacatgccggtgcgtgaaaatggatatgtctgtctgtattttgaaaagaaaaaaaagaaaatcacacgcacgaaactcaagtaacgtcaacgttaaagccgagtaaaaagaagtgttacatttatttcgattttgacacaacaatcggagtctgccgagtttattccctctatatctatatatatttctaacacgcgctacaaatcaataagtcaatatgaagtcaggctaactttaatccaaggaattcatctgtgcatcaatgatctttggttagtccatatgaagtccagcaatcttgaatccaagaattcccacagtgaatgaacacacgagcacccagcttaatttaacctcggttggctcagtttgcggatttcgcgtgtccgtaacgaacgaaacgccgaacttagttgtataattatgtgtgtttcaatcaaattagcccacaccggtcatacataatgcactaccatgctcactcattcgttagtcaacgctgctaatccgagtcaaccactcactccaacccgccgggtagccaacgtcatggactcacgaaaaagcagtcatttgacattgatttatcagtggctgtcaaagtgccgtcatccgccacccccgcttttccagcccgcttttccagcccgcttttccacccacttccaaacacacccccccaccactttggccgctgggcgtggtcaaggtaaaaatgtaataattagccgcagtgatgtgatgatgttcggggtcaccccctcgttagccatggtatcgtatctctggcccatcgtggtgcctcgattttgagcttggccagcagcaatttgtcaaagtttggcctgaaaaatgaatgctggtcgtcctgtttgtgcactcgaagaaattacgcagtgaaagtcattaagagatatccttaaacttctgttaaacttcttctggggacacaagaaaggtttcataggcttactatactatttttcattacacacagtcttaattatgcaaaataataaatagtttaaaggtatatgcctattttaaattatattcctgatatttaagcgaattttttagtgattcatagctagttttcgggcttattacctgacata

SEQ ID NO: 980 - DNA, 3276 bp, DROSOPHILA
taacacttctttttactcggctttaacgttgacgttacttgagtttcgtgcgtgtgattttcttttttttcttttcaaaatacagacagacatatccattttcacgcaccggcatgttttagtacaccgcagttagttacgttttcgattacttttctcccgttttgccccaagccattagttttaagagcattaaattgtcaagcaatacaaaagtggtctgagcaacaggcaaataaaaattcaaacattaacttcgattcagtgcatttggaaagcaaaattgttcaagttcaagccaatagatagaagccaaactagttattattataggccacaaatacctgtgccatttatccaaattcgaatattgccaacattcggacgtagaaattatccggcgttacgatgaaacccgaccagataaatcgtttgatcaaagtgaatacccgaatgcaaccctggtttttgcgcaacactagcgagttgtacgaaagtgccgttagatcctattacgagcgcggctatagttcacacaatcgacacccacgtttccgtactgagaacgctggtcctttgcgacggatcaagagggcggaggcgaagcccagtgccaacgatatctatccgcgcagccacatcatgcaagcggatcaggcatcggcggccagcaatagcaattccggccaatttctgtactcgatgatgcaggcgaatcgttcacgctccatgtcctttacggcggctcgtccttacgcctccgtttacggtcaaagttccgtgcgtagggtcgccagttcgagctgctccagcgggcgcagtagcgagtcatcccgcaccggattcctggtcggatccttccgcaaaagcaaagcgaaacgggagcgccagagccgatcgatgcgcaaaagcaaggactccaaagaggagtctcatctggtcgatatgggcatgttcagtggccgttccatgagcatgccaccccgtccatctgcagccattttgggatccgtagcaatgatgccgccaagcaggcaacaccacatagccgccatggcgaagagctcactggcgcagggcatccaaatgccgcgtagcgatggcgactccctgatgccagtggatgccgccctcaagcgtcgcatttcggtgctgaccaagctggacggtggacgaaagcggtctggactcggtccactaggcactggaaatgacagcaccaccaccagaaacggacaacagccgtcggagatgcgccaccgctttcagactttgggcgatcgcatcaagcagttcgagtacatccaattcgccgatggacccgtggccacatatgccttcaatcggaacgagcagagaccaatcaatgccagtatccgtgattcgccaaggagccgaattgagaagagctcggatatgtcaattaataccaccaaaaccaatgccaccacgcgacgttcggaggtgagacaacagccgcgccagcttagctttcacaatgtcctgcacgccaactatcgccagaggagccgaagcctggagtccggaggcgttaagctaatggaatcgctggaatccatagcgcgacccgccactccacccggtccacggggcttcgatgtaaccactcggggatccagcttggacagcagttcgcggactagtttcaggcccagcaactcgacaatcacttgggataattctttgggtagatatgaagaagacttaggtaaaaggtcggttaacgatttcggatatgcaaagagttcggaagacacatcaggcgattgggatgttaatccaggtgaagattggcccaagtaccccagatcaagtagcccgtgcggcaagggtttgatgtcaaatgtagcaaaatcagacaacgcttcggtgggtaactcaaatgccagtagtcaaaattgggcaatcccatcgggatctgcgacaaaattacgctcgattgagggaaaaaccaaagacgatactttggaatcgacgaaattgaattcggagcatggtaaagccaattccaattccggttccacttcccacgacacttcgcaagcaaattcggaagcggcttcagttcaagatgagtccaatagagccaccctggcacccgtgcgtcgcgtccacctgcagcaacagagtctgcagaactcaaccaaagtggaggaacccaagtgcgaggatgtgccaatcagtccccacgaggtcaaggacacggtcaaggagaaggctaaggaaaatgtcaagaagaagcagctgcttgagactctgcatgataagccgcgagtgaccaaggtgaccagcaaccaggttagccgctccagccatcgatccttcctgcagccggccaaagatgatgacgtgacggcggctaatgcctccaagaaatcgcatccaaagctcggaaagaaaccggaaagaaaggcgaatcagaagcgggaggacaggacaccaggccaggtcaagggagccaatcagctgctggtggcgagtgcctcgcaggtttcggcctacaagcgtgccttccgcacccagcagcagatacgcaaggcggagatcctccaacagcaggcgcagcatctgcaggagtccccgataagtccgtctgccatcgagggatcgaaacaaaccgccaagctgcagagccaccagggctcgatacaacaatctatctctaatcggaccaatgttcgaacgttggtcagacgcagtgcagccggttcgggtggcaaggctccgccgttggacgatcagctgtcatccaaagcggtatgtggaactcattcttcgttgacagccaagccggaatctaatggaatggttctgaaaacgaagggattaaatcgatcacagatgaagaagacagcagctgctactgcaacagcagcacccctaacagcgaagcggactgcgcagcatatagtgttaacggcaaaaacaacaacgaaaaggggaaatggagctgcgatttttggtggtggagggggaaggggagttggagttggtggagctgttcggagagcgggaagggaaacgctgacggtggcagctcagcagcagcaatcgcgtaacggtaactcgctgcttggctatcggcgcgaaacggttaaccgcgcagcggcagcgctgctgcagcgacgcgacgcagacgagccgctgtcgcagttgcagttgcagttgcagtcgcagtcgccgtcggcgtcgcagtcgacgcagcagcggcgccagtttcactgtccatatcccccatggcgtcccagctactga

SEQ ID NO: 981 - protein, 955 aa, DROSOPHILA
MKPDQINRLIKVNTRMQPWFLRNTSELYESAVRSYYERGYSSHNRHPRFRTENAGPLRRIKRAEAKPSANDIYPRSHIMQADQASAASNSNSGQFLYSMMQANRSRSMSFTAARPYASVYGQSSVRRVASSSCSSGRSSESSRTGFLVGSFRKSKAKRERQSRSMRKSKDSKEESHLVDMGMFSGRSMSMPPRPSAAILGSVAMMPPSRQHHIAAMAKSSLAQGIQMPRSDGDSLMPVDAALKRRISVLTKLDGGRKRSGLGPLGTGNDSTTTRNGQQPSEMRHRFQTLGDRIKQFEYIQFADGPVATYAFNRNEQRPINASIRDSPRSRIEKSSDMSINTTKTNATTRRSEVRQQPRQLSFHNVLHANYRQRSRSLESGGVKLMESLESIARPATPPGPRGFDVTTRGSSLDSSSRTSFRPSNSTITWDNSLGRYEEDLGKRSVNDFGYAKSSEDTSGDWDVNPGEDWPKYPRSSSPCGKGLMSNVAKSDNASVGNSNASSQNWAIPSGSATKLRSIEGKTKDDTLESTKLNSEHGKANSNSGSTSHDTSQANSEAASVQDESNRATLAPVRRVHLQQQSLQNSTKVEEPKCEDVPISPHEVKDTVKEKAKENVKKKQLLETLHDKPRVTKVTSNQVSRSSHRSFLQPAKDDDVTAANASKKSHPKLGKKPERKANQKREDRTPGQVKGANQLLVASASQVSAYKRAFRTQQQIRKAEILQQQAQHLQESPISPSAIEGSKQTAKLQSHQGSIQQSISNRTNVRTLVRRSAAGSGGKAPPLDDQLSSKAVCGTHSSLTAKPESNGMVLKTKGLNRSQMKKTAAATATAAPLTAKRTAQHIVLTAKTTTKRGNGAAIFGGGGGRGVGVGGAVRRAGRETLTVAAQQQQSRNGNSLLGYRRETVNRAAAALLQRRDADEPLSQLQLQLQSQSPSASQSTQQRRQFHCPYPPWRPSY

SEQ ID NO: 982 - DNA, 21314 bp, DROSOPHILA
tgctgtcctgccagcaaggagccacaaaatggatttatcgagccggttgtggtaagcatccgacaaacaagtatccatatccattcaaacgcgacggatgcggcactgcaatccctgaaattgattccctttgtgttgctagcaaattactgtgtcaattggaattttaattccgtttgaactacatgggcaaacacttgacacgggtctctccctcgcctgagttctcatcctgccttccagttgtcctttcacatgtgcgaatgttgatgtggatgtagccgtggatgtgggcgtatcctggctacgtgctcgctgtgcaacaggcggtgctcctgtttctgctcctgttcctcgatgttgacactgcgcgcgactgccattatcctggccagcattttgtttgcatgccaaattacattgccaacttaattgaagtttgttaatgaaaattgcaacatttttcaaagcgttttcccaacccgcccctaatgtgctttagtttgtatttgtgtgagtcctgattgccgtttgtccttggtcctgcgtcctggcaaaaatgtttccattagcaattaagctctggaagttgtattaaaaattatggccttcatgggggaaatgcgtatccttttcaaggaattctaaattaaattaaaacaactaaacaacatatagtccagctaatttggtcggacagggccgattccaattccaaccacaatcaatttcgcttttaacatctcaatttccggcatcacgatcttacttcaaacagccagatcggtggttctccacccactggcccagaaattatgccattacctcacctgcaactcatcgacaggtctttctgtttcttcaccgaaatgtgtgtgcgattcgaaccccttccctggaaaaagaaacgaagaaatcaaatcaaattttcaaatggaaatgtaaatatttatcccaaagagttgcgttcgtaggtgaagtgcgtgtgctttgaagtgccctcttccctgcccacaaaaaggtagggagaacaaggtgagatgctcggacaggccagcatatactttcggagcagcccggaggtcggttcaaagttgactccatggcagccatgagtccggcgatctcacgcacatgctggacatccctatcttggccataatctccacccgaggcggttcttcgctgaccacaagcgttgcgtgcgttttatttttggccagagtcataaagtccgacaccgtcacataaaagcccagaaacttgttccccggccaactggcagttagcgcatccattcgtcaagttctttagagtttttcgcgaaaactgtgcgttagccacttgaaagcaaaaaatctctatctctctgtcaacggcgggaaaatgggaaaaactatagatttcggaatgaaaatgtggccaccacatgacccatgctggccagagtttggggacatgtgtgtggctaatcacaattcacaggaaatcatatcatagtttttcctgcctcaatttcccaatgttttttagttgaattaatggaaaagttcttgaaaatacattgcttgaaaatcttctcgagtagggtacctgatcacttggctagcccgaacgcaaaatccaagcccccaaacgggtcaacatacctaagaccatcattatgtctgtagtttaatggcacaaactaaacgttttaacgcactcggtaaatcagtaaccgagtatcttgtaggttgtatctcgcctgtgtgtggccattaagtggccaaaatatacattacattaagctaaaatctgtggctcgtgacgtctttgaacttgactctagttgacgctgttggagattctcttgaagagtctcttcagaagagacgaaaaattccaacatacctattcgtctttctgtggaaattaggatgctcagatcttgtgtactcaatgaaaattcccaatctaaatttaagactctacctatgctgatatatagtttacccagcgtaggcaatgtttgttatgttttaagtataatattccgcggaaaacactaaattccgatgggcagcaggaaaatggatgcaacaagaaaaacacgtacccaatccaattgcccacacatagttgctgggccgaattgtttattgagtgtgatctgtgcgagagccgcaactataaacagtgaatttccaaaatatatgcttttgaaatgaaaaacgcagagccagttgccttgaaactcggaatatcatcatgcacacacgagtttcgagtcgagagtaaacactcaaattgcataattgatccttaatggctataaataaatcagaaacccaaatgttgatctagcaaagtggctgcttctctgccacgaaagtgtgcaaaatccacgcccggatatggcatgtgggtatggatttcttcagaatatcgaatgatgcggcaaatgagctgcaaattatgttcaacaaatgccccccttgttgttgcacttgcaacttgctgcaatcctgtggatcagttcatgcctattccacgcctcactggcctcccaagttcatggcggcgatgttgcacgctgcatttgccacatctgctctggatggggtatggatgggatggacccccaatggcatggttaatggtttcgcgaccgatctgcacatcgctttcccatgacttaatgtcttatgcttaattaagcaaagactgccgactgggtggcgttaaattatttcaactcctccatccgaatcaagtgtgtgagtggcaaatagcttaagagccattgttaatgtttgccctgccacagacacacgcacacatgagtggagtgtatggacacacacaatcggatcgatcggatgaggtcgtcgctccctggcaacgcggaagataaaaaggatgccccaaaatatgccgccgcagaaattgcacactggcagaacaagatacaaaatactatatacagacagcagaataaaaacggagcagccaaccatggcatgactgcaaaaatatccaaaaattgtgcagatccaaccaggaggcaaccggcaaccggcaaacgatgcgtcacatgcagtaaaatgtgcctaaaaagttctgtctgtctgaagaaccagaaaaccagaaaagtagggacagcatcagcatcaacaagtgaaatatattcgccgccaggcaaaagccaaaaaccaaaaaagagcgcaaaaaaagggggaatatataaaaacccataaaaatgttttggcggacgacaggcgacgatcggtttgctgggtgttcttgggaaacgtgatgcgcatcttgatgacagcaaatgaagcgaaatgcagacccgactatcagccctttctgagggtcagggacgcagcccttttaccacttccgatggtccggctgtttagcaaatacatcggaggaatctgcaagacgcaaggaacccactgacaagtactggagcgatgagctaacccgtaattgcgctataaatcaatgtctgctccacattttatacgtcaggtagtcaggtaatcgttctggccaacatgatggcatttaagccaatttgatttgaaggctattgtgaataagtgaaattgggagttggtcattgtttattttagattccttcgagtaaacaaacaggctgttgaaattcagacagatatttctatttagcataactaatgggcaattgaattgctagagcagaaagaatgatctgacataactaaaatttctataaaaagtaggcttcccaaaatagttttggtttgctcaagaattccaccatttatttacttttcccttagtttattagttccccgctaattaagtgctgaaatatgccagctcatttggcatcctgtgagcacaatttctgtgttatttttttatcgcaagtcggcgctaaaatgtttacacatagccatgattaataatcccccactggatgggatgagttcaaagttcgaggaggtgcaaaagtgtatgtttccctagaaaccatttccccctgtttcccatttcgagagctattagccataagtgaagtcaagcagcttgttgcaatctcgggccgaatgagttgggcaaatagaaaattgccaatgctcgtggggcttggtggaggtggagatgtgggcatgtggggctgtgtgcatgtgatgatgggaagtcgcgacagcggcgttatgatgcctctaattagctgcacagcactattgattctccggaggaggccgcttctggtggctcccgagacatggtcataaagatttgtttgcccgtcgaacatttagccgccgccgttgacagcgggggaaatttatgggtcagtaagttggcaaagtgaaacgcatagtgaaatctctttcccttttatttttctcaggcccagtctcggtgaactgggcttaaatgcgcattctgtttgctcatttgcactgctcatttggtcaaatgcgtggcaaatatttcattaggcatttgggcaaactttgttgtgcctctcagcccccaacgttcaacatttgctgctgctgcaacattgtggcagtgcagcactaaatttggtaaaatgttgcataatccctgtgcatttcgcaaacacttgggggcaaaggcgtatgtttattattttcactactcaattaagttaaattaatttcgaaattgataattgctcggccaggctgtgtgcaagtgtttggctgccagtcaaaatggcatcagcacaagtgaagctggggcttccattccccgccagaacggaggatgtcgctccatctctatacccatctccactgtgtctctgtgtgcgttgctttatgcaaatgcaattaaaatttcaacaatgcaaacatttacttccgttgcaacaaatgtcgtcgctccaccagccttctgcccgcatcttcttcatagagacatcatcatcatcgccatcatcatcgtgggagcttcggcagcagcagcagcagcaggagcaccatcatcgcattcacctggccacacctctgccacaatttggcgttttgcattagagtctgcttgtcttgcgataattgtatgactatgtaattgtatttgaacaaacgggtgtcacacactcgcacgcatccttccgactaatgaggtggatacctgtgcaataattgctgcctggtattttgcggccaaataaaacgcactaacgaagctgattaggacttactgcctggatcgatcttgggtggaaaaacgaagtggattaggtacactgggttgcttggcacgttggcatttagtcatttattctattctacgcctatatagtttctctctgtgtaggaggtgggtgcaattgtacgcattttccgttggctgcaattaaatcagttgcctgcaacatcgaattcctttcgttcctcacaatcaacataaaaaagcgaaaaaggggccagcagaagtcaaacggttgcagctgtacgaactggggccatgggcattccatcttcatcaaagggccccgggatctgcagaggcaggcagctgcggaatcggaatcctcatggatgcagctcgcatattgcatgccccaccgccaattgattaactccagctagttgtttccccgatcaattggcatgggaaaggcccgaggaatcgaatctagtgggtggttgcgattgaagtgcggggaattctactaactcgacctcgcagatgagtcatgtaaacaaatccagcgtcagttctcgatggtcaggtgtgagaactgcttcaaatttatgtgtgtttttgcggcacttgtttggatttcggcttgccacataatatattttcggttcgctttttcagatttagattacttttggttgccccaaaattagatgtaatttgttgtcggtcttgagtttggcggctaagtgcacgcacttgtggagtaagtgccgctgatagtgttgttcttacggctcattagcagtcgctttatttacgatggtcattgcaacattttacaaggaaagatatctgtttggagtacatagattcttgaaacactttcttaaaatgatcgttcactgaaacgaaaattgtatctatatctcaatacctgcaggtatctgtatatgataactcaatacgtatcaatctgttcctttaggatcacaagaaaatactctcgttccatcatactatagtatataaaatgaatatatttctcggagtgtattgtagtacgcattctatgccagaatgcacttgttgcgtggaaggcatttgaaagcaattacacgatcgtgaatatatctctggcatggatgcggagtgaatatcttttagctactcggtctggagagagtgtacgacgactatatctgtggcctggatttgcatccatgctgcagttgttcaagttgactgataatggctgcaattgtgtagctgaaaagggagcatttccctgcactctcactgcatctatgcagtgattgccagggccccttagagtattatcaccgcttagagccgctatccgaaacccaaatgcctttgtaatgcggcgcacaatgaacaatggactgctattgtgggaccatttctggccagaaagctggaaggccagaaaggcattgcgacccgataattggcccctcttagaggcgcagctttgatctcgccagccaactaaatcctggtcacaaagctaaatggggtcagggattgggagaaggcccaccatccggcattaatataatattatatggtacaccgtatttgtgtaaagttcccgcccccgaactagcatttcctccagacttatttgacatttctgtggcggcatttcggtggttcacatgacatgtgtaacttatttgacgattgcgccaactgtttgtgctagtgtcacgtggcttccgtcacatgtggcaataacaatgttattcccattcccatttccccgcaaccgaccaaacaaaatatctgggggtccgaggattttgcgtaatcagcagacgcgtatgaaatcgaaattgagaagtgcgctcttgcggtttttgctaactcatcggtttccttggaactgcccaattaattgagttggtcctggttttggttctggtcctggtttggcgggtatcttagtgttctggtgtcctgtttgcatgacgcaatggctgagaaggaggcgactgggcgacgccgcccctgctcaatggactgtgaaatgtgtgccgttgtcggtttgccatttgccttccgttgtccttgccaaagcaataggtgtcctggcattggtttcaaaagggaaatgcgctcaaattgcattaaaatgccaacacagaagcataaaaattatggccacacttggcgcccagacctctgctgttctcggctgtcataagcagcacgcctgctgcggcaggactcccgaatccaaggacccaggcaccaaggcatgtccttcgtagccaggaggacagaattacagagggcaagaggcgagtgccatcagtcggaggcgtccaagcgtaacaaaccgagcggctccccgcacgcagcagcgtcagaaattaaattggcaagcccccaacaagaaagcgcggggatgaagtgcagcaaacgttgcctgcaacattgaacgcctttgacatattcacgcaacttgtcctcggggcgcaacgacatcctcctccgtggagcaacttcctcgaagaagtcagattctgcggcgtcgaattgtctgcggcataatcgtatattctccctggcttcggtacttattatttgcttggttctgcgcttctttctggttctttcgttttggcaaatcggcaggaagcccttctaaattatgtcttgtttatgtggcattgcatatttatggtccgtgcgcgcgtcgcataataaaaaaatgttaccgaagaaattgcaaattttacttgaccaagtcccattcttttcgccacccagtggtaagggaatccaccgcctatcccgccacagatttagccgcaaaaacaagttcaatgtttgcttgctctggccagtgagcataaacaagttcatcatgctgtcgccgcgaagccccacaaaagtttgtttgtgccccttcgctggacgcagacccaagtcttttgagaaagtccccgtcgaagttggtgactcccccgccagccagctaaccagccagagtgagccacccagcctgttgctcctctaatgagtctgagtactcgtgtgtccacaggcatgcggcgaagtcaacaaatacatggctatatatgtgcaacaagtcaacacgtgacttcggtcctatgattttaatgaatggtcgagttgggcgagattatgtctgggtggcgtttaattaaattgcctacttcgctctccacttgcagctcaactgccttggtagcattcattgttctggccagcattcatgattcccagagcagattcgtaagtatgcagcggatatcctgaaggtacttacggctaatccactgagcccttttccagcctggactcagacaaaaaagacaatatggggcgaacatgtacttgccggagagctcggtgacgcccggcggcgagggtaacgatcccgatgagtggacaccttggagctcaccctcggactgttccaggacctgcggcggtggagtgtcctaccagactcgggagtgcctgcgaagagagtgagtatacaagacctgccgtaaaagaaaacaaccctattccatccctatcatagccgaatgttatattaggaaagagacctctagattgccaatagttttaaatctcttacatctcttaccactccacagtgatcgtggcgaggcagtctgcagtggaggcagtcgccgttacttctcctgcaacacccaagactgtccggaggaagaatccgacttccgggcgcagcagtgctcccgcttcgacaggcagcagtttgatggagtcttctacgagtgggtgccgtacacgaatgcacccaatccctgcgagctgaactgtatgcccaagggcgagcggttctactaccgtcagcgggagaaggtggtggacggaacccgctgcaacgacaaggacctcgacgtgtgcgtaaacggggagtgcatgccggtgggctgcgacatgatgctgggtagcgatgccaaggaggacaagtgccgaaagtgtggtggtgatggcagcacctgcaagaccattcgcaacaccatcaccacgaaggatctggctcctggatacaatgacttgctgctccttccagagggagccactaacattcgtatcgaggagactgtgccctccagcaattacctggcctgccggaaccacagtggacactactacctgaacggcgattggcgcatcgacttcccacgccccatgttcttcgcgaactcgtggtggaactaccaacgaaagccaatgggcttcgccgctcccgaccaactgacctgcagcggtcccatctcggagagcctcttcatagttatgttggtgcaggagaagaacatcagcctcgactacgagtacagcattccggagagccttagtcactcgcagcaggatacgcacacatggacgcatcaccagttcaatgcctgcagtgcttcctgcggcggtggctctcagagtcgaaaggtcacatgcaacaatcgcatcaccttggcggaagtcaatccatcgctgtgcgaccaaaagtccaagccagtggaggaacaggcttgcggcacggaaccgtgtgcaccacactgggttgagggagagtggtccaagtgctctaagggctgcgggtccgatggcttccaaaacaggagcatcacctgcgagcgaatctcctcttcggggtaagtctttcttgattcagaagagttaaatgatgaacaacaacgtgtggcttttcaatttagcgagcatacagttgaagaagatgccgtttgcctaaaggaggtgggcaacaagccggccaccaaacaggagtgcaaccgcgatgtaaagaactgccccaagtatcatttaggaccttggacgccgtgtgataagctttgcggcgacggaaagcagacacgaaaggtgacctgcttcatcgaggagaacggacacaaacgagtcctgcccgaagaagattgcgtggaggagaagccagagacggagaagtcctgcctcttaacgccttgtgagggcgttgactggataatctcccaatggagcggcgtaagtattgcacttgtctgtgaaattaaaaggtactgaattcctgtgtattctagtgcaatgcgtgtggtcagaataccgaaacacgtaccgccatctgtggcaacaaggaaggtaaggtgtatccggaggaattctgtgaaccagaggtacccactctatcccggccgtgcaaatcccccaagtgcgaggcgcaatggttctcctcggagtggagcaagtgctctgctccttgcggaaaaggtgtcaaatctcgcattgtcatttgcggggagttcgatggcaagacggtaactccagcagatgatgactctaagtgcaacaaagaaacgaaaccggaatcagaacaggattgtgagggcgaggagaaggtttgccccggcgaatggttcactggaccttggggcaagtgcagcaagccttgtggtgggggtgagcgagtccgtgaggtcctgtgtctttccaatggaaccaagtcagtcaactgcgatgaagaaaaggtcgaacctctatctgaaaagtgtaactctgaagcctgcactgaggatgagattttacctttgaccagtactgataagcccatcgaggatgacgaggaggattgcgatgaagatggtattgagttgatcagcgatgggttgtcagacgatgaaaagagcgaagatgtgatcgacttggagggaactgcaaagacggaaactacgcccgaggccgaagatcttatgcaaagtgacagcccgacaccctatgatgagtttgaatcgactggtaccacatttgagggatcgggatatgattcagaatcaaccaccgacagcggcatttccacagaaggaagcggtgatgacgaagaaacgtctgaggcttccactgatttgtctagctccacggattccggttccacctccagtgactctacttccagcgactcaagctccagtatttccagcgatgcaacttctgaagcaccggcatcctcagtttctgattcaagcgattccacagatgcatccacagaaaccacaggagtttctgatgactccactgatgtctcgagctcaacagaagcctccgcctcggagtcgaccgatgtctcaggcgcatcagattccacgggctccaccaatgcttccgactcaactcctgaaagctccacggaagcctcaagttccacagatgactccacggactcttcggacaattcttcgaacgttagtgagtcatcaacagaggcttcttcctcatccgtatctgattctaatgacagttctgatggatccaccgatggcgtatccagcacaactgagaattcatcagacagtacttctgatgccacttccgactcaacagcatcttcagattctacggactctacttccgatcagacaactgaaactacccctgaatcatcgactgattcaacagaatcgtctaccctggacgcatcctcaacaacagatgcctcatcgactagcgagtcttcatcggaaagctcaacagatggatcttcaactacatccaactcggcatcaagcgaaaccaccgggctgtccagtgatggatcaaccacagatgcaactacagctgcttctgacaacactgacatcaccactgatggctcaactgatgaatccactgatggttcctctaatgcctctactgagggctctactgaaggcgcaagcgaggacaccacaatctccacggagtcctccggatcaaccgaaagcaccgacgccatcgccagtgatggttcgaccaccgagggaagtaccgtcgaggacctgtccagttccacaagctctgatgttacatctgattctaccatcaccgactcctcaccttccactgaagtatctggttccacagactcatcctcttccacagatggttcctcaacagatgcttcctccactgaggcttcctctaccgatgtcactgaatctacagatagtactgttagtggaggtaccagcgacactacggaaagcggtccaacggaggaaagtactaccgaaggctccactgaaagcacaaccgaaggatccacagacagcacccaatccaccgatctggacagcaccaccagtgatatctggagcaccagtgataaggatgacgaatcggagagcagtactccttactcctttgattctgaagttaccaagagcaagccccgtaaatgtaagcctaagaagagtacctgcgccaaatccgagtacggttgctgtccggatggtaagtccactccgaagggaccgtttgacgagggctgtcccattgcaaagacctgtgcggatacaaagtacggttgttgcttggacggagtgtctccggctaagggcaagaataacaagggttgtcccaagtcccagtgcgctgagactctctttggctgctgtcccgataaattcaccgccgccgatggtgagaatgatgagggatgtccagagaccactactgtaccacctacgactaccacagaggagacacagccagagactactactgagatcgaaggatcaggtcaagactcgacgacttctgagccagacaccaagaagtcctgctccttctccgaatttggttgctgtcccgatgcggaaacatccgccaagggccctgacttcgagggatgtggtcttgcgtcaccggttgccaagggctgcgcagagtctgagaacggttgctgtccggatggacaaacacctgcaagcggtccgaatggcgaaggttgctctggatgcacacgtgagcgctttggatgttgtccggactcccaaaccccggcccatggtcccaacaaggagggctgctgcttggacactcagtttggctgctgccccgacaacatcttggccgcgcgtggacccaacaacgagggctgcgaatgccactacactccgtatggctgctgcccggacaataagtcggccgcaactggctacaaccaggagggatgcgcctgcgagacgacccagtatggctgctgtcccgacaagatcactgccgccaagggacccaagcacgagggctgcccttgcgagaccacccagttcggatgctgtccagatgggctcaccttcgccaagggaccgcaccaccacggatgccactgcactcagacggagttcaagtgctgcgacgacgagaagaccccggccaagggccccaacggcgatggctgcacgtgtgtggagagcaagttcggttgctgtcccgatggagtcaccaaggcgacggacgagaagttcggtggatgcgagaatgtccaggagccaccgcaaaaggcctgcggcctgcccaaggagacgggcacctgcaataactacagcgtcaagtactacttcgacacctcctacggaggatgcgctcgcttttggtacggtggctgcgatggcaacgacaaccgctttgagagcgaggccgagtgcaaggacacctgccaggattacaccggcaagcacgtatgcctgctgcccaagagcgcaggtccctgcactggcttcaccaagaaatggtacttcgatgtcgaccgcaaccggtgcgaggagttccagtacggcggatgctacggtaccaataatcgcttcgatagcttggaacagtgccagggcacttgtgctgccagtgaaaatctgcgtaagtgggcatctgttccttattccagagccacgattatcggcattcttccaatgtagctacctgtgaacaacctgtggagagcggaccatgtgccggaaacttcgagcgttggtactacgacaacgagacggacatctgccgacccttcacctatggtggatgcaagggcaacaagaacaactatcccacggaacatgcctgcaactacaactgccgccagcccggcgtgcttaaaggtttgagatcagatttagtatgctatggtgccttgagttgggtaatgagactagttgtatgcaatattttgcttgggttaatgagttattttaagcttaaacctcctggtttttcctggctaacggtatgttcttcccaaacgttccttctcccccaaaaactgcttggttactatattgtatgtgcatgattgcttgttacttgctatgccgactttccgaatctgcacccgcatccgaatctcctcctgcaccaaacaccttcaccatcccacaaccccagaccgctgtgcgctccctaagcaaactggtgattgcagtgaaaaactggccaagtggcacttctccgagagtgagaagcgctgcgtgcccttctactacagcggttgtggtggcaacaagaacaacttcccgaccctggagtcctgcgaggaccactgcccacgccaagttggtaagctttaaatgtcgcctgctccggaggctgctttcaatgtgttcctgttttccgctacccaaacccccgccctactgacactctttcaatccctcaacccaactagctaaggacatctgtgagattccggccgaggtgggcgagtgtgccaactacgttaccagctggtactacgacactcaggatcaggcctgtcgccagttctactacggcggctgtgggggcaatgagaaccgcttccccaccgaggagtcctgtttggcgcgttgcgaccgcaagcccgaacccacaaccaccacccccgccaccaggccacaacccagtaggcaggacgtctgtgacgaggaacccgctccaggagaatgtagtacctgggtcctcaagtggcacttcgatcggaagattggggcttgccgtcagttctactatggcaactgtggcggcaatggcaatcgcttcgagacagagaacgattgtcagcagcgttgtcttagccaagagcctcctgccccgactcctccacgagcacctgctccaaccaggcagccagatccggctcctactgtcgctcaatgcagtcagcctgctgatccaggacagtgcgacaaatgggcgctccactggaactacaacgagaccgagggtcgctgtcagtcgttctactacggcggctgtggcggcaatgataaccgctttgccaccgaggaggagtgctctgctcgctgctctgtcaacatagacatccgcattggtgccgatcccgtggagcacgacacgtccaagtgcttcttggccttcgaaccgggtaactgctacaacaacgtgacccgctggttctacaacagcgcggagggactctgcgacgagttcgtctacacgggctgcggcggtaatgccaacaactatgccaccgaggaggagtgccagaacgagtgcaacgacgcccagaccacatgtgcactgcctccggtccgtggacgatgcagtgacctctcccggcgctggtacttcgatgagcgcagcggagaatgccacgagttcgagttcactggatgccgcggtaatcgaaacaacttcgtgtcgcagagcgattgcctaaacttctgcattggggagcctgtagtggagccttcagcgccggttagattgttcttcttttcatgtgtcttaatctttatgcgaatattatcttacagacctattcggtgtgcgccgagcctccggaggccggcgaatgcgacaaccgtaccaccgcgtggttctacgacagcgagaacatggcctgcacggccttcacctacacgggatgcggaggcaatggaaaccgcttcgagacccgcgaccagtgcgaacggcagtgcggcgagttcaagggagtgggtaagtttggggcagccgggctgggtacttgtttcagatgctataatctcttgtgtcagacgtttgcaatgaaccggtgaccacgggtccgtgcaccgactggcagacgaagtactacttcaacacagcgagccaggcttgcgaaccgttcacctatggtggatgtgatggcaccggcaaccgtttcagcgatttgttcgagtgccagactgtttgtctggctggtcgtgaaccgagagtgggctcggctaaaggtaacatatacagcgggcgggtctcgacttgggggtcaccatggagtcgccgggctaactggttcttctcttgcgtaagtagaaatctgcctgctgccggtggcgacgggccgctgcaatggaccttcggtgcacgagcgccgttggtactacgacgacgaagcaggaaactgtgtgtccttcatatacgccggctgctccggcaaccagaacaacttccgatccttcgaggcatgcacgaaccaatgccgacgtaagccccacctacagccacttatgcaccacaaagcactgtgcaccacagagctcacagcacctcaattagcacccacccacccacaaatgcaccttgcaatctgcccacacccaaatcgcttgctctcgtagaaactttgaagtagcatctatagtagttgcgttagtgcaccttcactaaacttaagtctgcacgggttcttgggaatggagtgtctcactgaaaatgccctcttggctgactcgcaatcccctttcttgcagcggaacccaacaagcaggacaacgaaattggacaaaatccgtgcgataccttcgatgcggagtgccaggagctccgctgtccatacggcgttcgccgtgtggccgccaggtcccagccagagtgcacgcagtgcatctgcgagaatccgtgcgagggctacagttgcccggagggccaacagtgcgccatcgatgtggccagttccgacgatcgccagtttgctccagtgtgtcgcgatatttataagccaggagagtgcccggctctttcagcgaatgccagtggatgtgcccgggaatgctacaccgatgccgactgtcgtggagacaacaagtgctgcagcgacggctgcggacagctgtgtgtgcatcctgctcgtccaactcagccgcccaggactcaggctccagtggtctcctatccgggcgatgccagagccgctctggaacccaaggaggcgcatgagcttgatgtccagacagccatcggcggcatagccgtgctgcgctgcttcgccaccggcaatccagccccgaatatcacctggtcgctcaagaacttggtggtaagcaattgggagattctgttttttccattcgcctgagtgcattattgtgttctttatagatcaacacgaacaagggacgatatgtgctgaccgccaacggtgatctgaccattgtccaggtgcgccaaacagacgatggcacctacgtctgcgtggccagcaatggtctgggagaacccgtgcgtcgtgaggtcgccctccaggttacaggtgcgtttctaagaccgccttcaatacatttgtgttttttgttattattacttaatgctatgaatgttaagatctcaatatatacataagtaggaaattaatgaatcggattaccgattctgctattcctaatatccactgatactttatacactttggtgatggctatgtaactaactgctttatattgaacactttgcgcatgttgcctgctttccgtaattgcttgcttgaatcttggtggcggtagaacccgtaagtcagccagcttacatctacggagacaagaacgttactcagatcgtggagttgaaccgtccggcagtgatccgctgcccggccggtggcttcccagagccgcatgtcagctggtggcgcaacggacagatgtttggcctgaagaacaacctgatggcccgcgactactcgctggtcttcaactcgatccagttgtcggatcttggcctctacacctgcgaggtgtacaatcagaggcgtccggtctcgctgcgcgttactctgaaggcggtgggtcctgtccggcctctgagtcccgaggaggagcaatacatgcagtatgtgctcaatccggccacccgtccggtgacccagcgacccagctatccctatcgacccacccgaccggcctatgtgccagagcccacaggtaagtactgcacctttgcatgttttcgctgggctggcatggtgttggattttttttattgtttatgtatgttctggtaacaaaaaactaaccacttctttacgtgatttatagttaatgttcatgccgtgttggctctggagccgaagaacagctacaccccaggctccaccattgtcatgagctgctccgtgcagggctatccagaaccgaatgtcacatggatcaaggacgacgtgcctctgtacaacaacgagcgtgttcaaattacatgtaagcagttatttaataatattatttcgatctatttaaaaaaaaaataaaatcttatgtaactgcagaccaaccacatcgcctggtgctgagtgatgtcacatccgcggattccggaaagtacacttgccgggccagcaatgcgtacacctacgccaatggagaggccaatgtgtccattcaatgtgagtttggggttctaaaatcgaatctaggggatactaatagtagttatatttccagctgttgtaccagtgtcgcccgagtgcgttgacaatccgtacttcgctaactgcaagcttatcgtcaagggcagatactgttccaatccgtactacacccagttctgctgccgatcctgcacgttggcgggccaggtggcctcgcctcctctgcatcccaatgcggtgtaattccacggagcgagatagagcagagtaattttgtttagttttcggattgaattgagtttaaacgcaccacacaagaataattggatcgacattcgcggacatcccatcatccaaaagcagagagaccaaaaagccaatcgttgcttagccatagccaccatatatatacctacatatatatagcctaccgatcaagaacgaacgaacttctattgtagtattttactctcttccaggacaaaagcaaatagtattagtgattttatgtttgtgttcctatttattcttgataacgagtaaccttaaattcaatcgaggaaagaaaagcggctaaaacgaatttgccttctactttttagtttctacgacatttctgtgcaacgagtaaagcatttaagcctaaaaaccaataattgtaaataaattaaaactacataataaagagtgcatatgtataaaagattaaactcaggggatggcccacaatttgaaaatgccaccccatctggcaacgctttcgtggcaaggggttattgattttccaaagttttcccagcagcagctgttcgtggagcctgcgccctaaactctggggttgattggagttctggagtcgtgcagaggaagacaataaaatttgtttgtgttgtcatcgcgtttaactcgcttctttaaacattgtaaagtttaattttaaaactatggaggatagcggcatcgatagcgaggacagacaatccaacatctacgaggatggggctgcgggactcttggtaagtgcattggatcaacaacaacagctgagcggggaaaatgcaatttttcacggctaacgtcaatgcagaaaacggccagcggagcacccaaacatatgtcagatctggagtttgaggtggcattcaggggtgccggcaaggtctatgcccccacgaccatagaaatcgatgaagaggaggaagcgaccgcaggaagcggtcgaggccacgagccacccaacacctgccgcatactgcagcgcaaactggagctgaaggtcgagcgggcccggcggaactacactcagtttcaggcggagcaggtgggttaaggtacaacccacaacggtcaatatgttatatatagtatgcaacctactcacaggctaccaagacgcagtcgtccactctgataccaatcaaccgtctacccattcctggcgagccggaacacaagccactggtggactacaaatccgagagtagcgacgaggccgaggagatctccttctttccggcccagctgaagcggtccaagcgccgccagcagaaccacgaactgactgacaccttcagcatacaggagatgaccattgactcggatctggagtcggacgacagtgctggcacccagaacctcgagctcctgctgccctccatgaagacgaccattctggacaagtttaagggatgcttcggatgctggcggcgcaggtaatgccaggcggaggagcggaggcatatcatcaggcggttcaggcacaaatcacgttattgacaggcactagcaacctacgaacttaataataaactccattgccactacaaagctgtaaacatagatttatttggcttagtaattccattcgataaatattaatcaatactaaaaagagaatagtctttcaattgaacaggagagcggggtaaagcctaaaattgtttactacttgaacgtaaaaattatgttattttcatggaagaactgctagaaatatattgcgtacgaataaataacaatagcttatcagtctttttataaaaccaaagttttaggtatctgtattgagggttagacagacgccctgcagaatccagtgactcagatcctccgaagtggccaaattagcctcaaagaccaggcccacacccatggcgttcctgcgcagcgatgtcgtgtataccggggcaaggtaggtattctataggaatatggaaaaaagttagtttagttagaaacaagctgaagaccaagttcatggtctcccccatttttaagtttcttgcttttgcggccaaaaagcgtgtagtgtttaaatacggaaacaattagcacaacagtttacacattagatggtggggggttttgcggaagctggctgtaatttagtgctatgcatttaaacaaatatcagcgtggccacgcccccgcaaccgtccaccgcccctggcatatttagatacaagcgcacattagttcttgtcactgccagacggtggctatcctgtgtatcctggctatccagggcagccagtcgggccaatcccataccattctactctgatccccaaattcacaccaacctgcagcttgagacggtgcgcctcaatgggctccacggcgagaatggccagctcctcaaccaggaccttgggatgggaacgcgccagctgattagtggccaagtcaaagcgcccgccctcgatgtacagaccgt

SEQ ID NO: 983 - DNA, 9295 bp, DROSOPHILA
tgctgtcctgccagcaaggagccacaaaatggatttatcgagccggttgtgctcaactgccttggtagcattcattgttctggccagcattcatgattcccagagcagattcatgtacttgccggagagctcggtgacgcccggcggcgagggtaacgatcccgatgagtggacaccttggagctcaccctcggactgttccaggacctgcggcggtggagtgtcctaccagactcgggagtgcctgcgaagagatgatcgtggcgaggcagtctgcagtggaggcagtcgccgttacttctcctgcaacacccaagactgtccggaggaagaatccgacttccgggcgcagcagtgctcccgcttcgacaggcagcagtttgatggagtcttctacgagtgggtgccgtacacgaatgcacccaatccctgcgagctgaactgtatgcccaagggcgagcggttctactaccgtcagcgggagaaggtggtggacggaacccgctgcaacgacaaggacctcgacgtgtgcgtaaacggggagtgcatgccggtgggctgcgacatgatgctgggtagcgatgccaaggaggacaagtgccgaaagtgtggtggtgatggcagcacctgcaagaccattcgcaacaccatcaccacgaaggatctggctcctggatacaatgacttgctgctccttccagagggagccactaacattcgtatcgaggagactgtgccctccagcaattacctggcctgccggaaccacagtggacactactacctgaacggcgattggcgcatcgacttcccacgccccatgttcttcgcgaactcgtggtggaactaccaacgaaagccaatgggcttcgccgctcccgaccaactgacctgcagcggtcccatctcggagagcctcttcatagttatgttggtgcaggagaagaacatcagcctcgactacgagtacagcattccggagagccttagtcactcgcagcaggatacgcacacatggacgcatcaccagttcaatgcctgcagtgcttcctgcggcggtggctctcagagtcgaaaggtcacatgcaacaatcgcatcaccttggcggaagtcaatccatcgctgtgcgaccaaaagtccaagccagtggaggaacaggcttgcggcacggaaccgtgtgcaccacactgggttgagggagagtggtccaagtgctctaagggctgcgggtccgatggcttccaaaacaggagcatcacctgcgagcgaatctcctcttcgggcgagcatacagttgaagaagatgccgtttgcctaaaggaggtgggcaacaagccggccaccaaacaggagtgcaaccgcgatgtaaagaactgccccaagtatcatttaggaccttggacgccgtgtgataagctttgcggcgacggaaagcagacacgaaaggtgacctgcttcatcgaggagaacggacacaaacgagtcctgcccgaagaagattgcgtggaggagaagccagagacggagaagtcctgcctcttaacgccttgtgagggcgttgactggataatctcccaatggagcggctgcaatgcgtgtggtcagaataccgaaacacgtaccgccatctgtggcaacaaggaaggtaaggtgtatccggaggaattctgtgaaccagaggtacccactctatcccggccgtgcaaatcccccaagtgcgaggcgcaatggttctcctcggagtggagcaagtgctctgctccttgcggaaaaggtgtcaaatctcgcattgtcatttgcggggagttcgatggcaagacggtaactccagcagatgatgactctaagtgcaacaaagaaacgaaaccggaatcagaacaggattgtgagggcgaggagaaggtttgccccggcgaatggttcactggaccttggggcaagtgcagcaagccttgtggtgggggtgagcgagtccgtgaggtcctgtgtctttccaatggaaccaagtcagtcaactgcgatgaagaaaaggtcgaacctctatctgaaaagtgtaactctgaagcctgcactgaggatgagattttacctttgaccagtactgataagcccatcgaggatgacgaggaggattgcgatgaagatggtattgagttgatcagcgatgggttgtcagacgatgaaaagagcgaagatgtgatcgacttggagggaactgcaaagacggaaactacgcccgaggccgaagatcttatgcaaagtgacagcccgacaccctatgatgagtttgaatcgactggtaccacatttgagggatcgggatatgattcagaatcaaccaccgacagcggcatttccacagaaggaagcggtgatgacgaagaaacgtctgaggcttccactgatttgtctagctccacggattccggttccacctccagtgactctacttccagcgactcaagctccagtatttccagcgatgcaacttctgaagcaccggcatcctcagtttctgattcaagcgattccacagatgcatccacagaaaccacaggagtttctgatgactccactgatgtctcgagctcaacagaagcctccgcctcggagtcgaccgatgtctcaggcgcatcagattccacgggctccaccaatgcttccgactcaactcctgaaagctccacggaagcctcaagttccacagatgactccacggactcttcggacaattcttcgaacgttagtgagtcatcaacagaggcttcttcctcatccgtatctgattctaatgacagttctgatggatccaccgatggcgtatccagcacaactgagaattcatcagacagtacttctgatgccacttccgactcaacagcatcttcagattctacggactctacttccgatcagacaactgaaactacccctgaatcatcgactgattcaacagaatcgtctaccctggacgcatcctcaacaacagatgcctcatcgactagcgagtcttcatcggaaagctcaacagatggatcttcaactacatccaactcggcatcaagcgaaaccaccgggctgtccagtgatggatcaaccacagatgcaactacagctgcttctgacaacactgacatcaccactgatggctcaactgatgaatccactgatggttcctctaatgcctctactgagggctctactgaaggcgcaagcgaggacaccacaatctccacggagtcctccggatcaaccgaaagcaccgacgccatcgccagtgatggttcgaccaccgagggaagtaccgtcgaggacctgtccagttccacaagctctgatgttacatctgattctaccatcaccgactcctcaccttccactgaagtatctggttccacagactcatcctcttccacagatggttcctcaacagatgcttcctccactgaggcttcctctaccgatgtcactgaatctacagatagtactgttagtggaggtaccagcgacactacggaaagcggtccaacggaggaaagtactaccgaaggctccactgaaagcacaaccgaaggatccacagacagcacccaatccaccgatctggacagcaccaccagtgatatctggagcaccagtgataaggatgacgaatcggagagcagtactccttactcctttgattctgaagttaccaagagcaagccccgtaaatgtaagcctaagaagagtacctgcgccaaatccgagtacggttgctgtccggatggtaagtccactccgaagggaccgtttgacgagggctgtcccattgcaaagacctgtgcggatacaaagtacggttgttgcttggacggagtgtctccggctaagggcaagaataacaagggttgtcccaagtcccagtgcgctgagactctctttggctgctgtcccgataaattcaccgccgccgatggtgagaatgatgagggatgtccagagaccactactgtaccacctacgactaccacagaggagacacagccagagactactactgagatcgaaggatcaggtcaagactcgacgacttctgagccagacaccaagaagtcctgctccttctccgaatttggttgctgtcccgatgcggaaacatccgccaagggccctgacttcgagggatgtggtcttgcgtcaccggttgccaagggctgcgcagagtctgagaacggttgctgtccggatggacaaacacctgcaagcggtccgaatggcgaaggttgctctggatgcacacgtgagcgctttggatgttgtccggactcccaaaccccggcccatggtcccaacaaggagggctgctgcttggacactcagtttggctgctgccccgacaacatcttggccgcgcgtggacccaacaacgagggctgcgaatgccactacactccgtatggctgctgcccggacaataagtcggccgcaactggctacaaccaggagggatgcgcctgcgagacgacccagtatggctgctgtcccgacaagatcactgccgccaagggacccaagcacgagggctgcccttgcgagaccacccagttcggatgctgtccagatgggctcaccttcgccaagggaccgcaccaccacggatgccactgcactcagacggagttcaagtgctgcgacgacgagaagaccccggccaagggccccaacggcgatggctgcacgtgtgtggagagcaagttcggttgctgtcccgatggagtcaccaaggcgacggacgagaagttcggtggatgcgagaatgtccaggagccaccgcaaaaggcctgcggcctgcccaaggagacgggcacctgcaataactacagcgtcaagtactacttcgacacctcctacggaggatgcgctcgcttttggtacggtggctgcgatggcaacgacaaccgctttgagagcgaggccgagtgcaaggacacctgccaggattacaccggcaagcacgtatgcctgctgcccaagagcgcaggtccctgcactggcttcaccaagaaatggtacttcgatgtcgaccgcaaccggtgcgaggagttccagtacggcggatgctacggtaccaataatcgcttcgatagcttggaacagtgccagggcacttgtgctgccagtgaaaatctgcctacctgtgaacaacctgtggagagcggaccatgtgccggaaacttcgagcgttggtactacgacaacgagacggacatctgccgacccttcacctatggtggatgcaagggcaacaagaacaactatcccacggaacatgcctgcaactacaactgccgccagcccggcgtgcttaaagaccgctgtgcgctccctaagcaaactggtgattgcagtgaaaaactggccaagtggcacttctccgagagtgagaagcgctgcgtgcccttctactacagcggttgtggtggcaacaagaacaacttcccgaccctggagtcctgcgaggaccactgcccacgccaagttgctaaggacatctgtgagattccggccgaggtgggcgagtgtgccaactacgttaccagctggtactacgacactcaggatcaggcctgtcgccagttctactacggcggctgtgggggcaatgagaaccgcttccccaccgaggagtcctgtttggcgcgttgcgaccgcaagcccgaacccacaaccaccacccccgccaccaggccacaacccagtaggcaggacgtctgtgacgaggaacccgctccaggagaatgtagtacctgggtcctcaagtggcacttcgatcggaagattggggcttgccgtcagttctactatggcaactgtggcggcaatggcaatcgcttcgagacagagaacgattgtcagcagcgttgtcttagccaagagcctcctgccccgactcctccacgagcacctgctccaaccaggcagccagatccggctcctactgtcgctcaatgcagtcagcctgctgatccaggacagtgcgacaaatgggcgctccactggaactacaacgagaccgagggtcgctgtcagtcgttctactacggcggctgtggcggcaatgataaccgctttgccaccgaggaggagtgctctgctcgctgctctgtcaacatagacatccgcattggtgccgatcccgtggagcacgacacgtccaagtgcttcttggccttcgaaccgggtaactgctacaacaacgtgacccgctggttctacaacagcgcggagggactctgcgacgagttcgtctacacgggctgcggcggtaatgccaacaactatgccaccgaggaggagtgccagaacgagtgcaacgacgcccagaccacatgtgcactgcctccggtccgtggacgatgcagtgacctctcccggcgctggtacttcgatgagcgcagcggagaatgccacgagttcgagttcactggatgccgcggtaatcgaaacaacttcgtgtcgcagagcgattgcctaaacttctgcattggggagcctgtagtggagccttcagcgccgacctattcggtgtgcgccgagcctccggaggccggcgaatgcgacaaccgtaccaccgcgtggttctacgacagcgagaacatggcctgcacggccttcacctacacgggatgcggaggcaatggaaaccgcttcgagacccgcgaccagtgcgaacggcagtgcggcgagttcaagggagtggacgtttgcaatgaaccggtgaccacgggtccgtgcaccgactggcagacgaagtactacttcaacacagcgagccaggcttgcgaaccgttcacctatggtggatgtgatggcaccggcaaccgtttcagcgatttgttcgagtgccagactgtttgtctggctggtcgtgaaccgagagtgggctcggctaaagaaatctgcctgctgccggtggcgacgggccgctgcaatggaccttcggtgcacgagcgccgttggtactacgacgacgaagcaggaaactgtgtgtccttcatatacgccggctgctccggcaaccagaacaacttccgatccttcgaggcatgcacgaaccaatgccgaccggaacccaacaagcaggacaacgaaattggacaaaatccgtgcgataccttcgatgcggagtgccaggagctccgctgtccatacggcgttcgccgtgtggccgccaggtcccagccagagtgcacgcagtgcatctgcgagaatccgtgcgagggctacagttgcccggagggccaacagtgcgccatcgatgtggccagttccgacgatcgccagtttgctccagtgtgtcgcgatatttataagccaggagagtgcccggctctttcagcgaatgccagtggatgtgcccgggaatgctacaccgatgccgactgtcgtggagacaacaagtgctgcagcgacggctgcggacagctgtgtgtgcatcctgctcgtccaactcagccgcccaggactcaggctccagtggtctcctatccgggcgatgccagagccgctctggaacccaaggaggcgcatgagcttgatgtccagacagccatcggcggcatagccgtgctgcgctgcttcgccaccggcaatccagccccgaatatcacctggtcgctcaagaacttggtgatcaacacgaacaagggacgatatgtgctgaccgccaacggtgatctgaccattgtccaggtgcgccaaacagacgatggcacctacgtctgcgtggccagcaatggtctgggagaacccgtgcgtcgtgaggtcgccctccaggttacagaacccgtaagtcagccagcttacatctacggagacaagaacgttactcagatcgtggagttgaaccgtccggcagtgatccgctgcccggccggtggcttcccagagccgcatgtcagctggtggcgcaacggacagatgtttggcctgaagaacaacctgatggcccgcgactactcgctggtcttcaactcgatccagttgtcggatcttggcctctacacctgcgaggtgtacaatcagaggcgtccggtctcgctgcgcgttactctgaaggcggtgggtcctgtccggcctctgagtcccgaggaggagcaatacatgcagtatgtgctcaatccggccacccgtccggtgacccagcgacccagctatccctatcgacccacccgaccggcctatgtgccagagcccacagttaatgttcatgccgtgttggctctggagccgaagaacagctacaccccaggctccaccattgtcatgagctgctccgtgcagggctatccagaaccgaatgtcacatggatcaaggacgacgtgcctctgtacaacaacgagcgtgttcaaattacataccaaccacatcgcctggtgctgagtgatgtcacatccgcggattccggaaagtacacttgccgggccagcaatgcgtacacctacgccaatggagaggccaatgtgtccattcaattgtcgcccgagtgcgttgacaatccgtacttcgctaactgcaagcttatcgtcaagggcagatactgttccaatccgtactacacccagttctgctgccgatcctgcacgttggcgggccagtttaattttaaaactatggaggatagcggcatcgatagcgaggacagacaatccaacatctacgaggatggggctgcgggactcttgaaaacggccagcggagcacccaaacatatgtcagatctggagtttgaggtggcattcaggggtgccggcaaggtctatgcccccacgaccatagaaatcgatgaagaggaggaagcgaccgcaggaagcggtcgaggccacgagccacccaacacctgccgcatactgcagcgcaaactggagctgaaggtcgagcgggcccggcggaactacactcagtttcaggcggagcaggctaccaagacgcagtcgtccactctgataccaatcaaccgtctacccattcctggcgagccggaacacaagccactggtggactacaaatccgagagtagcgacgaggccgaggagatctccttctttccggcccagctgaagcggtccaagcgccgccagcagaaccacgaactgactgacaccttcagcatacaggagatgaccattgactcggatctggagtcggacgacagtgctggcacccagaacctcgagctcctgctgccctccatgaagacgaccattctggacaagtttaagggatgcttcggatgctggcggcgcaggtaa

SEQ ID NO: 984 - protein, 3060 aa, DROSOPHILA
MYLPESSVTPGGEGNDPDEWTPWSSPSDCSRTCGGGVSYQTRECLRRDDRGEAVCSGGSRRYFSCNTQDCPEEESDFRAQQCSRFDRQQFDGVFYEWVPYTNAPNPCELNCMPKGERFYYRQREKVVDGTRCNDKDLDVCVNGECMPVGCDMMLGSDAKEDKCRKCGGDGSTCKTIRNTITTKDLAPGYNDLLLLPEGATNIRIEETVPSSNYLACRNHSGHYYLNGDWRIDFPRPMFFANSWWNYQRKPMGFAAPDQLTCSGPISESLFIVMLVQEKNISLDYEYSIPESLSHSQQDTHTWTHHQFNACSASCGGGSQSRKVTCNNRITLAEVNPSLCDQKSKPVEEQACGTEPCAPHWVEGEWSKCSKGCGSDGFQNRSITCERISSSGEHTVEEDAVCLKEVGNKPATKQECNRDVKNCPKYHLGPWTPCDKLCGDGKQTRKVTCFIEENGHKRVLPEEDCVEEKPETEKSCLLTPCEGVDWIISQWSGCNACGQNTETRTAICGNKEGKVYPEEFCEPEVPTLSRPCKSPKCEAQWFSSEWSKCSAPCGKGVKSRIVICGEFDGKTVTPADDDSKCNKETKPESEQDCEGEEKVCPGEWFTGPWGKCSKPCGGGERVREVLCLSNGTKSVNCDEEKVEPLSEKCNSEACTEDEILPLTSTDKPIEDDEEDCDEDGIELISDGLSDDEKSEDVIDLEGTAKTETTPEAEDLMQSDSPTPYDEFESTGTTFEGSGYDSESTTDSGISTEGSGDDEETSEASTDLSSSTDSGSTSSDSTSSDSSSSISSDATSEAPASSVSDSSDSTDASTETTGVSDDSTDVSSSTEASASESTDVSGASDSTGSTNASDSTPESSTEASSSTDDSTDSSDNSSNVSESSTEASSSSVSDSNDSSDGSTDGVSSTTENSSDSTSDATSDSTASSDSTDSTSDQTTETTPESSTDSTESSTLDASSTTDASSTSESSSESSTDGSSTTSNSASSETTGLSSDGSTTDATTAASDNTDITTDGSTDESTDGSSNASTEGSTEGASEDTTISTESSGSTESTDAIASDGSTTEGSTVEDLSSSTSSDVTSDSTITDSSPSTEVSGSTDSSSSTDGSSTDASSTEASSTDVTESTDSTVSGGTSDTTESGPTEESTTEGSTESTTEGSTDSTQSTDLDSTTSDIWSTSDKDDESESSTPYSFDSEVTKSKPRKCKPKKSTCAKSEYGCCPDGKSTPKGPFDEGCPIAKTCADTKYGCCLDGVSPAKGKNNKGCPKSQCAETLFGCCPDKFTAADGENDEGCPETTTVPPTTTTEETQPETTTEIEGSGQDSTTSEPDTKKSCSFSEFGCCPDAETSAKGPDFEGCGLASPVAKGCAESENGCCPDGQTPASGPNGEGCSGCTRERFGCCPDSQTPAHGPNKEGCCLDTQFGCCPDNILAARGPNNEGCECHYTPYGCCPDNKSAATGYNQEGCACETTQYGCCPDKITAAKGPKHEGCPCETTQFGCCPDGLTFAKGPHHHGCHCTQTEFKCCDDEKTPAKGPNGDGCTCVESKFGCCPDGVTKATDEKFGGCENVQEPPQKACGLPKETGTCNNYSVKYYFDTSYGGCARFWYGGCDGNDNRFESEAECKDTCQDYTGKHVCLLPKSAGPCTGFTKKWYFDVDRNRCEEFQYGGCYGTNNRFDSLEQCQGTCAASENLPTCEQPVESGPCAGNFERWYYDNETDICRPFTYGGCKGNKNNYPTEHACNYNCRQPGVLKDRCALPKQTGDCSEKLAKWHFSESEKRCVPFYYSGCGGNKNNFPTLESCEDHCPRQVAKDICEIPAEVGECANYVTSWYYDTQDQACRQFYYGGCGGNENRFPTEESCLARCDRKPEPTTTTPATRPQPSRQDVCDEEPAPGECSTWVLKWHFDRKIGACRQFYYGNCGGNGNRFETENDCQQRCLSQEPPAPTPPRAPAPTRQPDPAPTVAQCSQPADPGQCDKWALHWNYNETEGRCQSFYYGGCGGNDNRFATEEECSARCSVNIDIRIGADPVEHDTSKCFLAFEPGNCYNNVTRWFYNSAEGLCDEFVYTGCGGNANNYATEEECQNECNDAQTTCALPPVRGRCSDLSRRWYFDERSGECHEFEFTGCRGNRNNFVSQSDCLNFCIGEPVVEPSAPTYSVCAEPPEAGECDNRTTAWFYDSENMACTAFTYTGCGGNGNRFETRDQCERQCGEFKGVDVCNEPVTTGPCTDWQTKYYFNTASQACEPFTYGGCDGTGNRFSDLFECQTVCLAGREPRVGSAKEICLLPVATGRCNGPSVHERRWYYDDEAGNCVSFIYAGCSGNQNNFRSFEACTNQCRPEPNKQDNEIGQNPCDTFDAECQELRCPYGVRRVAARSQPECTQCICENPCEGYSCPEGQQCAIDVASSDDRQFAPVCRDIYKPGECPALSANASGCARECYTDADCRGDNKCCSDGCGQLCVHPARPTQPPRTQAPVVSYPGDARAALEPKEAHELDVQTAIGGIAVLRCFATGNPAPNITWSLKNLVINTNKGRYVLTANGDLTIVQVRQTDDGTYVCVASNGLGEPVRREVALQVTEPVSQPAYIYGDKNVTQIVELNRPAVIRCPAGGFPEPHVSWWRNGQMFGLKNNLMARDYSLVFNSIQLSDLGLYTCEVYNQRRPVSLRVTLKAVGPVRPLSPEEEQYMQYVLNPATRPVTQRPSYPYRPTRPAYVPEPTVNVHAVLALEPKNSYTPGSTIVMSCSVQGYPEPNVTWIKDDVPLYNNERVQITYQPHRLVLSDVTSADSGKYTCRASNAYTYANGEANVSIQLSPECVDNPYFANCKLIVKGRYCSNPYYTQFCCRSCTLAGQFNFKTMEDSGIDSEDRQSNIYEDGAAGLLKTASGAPKHMSDLEFEVAFRGAGKVYAPTTIEIDEEEEATAGSGRGHEPPNTCRILQRKLELKVERARRNYTQFQAEQATKTQSSTLIPINRLPIPGEPEHKPLVDYKSESSDEAEEISFFPAQLKRSKRRQQNHELTDTFSIQEMTIDSDLESDDSAGTQNLELLLPSMKTTILDKFKGCFGCWRRR

SEQ ID NO: 985 - DNA, 2994 bp, DROSOPHILA
tacggcggaggcagtgcatccaagggtggcttctggtaggatcgatgccacgaacaatgacagcacgagcatcttcaccgaacgactaaagtgaatcgcatatgggccatatacatacacaattagttttcgaaccaaacgtccgttttgtgcagctcaaacgactcgtacttggcgaaaatgtataaaataaatgtcataaatccataagatatgaaaataatcagttggcacaaatcggtgggtgggttaattgcattaataaatacagagatgagttaacgtgcggcaaattgaatgtgagaagagcgttgtaaactcaaatcgcatatattttatatgctaattactaaataggcaaaatgtgatgtatggcaaaggttactattgttattttcactcggcagtcaaatattgaagttttattttttatacaaataattaaagcacaaatcaagcttacattgtaaatatttcgatttttctatttagtttaaacaaatcaaatttaaataactaggtgcaaaccatttataagattaatagacccaattttccaccgtatgattatcttgagcacttcgtataaatatatgttcttgagattcgcattgtaaagtacaaaaaacaatacaagtttcatcgtttctaactatgcaaatacaacgcctgccgccccttttgtcgtatcacagggcgtggctgattgtcacagtgatgagatggcaatttctcaacacgctaacgagatgcacttacaaaaaaatgggtatgcccattgggaaattattcttaaaaaaagattcgatgatttatactaaaattacatgaatttagcataatcgtaatgttaccaagtcattatatatttattctattgtttggctcgaacttttctctcagtgtactaggctagaactcgtttggagagcgcacgcaaccatcgcagcgatatataaagtggatcttctggccgagattcgagtaatcatcgttgaaatcgcaatcgaaaatcatggaacgctggcagaatcgcgtggccgtcgtcactggcgccagttcgggcatcggatcggccatagccaaggatctggtcctagccggaatgacggtggtgggtctggcccgacgtgtcgatcgcgtcaaggagctgcagagggagctgccggcggagaagcgcggcaaactttttgccctctactgcgacgtgggcaacgagagttccgtaaacgaggccttcgattggatcatccaaaagttgggcgccatcgatgtgctggtcaacaatgccggcaccctgcaacccggctatctggtggacatgaatccggccgtaatgcagcaggtattgcagacgaacatcatgggcatcgtgctgtgcacccagcgagcggtgcgttccatgcgggagcgcaagttcgacggccatgtggtgctcatcaatagcatcctggggcacaagaccatgacggccacggagggcgtggcgcccgatgtgaacgtctatccgcccagcaagcatgcagttacagcgctggccgaaggatatcgccaggagttcttcggcctgggcacccgcatcaagattacggttggttcgctttccattttccactttcttcggattgaacatttttctaacccctttttggctttttccgccaacgtagagcgtcagtccgggcgtggtggacacggagatcgtgccggacagcattagggaggccatcaaggatcgaatgctccactccgaggacatcgcacagggagtgctgtacgccatcgccacaccgccacatgtccaggtgcacgagctgatcatcaagccacttggcgagaccatgtaggcggaggagcttcaggagctctgttcttttttttttttgtatttttcctcttcatcttaatatttttgccgtgacagaaaatatgaagcaccatattcacacaattttcgtagacagtttaatattcacagttaagctatacacgttgcaataaaactatttaaatttaaatttagtaagtcggtttaatttacttaaatttgaaattgaaattccctgtcttgagcagtaacaacacatgcaatgaatgcgataaataaatgggaatgcatttccatgggtaaacggaaaattgaaaatccagccgtaagtgaaaaagtatggtaaacatatatacgtatgtatttactatataggaaatgcgagcaatggcaaatgactttccgcataatggggctggctggcaactaattgccaatggccctaatggctttaattgacaatttttgttgttttttctttttttttttttagctggccaaaaaagagcacaattgaaatttgacacagaaaaggcgagcaataaatgggaaaataaggcaagcaagccatcctgcacaaatggaattctctgtggtcaaagagtgtcatgtgcaattgggcatcttcgagcaatagcttcattcgaggaggaaaccgagtcattagagcgttccgcttcttccagcttcctgtgcactgggaaaaaatactaatcgctctgcgaattttgttcgaagaaaaaccaaactgctatgaaaagtgcctgcctgaaacttggcacagcaaaatcgaatattaacaggaaatgcccaatgattatttagactatttatgttacagtgtatttcttgctgccggccacacacttgattttatttgcgctttttccgagttggtgtccgtccggaaactcaatttgtcagacaaatgcgatggagctagctgcagcaggagagcataaaacaggaccccagtcgcttcaaggacaatggagcatccttggccaagtctattaaagccaagtaaacactgctctcaatgaattgcagctgcaaattccaattgacttcgatcaaaagatgaccgcactaaataattaaatgaaacaatttcctcggccttttcgctggcagaaaatgtcattgggaaacctaaaaggaatgtg

SEQ ID NO: 986 - DNA, 915 bp, DROSOPHILA
tcgcaatcgaaaatcatggaacgctggcagaatcgcgtggccgtcgtcactggcgccagttcgggcatcggatcggccatagccaaggatctggtcctagccggaatgacggtggtgggtctggcccgacgtgtcgatcgcgtcaaggagctgcagagggagctgccggcggagaagcgcggcaaactttttgccctctactgcgacgtgggcaacgagagttccgtaaacgaggccttcgattggatcatccaaaagttgggcgccatcgatgtgctggtcaacaatgccggcaccctgcaacccggctatctggtggacatgaatccggccgtaatgcagcaggtattgcagacgaacatcatgggcatcgtgctgtgcacccagcgagcggtgcgttccatgcgggagcgcaagttcgacggccatgtggtgctcatcaatagcatcctggggcacaagaccatgacggccacggagggcgtggcgcccgatgtgaacgtctatccgcccagcaagcatgcagttacagcgctggccgaaggatatcgccaggagttcttcggcctgggcacccgcatcaagattacgagcgtcagtccgggcgtggtggacacggagatcgtgccggacagcattagggaggccatcaaggatcgaatgctccactccgaggacatcgcacagggagtgctgtacgccatcgccacaccgccacatgtccaggtgcacgagctgatcatcaagccacttggcgagaccatgtaggcggaggagcttcaggagctctgttcttttttttttttgtatttttcctcttcatcttaatatttttgccgtgacagaaaatatgaagcaccatattcacacaattttcgtagacagtttaatattcacagttaagctatacacgtt

SEQ ID NO: 987 - protein, 250 aa, DROSOPHILA
MERWQNRVAVVTGASSGIGSAIAKDLVLAGMTVVGLARRVDRVKELQRELPAEKRGKLFALYCDVGNESSVNEAFDWIIQKLGAIDVLVNNAGTLQPGYLVDMNPAVMQQVLQTNIMGIVLCTQRAVRSMRERKFDGHVVLINSILGHKTMTATEGVAPDVNVYPPSKHAVTALAEGYRQEFFGLGTRIKITSVSPGVVDTEIVPDSIREAIKDRMLHSEDIAQGVLYAIATPPHVQVHELIIKPLGETM

SEQ ID NO: 988 - DNA, 4927 bp, DROSOPHILA
taccctccggacccaagcgtccacggcccgcggaaccggaaccggaaccggaagcggaacgcaaaccggaaacggacaactgattgcgggctgaccaaaattccacacacgtatttattaccatttcgcttaggcataatatcgattcgattgtacaatgtcgccttaacccgtaagctaaagtaagagttcattcagagataacgaataaaaaacataaaatcgcactggcggtgattgaacttggatggatgttccccagttccccagggaaaccaggggacgatttcgctttcgtcggggaattgggagccgtttatctcagctctgatgggactataaaggcagtcgagttgccgggaaaagttacagttaacatcgaaaggggaactcagaatgaagctggccctgctcctgatcctctgctgttgcctcatcggaatgggtgagctacaactttggtctttggatacccaatgaataacaatatccaatatgcagcgattggtgactcggttttggtgaccaagccgccgttcattcgcagtcgctatagcttgcgttggaggaagacaaccactgtggcgcctgaagtggtcactggatccagtggatcaaccgttaacacggtcaccaccaccgaccatcccaagctggccacttccaccgccagttcggattacgactattacggaaatggggagacggagaatgtggtgcacaagtaatagtcatattccagccatatgactatatattaacacttgatataatcagagcgactttaatgtcataacaatgtaagagaaggccatttaataaataaactgtatgtcaaatctctagaaatcaataagaaatccaataagaaatctaaattcaaattacgcggcattagactttataacagttatgttgctagcagacgttgtcaaaacaagttggcagtttttacagctccatgttaactcaatgttagctaacatacgacacaagtcagctgttccgcgccgacagcaacagcaacaaaaacagcagctaagaacaaacgagttttggatcgaaaatgttgttaacaattaaatgcgctcagaatgtgattaagccgaactgccagaaagtggccaatctgcttgccagcagccgcagagctggtttattccccacaactgcaacaacagcaacgagtagaaggtattcaaaaggtggaatgtgcggaaggggagggaggggcaaaaataccaaacttaaatctgagctttatttttcgcgcagcctgtcgcaaatctcagttctgtattcgccagcagcgagagaagcagcacgggcagcaactggtggcagtgcgaatctccggagaatccacaacaccccaaccacagaagcaacagcaaccgcaatcacagcgaaaaagcgcaaaatggtggtaagtacgagccgaaagtgagtttgagatcaaggtgaacggagtctcagcgaaatcgagtggttcccttatcgcctccaactgaaatcaatcgaccacccaaggacaggtttggactttcggaaagtgctttatgccctaacaaatagaatcactgtgattttggccagaaatggaggtttttcgctcacaaattattttgtatatatatcgtatgaatcaataacactcacatacttgttgctcgctgccctttaggtacgactaaacgaacaggaacgcgccgagaagctgcagcccctcctggacgccggctggactttggtggaggggcgcgacgccatcttcaagcagttcgtgctgaaggacttcaaccaggccttcagcttcatgacgggcgtggcattgctggccgagaagatcaaccaccatcccgagtggttcaactgctacaacaaggtggacgtgaccctgtccacgcacgacgtgggcggtctcagttcgcaggacattcgcatggccacgcacttggagaccacggccaatttgttgaaataaacgcattgttatactagttgctaaatatctataatcttcggtgtccaataaatactcagcttagcatcgatttgctaaagatttggtagtcggcttgttccaggacatctggcgagatctcgtccttgacgtagcccagttgcttgaagaaggaaatggaggcttcgttgttgttgagaacggtcagcatgaccttttccagatgccacaggcgagcgcagtcctccaaagtgctcatgatgaactttcccaggccttttctacgatactctgcagccacttgcatttcgtaactgaaaggaagttctacgtaattaatgcataagggctttacttatggaatacccaccaatacaggacacagtccccgtgatccatgtcgaagcggaacattgcgtaggccacgttctccttcttttcgttctgggccaccaagtagcgagcccagttcttgttcagctcggcggctttgatcttgggctgccagcccatcttgagttgcttgtaatagggtcccacgttcgtctcggccagcttaaaggcccatttcagcagtttggagtccgcatccgacttcgctcggcagatgagtttgaattcctctccgctgggggctttgtagctttggtagctcagagattcgaggggattcttggccctggcagccgtctccacaaatctctgtttggcgccctgacttagatcgtcctgattccgcattgtttgcttaaaattttgtaaaaatggcaattcgactaaaaatatgccgcgcaaattagggatggcacacagtggtaaacaaactattattgcttatatagagactgctatcgattacacagattaactttaattggtatttttgaaataataattactggccacttcattatttaccactgttttgtaaacaattgcagaaaatttattgaattccattttacggcttatatacgggttttagactaaattgttagtacgataattaaccttaatatcactaagactacgagactcgatacatcaggtaaccccacatattgaatccccaattcaacaagtgctgacgtttccagttctctaaattgtagtttcaaggaaacagacgatgtttaggaagtccaggcccaaagtagagcctccacccacggctcccagtgtagaggaaatgctggcggacatggaaacgttcgaggtcaatcagcctacgataagcggatctacagacaacttggacttggagcacgctttcatgactgaaccagagaatcttcccctttcaacatggtggcagatgttcgacgagtacgatcagaaggtgaagaaactgtcggccaccgtgggagatctggagacccaacgaaatcagttaaaagaatgctatgcgaagctggaaaataacgcggataaactgagaacggacatccaaaagcagcaggcactggtcaaagaagcccttaaatgttaatctatcattaagctaccttatcttaaactattgttgaatgcacgagcgggtaacaagtaaaacctaaaaactccacaatcttgagaatattcactttaggcccactgcactgtggttcgagtcccggctagaacttcagctcaaagtacgtttgcggtatatttttcaaccgcgaggtgtatttttctgagcctgacattttaacggtcaatgcgcggtgtggtcacactgcttggtggatggtaaggtggtcgaaaaaagttgttaaaagcgcagaaaaagcaattgtaatgcaattgctccagtgactgtgaaaagtaagcagccaagcaaataagttaatcaaaacatagatcaacagatcagaaagtcctaaaacggcacgattagtcgtgaaattcgctcggtttaggcctggatgattgggcagaagaacaggttttaggccgtggcaacaacgaaaaaaaaaaaaaaatagaaaaaaaaacctgcgactggcttataccatttacgccattaacggaggtcgatggttatccctgtgtgtgtgtggtgtgtgtttggtccaatatatttggctaaattccgcaaatccaattaacgcaaacggaaaaaaagagtgcaacaatttgtggctaattgaattttacgtgtattttattttggttttcgaccagcgcaacaacaacagcgagcaacgagtagaaagagtggggagagcagtgggggtttttttggcccaaagctcaggtagaatacacacacacacgcatgattgttgggcaaaaacaataattatccaattaaacggttgtcaaagaatgcatttaatttcattggccaataggtttgcgcgtaagagagggaagcagtggcgaagagagcgcctaactaacagtatttttcacgggcacaccaatgcgagcgacactgcttcgtgtgtgtatgtgtgtgaggtgctaatgagatgctgtgacgctcttcttcttcttgccgtttgttgcttttgccatttatgcaaaaagacgcaaaacagcgaaaaaaaaacagaacaaaatacacagattttcgagctgaacaaaagatttcacgtaaaaggtgaaagccacttggagatgcgagcacacggcgtatacgcaatgcagtttctttgtgccacggaccgttaatgcaatcatctcgcgatcataaccgttctagattctcacctctccactccgcattctgcacttttccactcctccagttaccgcggagatgtcaccgattggagccacttcctcgcagcgaatcccacaacaataacaaataacgaataacaaatgatgtgatgcagcagcaggggtcgagttcgaaaaacacaaccttcgagtagtccaggccatctagaatcgcacccggatcgcacccacgatgagctggctgctgggcctcctcgggctccaggtcctgttcctctggctcctgtggctgcc

SEQ ID NO: 989 - DNA, 741 bp, DROSOPHILA
ctgttccgcgccgacagcaacagcaacaaaaacagcagctaagaacaaacgagttttggatcgaaaatgttgttaacaattaaatgcgctcagaatgtgattaagccgaactgccagaaagtggccaatctgcttgccagcagccgcagagctggtttattccccacaactgcaacaacagcaacgagtagaagcctgtcgcaaatctcagttctgtattcgccagcagcgagagaagcagcacgggcagcaactggtggcagtgcgaatctccggagaatccacaacaccccaaccacagaagcaacagcaaccgcaatcacagcgaaaaagcgcaaaatggtggtacgactaaacgaacaggaacgcgccgagaagctgcagcccctcctggacgccggctggactttggtggaggggcgcgacgccatcttcaagcagttcgtgctgaaggacttcaaccaggccttcagcttcatgacgggcgtggcattgctggccgagaagatcaaccaccatcccgagtggttcaactgctacaacaaggtggacgtgaccctgtccacgcacgacgtgggcggtctcagttcgcaggacattcgcatggccacgcacttggagaccacggccaatttgttgaaataaacgcattgttatactagttgctaaatatctataatcttcggtgtccaataaatactcagcttagcatcgatttgctaaaggaaaaaaaaaaaaaaa

SEQ ID NO: 990 - protein, 101 aa, DROSOPHILA
MVVRLNEQERAEKLQPLLDAGWTLVEGRDAIFKQFVLKDFNQAFSFMTGVALLAEKINHHPEWFNCYNKVDVTLSTHDVGGLSSQDIRMATHLETTANLLK

SEQ ID NO: 991 - DNA, 6237 bp, DROSOPHILA
ttgggagcccactcgattttcatgatgtcagagctctcgaactcggaaagttgaactacttggtagcacggtcctccggcgactgaaaaatggaaatgttcaatgtttagttaccatttcttatccttatcagtatccgtcggtggcgcgagtgcgtggctattggttagagttgttaaaaaaataccttcgatttaatggctattcgcttggggtgtttaaaaattcgagcaatcaagataatgacttgctctatatggacgtctggctagaatgccgatatgatattatatgatatgatcttatcattgccaacaacagccggctttaacgtttgtccgatacttgtgatcacatatatataattattgttttgaaatttcaattgcaactggtttgaatgcctttagaaagagaacgaaactgctgttgcacgacaacctcctcactttaattgaatggtgataaaactaactgggagttactcgtattgcttttgatccgatccgctttggcctagtatcacaggctaattattttaaacttgtagagctttaataaactagacgctcccatagaaatttattattaatgtttacacacgtaatggatcgttatcgcgtttgagcagcagaaccgacgatgcgagcgtacaacatttaactaaacttgcgagtggcactgaatgctcgagtttcccatgtgagtgtttcgagtactcgaatgcgatgcaacaattgagtcaccaatgtaatcgagcgttctatacgaataacctgaatcagaggcaactgaggtcatgtgcatttgcaagtcgctataaggaaatacctgtattgtcagctctgttccaattgaaatggaatcagggaaagtgtgatcacgcaaaagctacaatgtgggcgaaattagcatagttgttttttggttaatttcgaatattggcgcccaacatggtttctagggatggaagcgaccagcactgcattctgatttatcggtttgctgcaatacaagctcttttggcgcaacagatcatagaagattgaaatacaaacgttgttggtggtatcacaaatgaaaattgcgaagagttatctgaagtcaatgttctatgcttatcccaagccctggcgctactatgacggagtagcgatccaaatttttgcatttcaaatgacccctagtccaatcccatccatacgatcaagtacaatacgatgcagtgaagaggtgaaaaacaaatcaaaacaaaatagcgcaaaatatattcaacgagtccgccgcttctcatcattcctccttcttcgtcgcttttttaccatcgcatttttggcctcagtttctcagttctttctcagttcagcaagataatccgagaaggacggatggtattgatctcgaaagttggaatctagaaactaagtattcgaatttgctgtgtgtgttattgagttttgtatcaaagtgcgtggtggcaaaagtgcaataaactttaagtcggttttaaacaaatacacatttcattccaacacacacacaccgacacacaacgaagaactaaagaagggtttcaaaagcagaacaaggaaaatgcttattttctacgcgaagtacgcatttatcttctggtttttcgtgggaagcaatcaaggtgaaatgttgctaatggacaaaatctctcacgataagacgcttctcaacgtcaccgcttgcacccagaattgtctggaaaagggccagatggtatgtttacacccttagaatgttggaacactccataaccaaaagtgcatgcttcttttctcgacaggatttccgaagctgtttaaaggactgcaggattaatggaacatttcccggggctctgcgcaaggtgcaggaaaactaccagatgaacatgatctgccgcacggagtcggaaatcgttttccaaatagattgggtgcagcacagcaggggaaccgagccggctccaaatgccacctacataatccgggtggatgctgtcaaggacgacaacaaagaaactgcgctttacctggtcagatattagatgtaaactcattactatttactttaaaataccattttatttgatgaatttctagaaaaagatgtactatgtagtcatcaagacctaatgtttcgttttacaagtggatcgctctttttcatcgacttattcgcttgcagtctgatgacaactttctcatcctgccgggattggagtccaactctacccacaacatcaccgccctggcgatgcacggagatggcagctactccttgatagcaaaggaccagaccttcgccaccctcatccgaggctatcagcccagcaaaatgggagcggtgaatctgctgcggtttgtcccccaaccagacgacctgcatcacattgctgccgaaatcgagtggaagccatcggcgggtaagtagctccatcagtttaatcaatcaacgatctacgaaccctactttcatattccagagagcaactgctatttcgacatggtgtcgtattcaaccaacagcgtgaatatggacgagccactggaggtgcagttccgggatgtgagtatgccatgacgcccctgcaatgctagagcatagctaatcttttactgcagcgcaaaaagctgtacaggcacacggtggacaacttggagtttgacaaacagtatcacgttggcgtaagaacggtgaacataatgaatcgactggagagcgatctgcagtggctgccaatcgctgttccaagctgcttggattggtatccctataactacacactctgccgtaggttcctcgaaagtcctatataataataatattaataataataatattgttccaccctttcatagcaccccataagccagagaatcttactgtgacccagaagcagtatctgccaaatattttggccctgaacatcacctgggcgcgtcccagatacctgccggataactatacacttcacatctttgatctattcaaaggaggtacggagctaaactatacacttgaccaaaacaggagccacttctatgtacccaagatcacggtactgggttcccatttcgaagtacatttggtggcccagtcggcaggcggaaaaaacgtatccggtttgacgttggacaaggttcatcgaggtgtgttgctgagcggtacgtacgctgaaggaaattaaatatttagacatccatttccatccattgaacagagggcaacatggtcaagttggtactctttattatcgtgcccatatgctgcattttgatgctgtgctccctgacgttctgcagacgaaatcgttcggaggttcaggcgctgcaaatggacgctaaggacgcgaaggccagtgaatttcatctctccctgatggacagcagtggcctgctggtcaccctctcggccaacgagagtctggaagtaatggacgagctggaggtggagccacactcggtgctccttcaggatgtcctcggcgaaggagcctttggcttggtgcgacgtggagtttacaagaaacgccaagtggccgtcaagttgctgaaaggttgtaccatttggtattgaagttcttgaataattcatggaatttttgttctcacagatgaaccaaacgacgaggacgtatatgcgttcaagtgcgaaattcagatgctcaaggccgtgggcaagcatccaaatattgtgggtatcgtgggatactccactcgttttagcaaccagatgatgttgctaattgaatactgcagccttggaagcctgcagaactttttacggtaagttatttttatacatattggaaaacaagtgatgtatagtaaaaaatgtattacttagtgaggagtggaagttcaggcaggagcaaaatgcaattggacttaagaagaaccttgaacagaacgtggacaaccgacggtttaaccgactccctagaaattccatccatgatcgcatagaggatatcaacaactcgatgctgtccactgtggaagaggagagtgaatcggatcagacacactcaagtcgatgtgagacctacaccctcactcgaataaccaatgcagccgacaacaagggctatggcctggaggacattgaaaacatcggtgggagttacattcccaaaaccgctgaagctccaaaggatcggccaaaacggaagctgaagccgcagcccaagaaagactcgaagcaggatttcaaatcggacaacaagaagcgaatctttgagaacaaggaatactttgattgcctcgactcatcggataccaagccccgaataccactgaaatatgcagatttgctagacatcgcccaacaggtggcggtgggaatggtagcctacatctactctatccctaaatgtaattaaaaagtgtagcatgtatcatttgccattttaggaatttctggcccaaaacaaagtagtgcatagggatctggctgcccggaatgttctaatctccgtagatcgcagcatcaagatagcagattttgggtgggtatctctgaaagttcaatgattagttatattgtgtttttttttttaaggctgagtcgagatgtgtatcatgagaacgtgtaccgaaagtccggaggaagtggcaagctgcccatcaagtggctcgcgctggagtccctcacccaccaggtgtacaccagtcagagcgatgtgtaagtatatatttttgttaagtccgaagcgattttgtggctgatatcttaccctcttagttggtcctttggtgtgctgctctatgagatcaccactctcggtggaatgccatatccgtcggtgtctcccagtgatctcttgcagctactgcgacaaggtcatcggatgaagcgaccggagggatgtacgcaagaaatgtgggtatcagtgcttagcgaagtacataattgttgatcacatttgcttaactcaggttttccctgatggaaagctgctggagctccgtgccatcacacaggccaacattttccgcccttaaacacagacttggtggcatgattttggccactaacgatgttccagaaaggctgaaacaactgcaagctgcaaccgagtcaaaattaaagtcatgtgacggtctaaacaggtaagtaatctttaaaaagacaattgtatacgttactttcttaccttttacaatttagtaaagtggagcaagtgccatgcgaggaagagctatacctagaacctttgaattaatagtcattgcttcaagattataatgaacgagtgcaatacattctaaattcgagttccaattcagacaatgctatgcgccagataaccttgcatagcaataaacattaaagctagcctaagaaaaatttaatttcttttttataagaaaaaccaagatatttatagagtaaacttctagcagtgccctttatgtctcatagaaaccgaccatttcaaaatgtttgtgcctccttgcggcttaggtttcgaaagaaggtcgtttatttggaccccaatcagcatcatttttgaaaattccaaattgaaagtcggtccaagctggcttgtttacagtgtttcaattctacttctggccacctcgatcgatgtgcatccactgctgtcgcctccgccggacaccatgtccaccgattccctacagctgtccacactgcccggtgcgcaccatctccagctgctgtccactgggcagtcggcccctcgccgagaatcctttcataagaggtccggatcgggagccaacccccgatccctgcgacaccttgccaccgcgctggctggacctcaatcgacgggtcatatttgccttggcaaaaagattatgtcgatctccagaggcagctcattatattttgcttcgcctgttgtatgccaactatagaaaagtgatgatgatatccagaaaacgaaggagatacaaggtgccactaagtgggtttcccgatcaggatttgttctccgccagcgcacatttcgatagcaatggttacctctccgatcccatggctcccgaaactctgggaaagctactccacatgatgcaggactacatccttcggctgagagcgctgaatcgcaagtacaagtggtgtggcaacggcgaggactttggagatgtattgctcctattgggagagcaagacgaactggtacgattgttaagagatctctttggagacagcgatgttgtgtccattccaaagctcctgagcgcccttagc

SEQ ID NO: 992 - DNA, 3084 bp, DROSOPHILA
gtttgctgcaatacaagctcttttggcgcaacagatcatagaagattgaaatacaaacgttgttggtgttctttctcagttcagcaagataatccgagaaggacggatggtattgatctcgaaagttggaatctagaaactaagtattcgaatttgctgtgtgtgttattgagttttgtatcaaagtgcgtggtggcaaaagtgcaataaactttaagtcggttttaaacaaatacacatttcattccaacacacacacaccgacacacaacgaagaactaaagaagggtttcaaaagcagaacaaggaaaatgcttattttctacgcgaagtacgcatttatcttctggtttttcgtgggaagcaatcaaggtgaaatgttgctaatggacaaaatctctcacgataagacgcttctcaacgtcaccgcttgcacccagaattgtctggaaaagggccagatggatttccgaagctgtttaaaggactgcaggattaatggaacatttcccggggctctgcgcaaggtgcaggaaaactaccagatgaacatgatctgccgcacggagtcggaaatcgttttccaaatagattgggtgcagcacagcaggggaaccgagccggctccaaatgccacctacataatccgggtggatgctgtcaaggacgacaacaaagaaactgcgctttacctgtctgatgacaactttctcatcctgccgggattggagtccaactctacccacaacatcaccgccctggcgatgcacggagatggcagctactccttgatagcaaaggaccagaccttcgccaccctcatccgaggctatcagcccagcaaaatgggagcggtgaatctgctgcggtttgtcccccaaccagacgacctgcatcacattgctgccgaaatcgagtggaagccatcggcggagagcaactgctatttcgacatggtgtcgtattcaaccaacagcgtgaatatggacgagccactggaggtgcagttccgggatcgcaaaaagctgtacaggcacacggtggacaacttggagtttgacaaacagtatcacgttggcgtaagaacggtgaacataatgaatcgactggagagcgatctgcagtggctgccaatcgctgttccaagctgcttggattggtatccctataactacacactctgcccaccccataagccagagaatcttactgtgacccagaagcagtatctgccaaatattttggccctgaacatcacctgggcgcgtcccagatacctgccggataactatacacttcacatctttgatctattcaaaggaggtacggagctaaactatacacttgaccaaaacaggagccacttctatgtacccaagatcacggtactgggttcccatttcgaagtacatttggtggcccagtcggcaggcggaaaaaacgtatccggtttgacgttggacaaggttcatcgaggtgtgttgctgagcgagggcaacatggtcaagttggtactctttattatcgtgcccatatgctgcattttgatgctgtgctccctgacgttctgcagacgaaatcgttcggaggttcaggcgctgcaaatggacgctaaggacgcgaaggccagtgaatttcatctctccctgatggacagcagtggcctgctggtcaccctctcggccaacgagagtctggaagtaatggacgagctggaggtggagccacactcggtgctccttcaggatgtcctcggcgaaggagcctttggcttggtgcgacgtggagtttacaagaaacgccaagtggccgtcaagttgctgaaagatgaaccaaacgacgaggacgtatatgcgttcaagtgcgaaattcagatgctcaaggccgtgggcaagcatccaaatattgtgggtatcgtgggatactccactcgttttagcaaccagatgatgttgctaattgaatactgcagccttggaagcctgcagaactttttacgtgaggagtggaagttcaggcaggagcaaaatgcaattggacttaagaagaaccttgaacagaacgtggacaaccgacggtttaaccgactccctagaaattccatccatgatcgcatagaggatatcaacaactcgatgctgtccactgtggaagaggagagtgaatcggatcagacacactcaagtcgatgtgagacctacaccctcactcgaataaccaatgcagccgacaacaagggctatggcctggaggacattgaaaacatcggtgggagttacattcccaaaaccgctgaagctccaaaggatcggccaaaacggaagctgaagccgcagcccaagaaagactcgaagcaggatttcaaatcggacaacaagaagcgaatctttgagaacaaggaatactttgattgcctcgactcatcggataccaagccccgaataccactgaaatatgcagatttgctagacatcgcccaacaggtggcggtgggaatggaatttctggcccaaaacaaagtagtgcatagggatctggctgcccggaatgttctaatctccgtagatcgcagcatcaagatagcagattttgggctgagtcgagatgtgtatcatgagaacgtgtaccgaaagtccggaggaagtggcaagctgcccatcaagtggctcgcgctggagtccctcacccaccaggtgtacaccagtcagagcgatgtttggtcctttggtgtgctgctctatgagatcaccactctcggtggaatgccatatccgtcggtgtctcccagtgatctcttgcagctactgcgacaaggtcatcggatgaagcgaccggagggatgtacgcaagaaatgttttccctgatggaaagctgctggagctccgtgccatcacacaggccaacattttccgcccttaaacacagacttggtggcatgattttggccactaacgatgttccagaaaggctgaaacaactgcaagctgcaaccgagtcaaaattaaagtcatgtgacggtctaaacagtaaagtggagcaagtgccatgcgaggaagagctatacctagaacctttgaattaat

SEQ ID NO: 993 - protein, 923 aa, DROSOPHILA
MLIFYAKYAFIFWFFVGSNQGEMLLMDKISHDKTLLNVTACTQNCLEKGQMDFRSCLKDCRINGTFPGALRKVQENYQMNMICRTESEIVFQIDWVQHSRGTEPAPNATYIIRVDAVKDDNKETALYLSDDNFLILPGLESNSTHNITALAMHGDGSYSLIAKDQTFATLIRGYQPSKMGAVNLLRFVPQPDDLHHIAAEIEWKPSAESNCYFDMVSYSTNSVNMDEPLEVQFRDRKKLYRHTVDNLEFDKQYHVGVRTVNIMNRLESDLQWLPIAVPSCLDWYPYNYTLCPPHKPENLTVTQKQYLPNILALNITWARPRYLPDNYTLHIFDLFKGGTELNYTLDQNRSHFYVPKITVLGSHFEVHLVAQSAGGKNVSGLTLDKVHRGVLLSEGNMVKLVLFIIVPICCILMLCSLTFCRRNRSEVQALQMDAKDAKASEFHLSLMDSSGLLVTLSANESLEVMDELEVEPHSVLLQDVLGEGAFGLVRRGVYKKRQVAVKLLKDEPNDEDVYAFKCEIQMLKAVGKHPNIVGIVGYSTRFSNQMMLLIEYCSLGSLQNFLREEWKFRQEQNAIGLKKNLEQNVDNRRFNRLPRNSIHDRIEDINNSMLSTVEEESESDQTHSSRCETYTLTRITNAADNKGYGLEDIENIGGSYIPKTAEAPKDRPKRKLKPQPKKDSKQDFKSDNKKRIFENKEYFDCLDSSDTKPRIPLKYADLLDIAQQVAVGMEFLAQNKVVHRDLAARNVLISVDRSIKIADFGLSRDVYHENVYRKSGGSGKLPIKWLALESLTHQVYTSQSDVWSFGVLLYEITTLGGMPYPSVSPSDLLQLLRQGHRMKRPEGCTQEMFSLMESCWSSVPSHRPTFSALKHRLGGMILATNDVPERLKQLQAATESKLKSCDGLNSKVEQVPCEEELYLEPLN

SEQ ID NO: 994 - DNA, 2811 bp, DROSOPHILA
catctggttggtttatgagacattttgttgttgcttattttgctttcgccttcgttttcactcagttcaagtgttttgcattttatgcttggcacaagaatcaagtggaatgtgaatggccaagagggtgagaaccttaaaaataccgtatttaaatgccaatcatgtgtgaatcaaaacgtgttagatgggctataagatcaagttgaaagttaaacacgaaatagcatataattgcttatatttgccaaaatgttcaattactttaatcgaatttaatgcagttttataattgttttatagttagcaaagtaattagatgcacaatgttttatttctattttatggtaccaagtctttaatacccatttaatacccagtgtgtaaataaacgtttgttgccgcgtcttcgtcattatcatctgtgctgcatcacgacagttggcgtcctttttcaaaaattaaacacaacgctggccatgccacgcccctcggtcgcccaccgcccccattttccgacaaggctaaaccaaaaaaaaaaaatcatagaaataggaatcaagactcaagagcaaaaagatgaaatgaaaataaaaagaaatgtcatttatcacaatataaaattgtatgctaaataacacggaatgacctgaattagaagcacaaaaacctttatgaacaatcttatgtcaggttaataaatcaaatattttacgatgatgtacatatatactatggtaacttataatttgctattcaaaatatttagaaaatatatttactcttaggcattttatggaagagctaaacctaaaatatgtgccaaggtaaaacaatcaatttaatatcgtatgtattttcatggccaactgcaatcggtcgaaaaaaaatttccaaaaatttccaatcaacatatccatgaaattaaatgtcaagccgaaaaatcgaggtaccccagccggagctccagattatcagttatattttagatcccaaacagtaaacaccgttcagcggagcaaaattttgtacaacttttatttggtcaaaaaaaaaaaaatcgaaagaaaaactgtttctttttcaccactttcccaaattatttgtatttaggatttactcaaccgcaactcacaatatgtcgaattcgttttcgtactggaatggccagccgttgaatgctcccgtttatccgcagatgggtgacttcatgcagcactctgccgctggagcagccgctccaccaccactatcagcaacagcagcagcaccaggattaggatcagccggcggactaggaggttggcctagccagggcgcagctcaggcacactccatgctaccatacgccggaggagccggtggcatgccggctgccatgccgggtgccatgccgggcgtcatgccgggtgccatgtcgggtgccatgccgggtgccatgccgggtgccatgtcgtgtggcatgcccattacaggagcccagcatatagtgccgccacccgtggaccgttcaatatatggagacatacccggacgaaatgaaccgtgcatcgacaatggcgaagccttctgcgcctacaacggcatggacatgagcatgaactacggcggaggcagtgcatccaagggtggcttctggtaggatcgatgccacgaacaatgacagcacgagcatcttcaccgaacgactaaagtgaatcgcatatgggccatatacatacacaattagttttcgaaccaaacgtccgttttgtgcagctcaaacgactcgtacttggcgaaaatgtataaaataaatgtcataaatccataagatatgaaaataatcagttggcacaaatcggtgggtgggttaattgcattaataaatacagagatgagttaacgtgcggcaaattgaatgtgagaagagcgttgtaaactcaaatcgcatatattttatatgctaattactaaataggcaaaatgtgatgtatggcaaaggttactattgttattttcactcggcagtcaaatattgaagttttattttttatacaaataattaaagcacaaatcaagcttacattgtaaatatttcgatttttctatttagtttaaacaaatcaaatttaaataactaggtgcaaaccatttataagattaatagacccaattttccaccgtatgattatcttgagcacttcgtataaatatatgttcttgagattcgcattgtaaagtacaaaaaacaatacaagtttcatcgtttctaactatgcaaatacaacgcctgccgccccttttgtcgtatcacagggcgtggctgattgtcacagtgatgagatggcaatttctcaacacgctaacgagatgcacttacaaaaaaatgggtatgcccattgggaaattattcttaaaaaaagattcgatgatttatactaaaattacatgaatttagcataatcgtaatgttaccaagtcattatatatttattctattgtttggctcgaacttttctctcagtgtactaggctagaactcgtttggagagcgcacgcaaccatcgcagcgatatataaagtggatcttctggccgagattcgagtaatcatcgttgaaatcgcaatcgaaaatcatggaacgctggcagaatcgcgtggccgtcgtcactggcgccagttcgggcatcggatcggccatagccaaggatctggtcctagccggaatgacggtggtgggtctggcccgacgtgtcgatcgcgtcaaggagctgcagagggagctgccggcggagaagcgcggcaaactttttgccctctactgcgacg

SEQ ID NO: 995 - DNA, 811 bp, DROSOPHILA
taaacaccgttcagcggagcaaaattttgtacaacttttatttggtcaaaaaaaaaaaaatcgaaagaaaaactgtttctttttcaccactttcccaaattatttgtatttaggatttactcaaccgcaactcacaatatgtcgaattcgttttcgtactggaatggccagccgttgaatgctcccgtttatccgcagatgggtgacttcatgcagcactctgccgctggagcagccgctccaccaccactatcagcaacagcagcagcaccaggattaggatcagccggcggactaggaggttggcctagccagggcgcagctcaggcacactccatgctaccatacgccggaggagccggtggcatgccggctgccatgccgggtgccatgccgggcgtcatgccgggtgccatgtcgggtgccatgccgggtgccatgccgggtgccatgtcgtgtggcatgcccattacaggagcccagcatatagtgccgccacccgtggaccgttcaatatatggagacatacccggacgaaatgaaccgtgcatcgacaatggcgaagccttctgcgcctacaacggcatggacatgagcatgaactacggcggaggcagtgcatccaagggtggcttctggtaggatcgatgccacgaacaatgacagcacgagcatcttcaccgaacgactaaagtgaatcgcatatgggccatatacatacacaattagttttcgaaccaaacgtccgttttgtgcagctcaaacgactcgtacttggcgaaaatgtataaaataaatgtcataaatccat

SEQ ID NO: 996 - protein, 167 aa, DROSOPHILA
MSNSFSYWNGQPLNAPVYPQMGDFMQHSAAGAAAPPPLSATAAAPGLGSAGGLGGWPSQGAAQAHSMLPYAGGAGGMPAAMPGAMPGVMPGAMSGAMPGAMPGAMSCGMPITGAQHIVPPPVDRSIYGDIPGRNEPCIDNGEAFCAYNGMDMSMNYGGGSASKGGFW

SEQ ID NO: 997 - DNA, 1393 bp, DROSOPHILA
gtagaaaacgggattcgaatcgcaaaaattctgaaaaacattttgcgattcatcaataaagctgaacaatttcggataattaaatattcaaaaaacgtgtttaatttgcataggaaatcaagtgcatctataattttcaaaactcaatgaggcaaaagtcttacaataataatttgtaaagtgtatctaatatttgttctaaaaaccgcagtaaaaagcgtacggcacctagtatttacatggagagaaaaatattaaatttagcatgaggcacatagacctaaagccacttgccactacttttttttttaccagggaccacagcaccgcccccttttgaccacacacaccctactcagatagccaatatacacacacacatacacacacttatttggtgaagcattgttttgaaaactttcgacagttttcagcccgtcacatcggagttggaaagcgaccaaaaacccaaaactcaaaccgaaacatgtgagggtgcaactgacccccatcggtgcattgcatttaattgccatttaaaagggggtcgatggggccagttggtgagcttatgaaatttcatttggcatttgaaattgtcatcgatgttgctgctgcagtttctgtttctgtttctgtttctgtttgcattgggcgaagaggcgaagacacgttttccatttgctcgattgacagaacactatatatggcagaggaacatgaacagatacgaaggccaataaccgatgtatatagccatgtttgtacggtagaaaacactttttagactctctgattatgggccacatatctggtaactaaaatataagagttaccttaataacttatgtatatatatgctacccctgttagcttaaattcttcgatttatagtattaaagccaaaaatcccactcacaacttttgtgtatctttctgtgtatccgttcgagtggcgacgactcatccgtttttcatccatttttttttttttttgccaggaccaagcttctggggcctcatcaatccgcagtggaatatgtgcaacaaaggacgccgccaatcgcccatcgacgtggtgcccgacaagttgctcttcgatccatatttgcggcccctgcacattgacaagcacaagctcgccgggaaagctatagccctggatgaagtgctcggatccgcgaacattctccgtgccataatgtatgtagatctcctcgaactggtagcggtaggccaacggtccaccggatatgttcacgtgctgcttggtgtccttgtccacgcggaagaccagcgactggcccgtgttgtgcagagtgccggaaacctgcaatgcaaatgggatatccaggacatccgggtcaagttaagggtctcgccaggggggggg

SEQ ID NO: 998 - DNA, 797 bp, DROSOPHILA
ggaccaagcttctggggcctcatcaatccgcagtggaatatgtgcaacaaaggacgccgccaatcgcccatcgacgtggtgcccgacaagttgctcttcgatccatatttgcggcccctgcacattgacaagcacaagttgcaggtttccggcactctgcacaacacgggccagtcgctggtcttccgcgtggacaaggacaccaagcagcacgtgaacatatccggtggaccgttggcctaccgctaccagttcgaggagatctacatacattatggcacggagaatgttcgcggatccgagcacttcatccagggctatagctttcccggcgagatccaaatctatggattcaacaaggagctgtaccacaacatgtccgaggcgcagcacaagtcgcagggaatcgttggactctcgttgatggtgcaaattggcgagacgcccaatccggagctacggatcatcacgagcaccttcaacaaggtgttgtatagaggattctccacgcccatccgacacatatccgtgaggtcgctgctgccgaacacggatcactacatcacctatgagggctccacgacgcatccgggctgctgggagagcaccgtctggatcatagttaataagcccatctatatcaccaaacaggaggtgagtttgtgttgtaccaactccgacgactgatgcaaggctccgagagtacacccaaagctccactaggtaataatgcgcgaccagtgcaaagtttacaccatagaaccgtaagaacgaacatagattttaagcgaaacaag

SEQ ID NO: 999 - protein, 103 aa, DROSOPHILA
MSEAQHKSQGIVGLSLMVQIGETPNPELRIITSTFNKVLYRGFSTPIRHISVRSLLPNTDHYITYEGSTTHPGCWESTVWIIVNKPIYITKQEVSLCCTNSDD

SEQ ID NO: 1000 - DNA, 11093 bp, DROSOPHILA
cggccagcagacgccgtctgtcagcggcacagattcaaattgccgcatctgcgggcagtcagcggtccaatttgtgcgagcaaattgcatcccccagcctaattgcctcaaattcgaaggaggctaccgtttcgcctgaagtgccattaatgtaatgaatatctgcagatttagaccgcgaattgcgcataattgtgtgtcaagttggactttcaagaagggttttggcgcagttagccccaatataactatataatactaactatatttacaactatattttgtcagtgaaaataacggaaataactattgtgcacatcattttctgtaatcatttcgtgaagttcaaatctctcatgctaaaaatgaacatggtataaaagtaaactgtagatttagtggtaaaagttaaaaattcagcttaaacttctgggtatctaatagatacatacttagcatagtaccacagggtctagtcggtctgttaaacggctcacttagctaaatctcctgagcattccgatggtggcaaccgatttgtagctgcccgtaggcatgtaactggcccagaaacgtaattgatattttatagcatacttagcggcgcaggggcacgacttctctcccacctgggcatttcctgggggccggactatgctaatttcattcctggccacttgtacggccgcttggagagcgcacacagctggaaaattgatttgtgcaagcggcttacaaggtggcggagacaaagtgtccaattaccaaagtcgatggggccaactctttcccattatctccgactccaggcgctctaggccactgcatttgaacatttgaagagctaaacgaattactcgacgcactttgatttgccattaaaagcagcaaacttttctcaatcaattcttgctagtagacaaaggccagccaaattgattgagtttgaagtctccggttgtcatgataatggagttacactccactgaatgcctgaggaatggtctccatctgccccattcccctgcttattccagccaggcatgttggcacgcatgtctggtgtgtgtgttttctttgccaattacaacacttttcacccatgttttgcacctcctttcttttcgcaggttttcactcccgtgagggtctatttgctcagtgccaaagtgcccaccaaggtgagtcagccatctggaattcttcaatatcataacttcaacgtggtgtatttatttccccaaacagatcgaatgccatttccactacctggacattgtgggcgtcgagagcaagaagtccacccacttctccattgtgaccaacgatcgaccctactcgttcgttaccaccggcgatgcgggcaatttcagctcggtaaggcacaaccacttactggtcattatgcgcactgttctatatgtaattatctccattcaatgatgctcattctgcagaacgctgatgtcattctaaccgacctagcctcggccatcaagcagatattcccaacagttcctctaaagtacatcatcagaaaggtaagcaatgggagtaattaaggatactagtgggttcagtatgctgaacttcattgggttgggaacaggagcatatgctacttaatttatttattagaagatagccaagacaacaactcttttaatattattatttgtgaatagtaatcaatgcagttcttaacttttacaaagattctttttgcaagttgtatgtatgcataaaaagtgtacccatcgctttaacgcactgtccgttgactcacgtctggctttaattaatgtttaattaaatatttagtgagcaattgtgtgtatctgccgttggcacatgtatgtacatatgtacatacgagtatgtggtatgtcacccactgtgtcagcatgccacccccgcccactgttcaattaggctgtaagtgcataaatgtcgtcatctgcgcaagatggggttaataattcaatgcatttgtaatgctcctggccccagtttgtcgtaaattatgcccggcatgtttatgcaaatcgcctgagattcgcccacgaggcacccacgaacgaccatggttccatagcccgcccatcccatagatgttgttgtctagcgacttttatctagcgattcgtctagtagacgaacaattggctggaataattgccgcagggcacgcgacccaggcgtcatcgggttgacgcctggaaatgtagccccatcaaaactcacattcaacaagagtgttaaatgcgagattaagtttaagcagatggcccaaggagaaggggcacagagagaaacagttttcgaggagtttagcaggcagtccgaaactttgcattgttcttcaagttggtcaacttcagcaacacaacaaaggcggacccttgagacctttgaacgccctgctagaactttttaaaccaaattttgcatcaggtcaatgaactggtattttgcgctcctcccctctctttcagattgatatacagccaccggagcgggagaccatattctccgaggaattcagaccctccgatccccgaaatgtgggtccctgtgggggattcagtgcccagtacgcctgcatgtgcgatttccacggcgttccctatcgcgaggaggtggcttgggatgtggacaccatctatctgtcgcacgacacgcgagtcctcaacttgcgcgactttgaccacctggagccaaagtgagttgtcgcaacaaattgttgctgctagctaattgaagtctaatttccttgattattgatttcagagacttgatggccatcgtttcggcgttggaatacaacacgttctttcgtggcctgaaggcagcccacatgcgattgtcccacgagaccctggaacgcatcctgcacgtccttaagcgttcgatgtggctggaagagctgcacctggaggcattgggcttaaggtaaggattggtatatgtcagttggatagcattgataaaaatgtataatttttttttgcagatgggatttcctgaacaagttatcgatatctgtgataacgaatagcaatcccgccattcgcaccatcgatctgagccacaatataattgaggataaaggtgcgtactcgaattccgggatgccaatcaactgccctgcccccggcgacaatggtgccccccaaactgacatcgaattgtaatcgagacccgcctcgtgtaatccaattaatccaattcttgtctacctctctgctatcgtttctcttccccgccgtttccatgttttgtcgtttgtcggtttgccattttgatttgcgatttgtgtaggagcaagttcattgtgcgccctatttggaaagattgtacaaggtttgcagccaccaatagacaccatagcaccacagccatctatctaaacaaaacttagacattgtattgttgttgtgttactgctatattgctcttaccattcttgttgttttccctaagtttgcgaatgattttggcgacatgtgtggccattgttgagccacccaattgatttttgagaccatttctcacattgttattgacgatggccacacagggtttcccagaatacttaatctttctggtcttcaagccttctgctctatgtgaatcaaattgatctattagacaaacaaatctgtaattatttcaattggcaaagaaacatcatgcttttttcattcatcctacaatcgttgtacgtgtgttggtcagcattttgctctgtaactaatagtatattgtttcttccgcggattaggtgccattcatttggctgggcccatagccaaggtatccaagggcctgtgcaaactggctttggcccactgcggactaacttcgaagggcgtcaaccagatgtcgcactcgctgacgcttaatcaaagtatttccaactcgctcacgtatctagatctaagtggtaatagtctcaaagatgatataaccgtaagtagttcggaaagcggaaagcgaaatattcctagatgtcagtaaaatatttcaatttttgcagaatttgcacaatttcctggctcaacccaatgtgctggagcacttggatctggcctcgactgacatcacgctggaaaatgtaagcatttccatttccatagaagtcccagtactcatttttggtctatatgtgtttgcagttgtttggtgctctgttgcgcggctgcgccacgcatttggcccacctgaacgtgtcgcacaactcgttcagcaccaagaagggcaaagagatcccgccctcgttcaagcagttctttaccagcaccttcagtttaaagcacctcaatatcgccggctgcaaacttcccatggaggcattgaagaacctgctgcttggcctggcctgcaacgagtctacagccggactttatctggatctcagcagtaacacgctgggcgcccaaggtgcccatgtgcttgaatcctgcatccatggagtgcgagttctgcaaagcctggacataagcgataacagtaagcgcaaacgaggataaccattgagttcaaaatgtaatttcttgtttcttccgcagatcttgatgctgagctagcgcccgtgctgacagccatttccaagaacccctcgattcggacgcttcacctgacccgcagtttaacgggcatgaagccgaagcacattccgcccgttatggacgccctggtaaacctcatccagaaggacgacttcccgctggtcgagctggtactgtcggagaataaactgaagcacgacctgcacgacttcatcaacgctctgggaagcaatcaaagccttcagaagctggacatcagtggcaactttatgggggatgtgggcgcccgactcttggccaaagctctgcagatcaacaatcggctgcgtaccatatatatggacaagaacggagtaacgttgcagggctatgcggatatcgtttacgcgttagagcacaaccacagcatgcgcaccattccctttcccgttttcgatatcgctccgcatctaaaaagccatcccgataagacagatgcggtgatgcgtaagatgcaggagctgctgcagcgcaactgcaatggtttgaagcgggccaccggacaaggattccggctgcaacacggcttcatgctctcctccacgcaccagctggtggataagttggtggccgagacgcaggacaccatttcgctggccaagggaggcagtgaatccgcctcggcggtgcagcgcctgattaccgacgccgaaaactgcaaacaactgatgccaaagctgcaagaggccgttcgcaacgaaagtcatcccatcgaaatgaagatgacccgagtggccagtgaactgagctacacgattaagagttatctggaggagaccatggagacgatgatgcgcactggcatcgagcagtgtccgaaaacgctgggcaaccagatcgtagttcaggatcttcgaaaggctcttgccgagcgtttggtggtgcccgaggaattcctgcagatctgtctgcttaacaacgccggcagcgagattatgaacaaagttgggtgagtttcgacgaacttaatcaactaatttaagagagtagactaaaaagcaaaatagttaggcgaaaggtgtttttatttaaatgagcgagacaacagttcaagccattatcaaccaactacatatacaaaaagtaagaggtgagataggagagaaatcgaatttttgactaattcgatgcgaatgttgattaggaaaatgcaaaaacaaattttataactatataaatatagggttaacggagattaggaacataagattattaatattttatagctaaacctcgaaaacgagatatgcgaaattcgtgacattaaataaaatatttatttttcggctgaagaattgttagaataagatacacaaataaatatgtatgtactatgagtaatattctcggaaacgtgaacaagctaattcgcaatagaattcgcacatcgcctaaaatgagaggcagcaagaacgcaaaaaaaaaaaaaaaacaaatgactctattttttttcgcatactcgacttcctaaaccagctccatgtggaacgctctgcgcgctcttttcgctccaacgaaagttggaaaatatctgtttgtttacgtattcccatatacacataagtgggagggagagctaccgcttagataagattaaaaacaacagaccccgaaaaccagaaacagctgaatgcattttcactgtggccgggatctcggagccaaacgcttgttgcggatttggccgaaagtctataggtttatctgtgattattgaatcggagcagcgctgctcatcccttcatttagcttccagctgttgggaaaaagtgtcgcgaagaaatgggtctcatgcgcactttgtgctgctgcttcggtgcagggcagagtaatcagtcttcgggcgcaagtccagcttataaggcgtgtccggacgaggagcctttggaggagttggtcacagatccagaaagagcggatcagtctcctaagaagtagattgccgaatgccttctctattgctaactaattttgttcattcttcatgttctcctctgcccacagtgagatcgaacaatccctggccgccgccatctcagaccgtgctacggatgaggtgctggaggccctgacccgctaccgccgtggcatgggcatcgcggaatcgccatcggtgctgctagacgaaccgcagacgccggacatcgtgcgcagtcgctccagtcatgtaagtgctacattcgatacgacctgcgagcgaaccaatcgagtgtgggtggctcttatcagccccaccagctaatgggaaatgtgatgtcatggtcctaagcccctcggctggtttcactttcgcttcgacccacaaaaaaagtgaagcagttggtattttgatcgtcggtgctgctgctttgcctctgcttatcagcgcattcgattacaaatatttcacccactttgaggagttgccgaatcgaagaactatttagagtggacctagactcagactaacgaatatacggtgtgcttctgttccaggatgcggatggtttaatcatacgaccgggtggacgaggctcgatattgcccaaactgggcttggaatcgcccactgtaagtgttgaaaatctgtcgctacccaagtggatgcaatagacgcctccgaaatcagccaaataaaacgaattagtccataaccacatcatatattaaagagtataagcgaacagtagagtaccaagacctataagaagaattcgtatacaccccaccattatccaagcacacgctaccacatacatacatacatacatacatacatacatacatatatgcttagtatattcatgtgtaaaactgaacacttattccatacccaagtagctggacgtagtcgacacatgcaaacacatgaaagaagaaccccacttgcatcacaaacgtcccaacatactatatatacaacgaatctcattaataaattgcttaaatgtgtacaccaaatgctcatgctcattatttttctcgtgtcttcctgccctgatctgatcatcatcatcaccatcaatgtcaaccaaaaccgaaaacgaaaccaaaatcaaaatcaattgtacaaaatcgcaaatactcgtactcgtactcgtacttctaaacatactataattaaaccttgtctccaactcatttacataattgcatttcaaaatccaaaccaacacaaaaaagaaattggaatatctcaaccttgtaagtagtttttgtcttgttcttaagtctatctatcaatctacaaatcttccgaaaggcagtgttttttcaaaacagaaagaatccgaatttcttctggcttcttaggtagttttgttcactgtttttggggaagaattcccttttattatcccaatcctctgtagactgctcgtttctgtagactatctgtcgtaactctttaaacgttttgatttgtagttgttcttgtagagtccctaaaaaaaaaaacctaaaacaatcttcatgatttcacacactcaatgaagcataagcatctcataatatacaaacatccatgcaccagacacatcttaatcctgttcataatctaccacaggccacaccgcatctgcccaccaagcgacgcagtctggcaaagaaagtgcgtccccagtccgtggtggagaatctcagcctgggccacttccctgacctcctggagtcaccctcctcgcaccgatctaactcccagttgtccgcccgtgcagctgcaggtgccgccgccttggtgggagccgccaatatgaccgacagcatcgctgtggacgacggaggagtggatgagtgttgcgactccatcaccgagctgcccagcgcctcgttccagctccagcatctggtcaaaggacgtccgaagcgggccaaaacgcgtgcaccaactcggccgttggtcaccaccgagtgcgccgggggcagcagggaaattggcgaaggtttggaacacttcttccggcccggttctgttacgcccactaccctgactcccctagtttctccaacgtcggaggaatgcagctccttgtcgtttgtggacagtcccacgatgagccgcgatgggaatggacatatgacctccgaggagaccactcccattctggaggaacgccgaccaattaaattggagcgccagtcgccattgctcaaaagtaagagacaaatttcctcttgatatgagaagcagctctaaatgttccaattatttacaaaaaataaaggtgcgtcatgggccacccgctcccggtccacggacaatctagagaagtattcgccactggtgggtcgtaagtccccgctggtcaagatgcgaactgaaggaggtcccggctcgggatctgccaccggtgctgaggagacgtctatgcccagttctaatctgcttaaggcaaccgcccgagaggacaaaacgcgttcgcccagcagcgattcgatcaaaagccatgccgcaggcgagggtagtgttattgtgaagactggcaacggcatcctgcgaacacccatagttctgcagaagccgcgtccgtggtcggttgttggaagcgagccaaaggcaggcggagatcttattacaggcaatgggaatgccgactccagcaagaccacgccggacaaactagaagaaggtgtgtgaagaaattagaagggaatgcgaataatgaagttaatttttctctttccgctcagatgatgtcgagatagtgacatttggaaatacctgcagtggctcaattgttggcatcacgccgggcatagctttatccaccagtggcggtggaagcattgtgggcattacaccaggtaggtcatttcaaaatgtttgcatatatgtacatatatcaattattttcgctttctttctctcaggaggtgcccttgaaaagaagtctgtgcgagaactagcagcgggtctaaacagaatgggtaagttgttcactatgcatgcgcacgagtagtagcttgaaaatgcctgcctagcacttagcttctctgttagtagaagtgatgcaacctcttttgacctcctttgttttgtatcttatttattttcatattttgatttgttgtactcgttcgttacccgtaaagaactccccctaaagccgcccgttatgccaagaaccctgctgaacgcgactagtgtccgcacaagcacgtcctccacaggctccacctccaatagtgtatcagtcagctcatccacgaacgccaacacatcgatgacagtattaaaccagagccagacacgatcacggatcgtaagctcgaccagcagcactgacagcaccgagaccatcacagagcgcagcaccaccagcactagcagcagttcatccagcagctacgagaagcagcatgccaaggcctgtgccaatttaatcagcaacgaaatcctcagtatgcgcaacggacagttgggcgccaagtctggaagctgcgcagaaagtggtggtgtgaagcggatagccggcaaggagatctccacgctattcgaggtttgatctccgaggccggagctgcaatgcgataacttttattcatcagcgatcaaaattggctggctacttcgcttggttgatttcggtgctcatcctgtgcgtctaacattcgcatttgctgcatagtgtgtattccttaagttgtgtcgtattagccagtatgccgcattttgcctgtaatttcatctagtttgtgtttgcctgtttagctcctatttaatcgagccgtctaatagaatcactcttccacttacccacaggagacattagttgaagaactgcagcagagcatggcgaccagacgcggttttagagactcgacctacaccaaggaggatgtcgttgatttataagtgttctagttatatgctcaacattccctcacgtcgatccctagtccttcacccaacctgccacagtttcacgtgatagatagtagggttgatgataacgttaagtgatgatactgatgataaggaggaaatgagatgaaatggtgaagacagaaggatagagggaaacaaggttgcaacttatcgtactgaaccattaatttatgtgcaatgccgcgtgtgtgttgttttcatttggcaatttagaatgaacgtgatttatttattgatacaaaccctgatacttttatccaaattaacctttgcatatttttaaaaatgttttgtgtactatattttatatttttatgtatttaaatcagttaagtgccaattatatacagaattaatctacaaatatttttagcgtgtgctctacatcaatttcaatgaaactaacgaaaataacgcaatgaatatgatacactatacatattatgtaattcgattgagtgtataagaactattttaatgggctaaacctaaaaaaatctaaatgaaatataatattttttataactgcttccaaatacaaactttatggtttattatttccccttttctgtttacctcccctatacacatacttatagtatttatagtatttaagc

SEQ ID NO: 1001 - DNA, 4110 bp, DROSOPHILA
atggtctccatctgccccattcccctgcttattccagccaggcatgttttcactcccgtgagggtctatttgctcagtgccaaagtgcccaccaagatcgaatgccatttccactacctggacattgtgggcgtcgagagcaagaagtccacccacttctccattgtgaccaacgatcgaccctactcgttcgttaccaccggcgatgcgggcaatttcagctcgaacgctgatgtcattctaaccgacctagcctcggccatcaagcagatattcccaacagttcctctaaagtacatcatcagaaagattgatatacagccaccggagcgggagaccatattctccgaggaattcagaccctccgatccccgaaatgtgggtccctgtgggggattcagtgcccagtacgcctgcatgtgcgatttccacggcgttccctatcgcgaggaggtggcttgggatgtggacaccatctatctgtcgcacgacacgcgagtcctcaacttgcgcgactttgaccacctggagccaaaagacttgatggccatcgtttcggcgttggaatacaacacgttctttcgtggcctgaaggcagcccacatgcgattgtcccacgagaccctggaacgcatcctgcacgtccttaagcgttcgatgtggctggaagagctgcacctggaggcattgggcttaagatgggatttcctgaacaagttatcgatatctgtgataacgaatagcaatcccgccattcgcaccatcgatctgagccacaatataattgaggataaaggtgccattcatttggctgggcccatagccaaggtatccaagggcctgtgcaaactggctttggcccactgcggactaacttcgaagggcgtcaaccagatgtcgcactcgctgacgcttaatcaaagtatttccaactcgctcacgtatctagatctaagtggtaatagtctcaaagatgatataaccaatttgcacaatttcctggctcaacccaatgtgctggagcacttggatctggcctcgactgacatcacgctggaaaatttgtttggtgctctgttgcgcggctgcgccacgcatttggcccacctgaacgtgtcgcacaactcgttcagcaccaagaagggcaaagagatcccgccctcgttcaagcagttctttaccagcaccttcagtttaaagcacctcaatatcgccggctgcaaacttcccatggaggcattgaagaacctgctgcttggcctggcctgcaacgagtctacagccggactttatctggatctcagcagtaacacgctgggcgcccaaggtgcccatgtgcttgaatcctgcatccatggagtgcgagttctgcaaagcctggacataagcgataacaatcttgatgctgagctagcgcccgtgctgacagccatttccaagaacccctcgattcggacgcttcacctgacccgcagtttaacgggcatgaagccgaagcacattccgcccgttatggacgccctggtaaacctcatccagaaggacgacttcccgctggtcgagctggtactgtcggagaataaactgaagcacgacctgcacgacttcatcaacgctctgggaagcaatcaaagccttcagaagctggacatcagtggcaactttatgggggatgtgggcgcccgactcttggccaaagctctgcagatcaacaatcggctgcgtaccatatatatggacaagaacggagtaacgttgcagggctatgcggatatcgtttacgcgttagagcacaaccacagcatgcgcaccattccctttcccgttttcgatatcgctccgcatctaaaaagccatcccgataagacagatgcggtgatgcgtaagatgcaggagctgctgcagcgcaactgcaatggtttgaagcgggccaccggacaaggattccggctgcaacacggcttcatgctctcctccacgcaccagctggtggataagttggtggccgagacgcaggacaccatttcgctggccaagggaggcagtgaatccgcctcggcggtgcagcgcctgattaccgacgccgaaaactgcaaacaactgatgccaaagctgcaagaggccgttcgcaacgaaagtcatcccatcgaaatgaagatgacccgagtggccagtgaactgagctacacgattaagagttatctggaggagaccatggagacgatgatgcgcactggcatcgagcagtgtccgaaaacgctgggcaaccagatcgtagttcaggatcttcgaaaggctcttgccgagcgtttggtggtgcccgaggaattcctgcagatctgtctgcttaacaacgccggcagcgagattatgaacaaagttggtgagatcgaacaatccctggccgccgccatctcagaccgtgctacggatgaggtgctggaggccctgacccgctaccgccgtggcatgggcatcgcggaatcgccatcggtgctgctagacgaaccgcagacgccggacatcgtgcgcagtgatgcggatggtttaatcatacgaccgggtggacgaggctcgatattgcccaaactgggcttggaatcgcccactgccacaccgcatctgcccaccaagcgacgcagtctggcaaagaaagtgcgtccccagtccgtggtggagaatctcagcctgggccacttccctgacctcctggagtcaccctcctcgcaccgatctaactcccagttgtccgcccgtgcagctgcaggtgccgccgccttggtgggagccgccaatatgaccgacagcatcgctgtggacgacggaggagtggatgagtgttgcgactccatcaccgagctgcccagcgcctcgttccagctccagcatctggtcaaaggacgtccgaagcgggccaaaacgcgtgcaccaactcggccgttggtcaccaccgagtgcgccgggggcagcagggaaattggcgaaggtttggaacacttcttccggcccggttctgttacgcccactaccctgactcccctagtttctccaacgtcggaggaatgcagctccttgtcgtttgtggacagtcccacgatgagccgcgatgggaatggacatatgacctccgaggagaccactcccattctggaggaacgccgaccaattaaattggagcgccagtcgccattgctcaaaagtgcgtcatgggccacccgctcccggtccacggacaatctagagaagtattcgccactggtgggtcgtaagtccccgctggtcaagatgcgaactgaaggaggtcccggctcgggatctgccaccggtgctgaggagacgtctatgcccagttctaatctgcttaaggcaaccgcccgagaggacaaaacgcgttcgcccagcagcgattcgatcaaaagccatgccgcaggcgagggtagtgttattgtgaagactggcaacggcatcctgcgaacacccatagttctgcagaagccgcgtccgtggtcggttgttggaagcgagccaaaggcaggcggagatcttattacaggcaatgggaatgccgactccagcaagaccacgccggacaaactagaagaagatgatgtcgagatagtgacatttggaaatacctgcagtggctcaattgttggcatcacgccgggcatagctttatccaccagtggcggtggaagcattgtgggcattacaccaggaggtgcccttgaaaagaagtctgtgcgagaactagcagcgggtctaaacagaatgggctccacctccaatagtgtatcagtcagctcatccacgaacgccaacacatcgatgacagtattaaaccagagccagacacgatcacggatcgtaagctcgaccagcagcactgacagcaccgagaccatcacagagcgcagcaccaccagcactagcagcagttcatccagcagctacgagaagcagcatgccaaggcctgtgccaatttaatcagcaacgaaatcctcagtatgcgcaacggacagttgggcgccaagtctggaagctgcgcagaaagtggtggtgtgaagcggatagccggcaaggagatctccacgctattcgaggtttga

SEQ ID NO: 1002 - protein, 1369 aa, DROSOPHILA
MVSICPIPLLIPARHVFTPVRVYLLSAKVPTKIECHFHYLDIVGVESKKSTHFSIVTNDRPYSFVTTGDAGNFSSNADVILTDLASAIKQIFPTVPLKYIIRKIDIQPPERETIFSEEFRPSDPRNVGPCGGFSAQYACMCDFHGVPYREEVAWDVDTIYLSHDTRVLNLRDFDHLEPKDLMAIVSALEYNTFFRGLKAAHMRLSHETLERILHVLKRSMWLEELHLEALGLRWDFLNKLSISVITNSNPAIRTIDLSHNIIEDKGAIHLAGPIAKVSKGLCKLALAHCGLTSKGVNQMSHSLTLNQSISNSLTYLDLSGNSLKDDITNLHNFLAQPNVLEHLDLASTDITLENLFGALLRGCATHLAHLNVSHNSFSTKKGKEIPPSFKQFFTSTFSLKHLNIAGCKLPMEALKNLLLGLACNESTAGLYLDLSSNTLGAQGAHVLESCIHGVRVLQSLDISDNNLDAELAPVLTAISKNPSIRTLHLTRSLTGMKPKHIPPVMDALVNLIQKDDFPLVELVLSENKLKHDLHDFINALGSNQSLQKLDISGNFMGDVGARLLAKALQINNRLRTIYMDKNGVTLQGYADIVYALEHNHSMRTIPFPVFDIAPHLKSHPDKTDAVMRKMQELLQRNCNGLKRATGQGFRLQHGFMLSSTHQLVDKLVAETQDTISLAKGGSESASAVQRLITDAENCKQLMPKLQEAVRNESHPIEMKMTRVASELSYTIKSYLEETMETMMRTGIEQCPKTLGNQIVVQDLRKALAERLVVPEEFLQICLLNNAGSEIMNKVGEIEQSLAAAISDRATDEVLEALTRYRRGMGIAESPSVLLDEPQTPDIVRSDADGLIIRPGGRGSILPKLGLESPTATPHLPTKRRSLAKKVRPQSVVENLSLGHFPDLLESPSSHRSNSQLSARAAAGAAALVGAANMTDSIAVDDGGVDECCDSITELPSASFQLQHLVKGRPKRAKTRAPTRPLVTTECAGGSREIGEGLEHFFRPGSVTPTTLTPLVSPTSEECSSLSFVDSPTMSRDGNGHMTSEETTPILEERRPIKLERQSPLLKSASWATRSRSTDNLEKYSPLVGRKSPLVKMRTEGGPGSGSATGAEETSMPSSNLLKATAREDKTRSPSSDSIKSHAAGEGSVIVKTGNGILRTPIVLQKPRPWSVVGSEPKAGGDLITGNGNADSSKTTPDKLEEDDVEIVTFGNTCSGSIVGITPGIALSTSGGGSIVGITPGGALEKKSVRELAAGLNRMGSTSNSVSVSSSTNANTSMTVLNQSQTRSRIVSSTSSTDSTETITERSTTSTSSSSSSSYEKQHAKACANLISNEILSMRNGQLGAKSGSCAESGGVKRIAGKEISTLFEV

SEQ ID NO: 1003 - DNA, 10057 bp, DROSOPHILA
tgagtagctaaaactacggccgaactgttggaaatacggcaaatcgctatggcaatacgaaaatcgattatctcttatctacacagttgggtcagcgtgcatggcggggccgtaccctttgtgcgcagcaggaaaatctaaaaatctaatagacctagtattcttaagaccacacagcaagtaaccaatatcaagcgatctgaatgcgtccgctaaacgctgcccagcaggttttgtggttcgcgtctggcgcaacacaacaggtttaagttagtacgttttttttacaacaacaattcagttacaaatttcatatacaaattctgcaaacttttagtttcaatttaaatataatttttcaaaatactattcaagattgtattttaatggtcaacattttcgattgtgaaaaatatagaggttgatttactaaagttacaagtgcgtcgagaagacctgccagttgcaattccaaaaagctggatttactttatctcgtccctataactgattaaataggaccaataccttaatgatttctatagattcccaaccgttgtgaattctctggagaccaaggttcagcaagtaaaagaactgggaggatctcggtatggttcttaataagagtaatttcaaaccaaattactatttggataaactgaaagactcacctggccactctagcaatatctgcatctgttagcaaaaaaaggggtctttaaattttaataccgctatttcttatgtcacaattggtcggacgaatttgattgaattaagatttggctggcttaatatttctaaagactgattatagaaaaaagacatagaaattatttcgcattaaaccgattatgaataaaaatatttcttgtcttacttatcttaaatctaaaatgccggctaacagagcgttgcgcggactaacagtgctgttaactgtcagctgccataacccaccacgaaaatagcaaatccaccacaacgcgagttccaatcggaccgagagttaaatgttttccgattttcaaacagcgaacttgtgcgtgcgttaaaattaaactcgttcagcatttaaatcgtgtgagatctttgccttttaacggtaatttaccaaagcgagcgattcgtattaaatgtgaatgttccccatgcagaagaaagcgagcttgtttttcttctctattttctgtattgcaattgtttttttggctgactttggctgggtctgtgtgtgtatacttgtgcgcaatgcgtgggtattttctcagttttttgttctattttcaaattttattgctctcgcataatggtatacatatgtacatcattatgtttgaccgttatttcgaatctccaacaccgcgagttttttgtgacggcatttcccactcacgatttgtaagcaatctctatacatttgtatgtacatatgtatgtggataggcatgtttgtacaactgcacttacaacccgctaatcaggtgcaatgcacatacattcatcgattccgactcggaatcccaatcggaatccgaatgggtgggtactggcttttcttgttgcttcctttacgggccacagccttttatcgatttaataacaaacgaacgtcagcgagtcgttggactctgcaaaaaccggcactcgcacttggcggcgatgtctggccaggattagagatgggagctttcagatggcaacggaatagatgttattgacgtacttaccaaagcttacatatgtatgtgcagatatgtttgatttccaggttcatttagctgactggcgataagtgttgcacgcgtatcaatattcataccccctggtggtggtggtggatctacagaaccaggctatgcccatctgggggatgggcccatggctgataagatatgtcgcgattttatagcgcccataaaagccgcagcaagcccacaaaacaagtgaaacctgccgattgtgctatcaggggattaaactcacaaaatgaaaaatcagtccatactacattgtaaatatcgttgaagctcttatttgcaaattaaaacacattactccttggctttaaagacacaatctaaatggagtaacaaattgaaattatacttatgtattttccttaccaacaactcgctagtttgatgaccttaactgaccgcaattaatagtatttttatttatcatcaagctggcctgggagtcccgttagagtgcttaattggcacagcaagtgccagtgaggcaactgcatttttcaaattaaagagaactagcgacccacaaaattcgtacagcgaatgagcttagcacattttccccgcattaatgcggctgcattaattgcattatgtacctgcgagcccacttgtgtgcattatgtatgtttaaacacactccttccgcgtatttacatatatgtgtgtacatacatacgtatgcatgtagccatgctaaaagatagtctagatctagatcagtgcagccaagcagatggggtttttgtgctcggatgtgcgccgccaaaaggggaaagtgctcacttatccaatcccactgccgagctaccagtcgcaattgaactaatgaaatgtagccatcctccaacacgtcatgcagcccgataatcattaccacaactcagtttgcagacacacacacttgcggtagaagcagtagtttctaaatcaaatttaatatgctgcagctaaagtacattcagaaaaaatctagtttggacttcgttcgctgtataattttagttattcgaccaaaatgaaaattgaaactgaagcaatgaaaaagatcatacaaaatcatcatcaataaataaaaagatattttatttagcaaagttctttataataagatcaaactaatatatattatccaaaatacaataaacctgatgttgttactgattatgtaatctgcacacaccgtcaatgaagtccctctgcccatacttgttttttagaagccaatagtcgtaagacaaatcactttaacccacatgcatacttcatcgcacccgtggggttctggcccattgaccgcaagtgtaagaaacaagtcacggggtggtaccacaacaaacctttaccgcaccgcacttttcctggcttgctctcttttcccagttcgccaaagtgcccgtgtggcacaattcgaacttggcgtcaatgccgttctgtagccaccgcactggtgccacatccgatccaatgtggaagagtgtgtgacgagggcgcagtacgtcacttcgccacatcgcaactcggcaccaacatcaacagcaagtacgcaatacataatgcttgagaggaagaccggccaagtacggggtcaatgcccgctggcctggttggctggttgactgctgactgggttggctgggctaaaactgcagcgccgacgtcggaagatggcccttgtaacggcttaggcgcaacattaatattccgcctgttgtgcagttaccgcaccacgtcgcattgggttccgtgtctgccggcggaacaaaacggtcttcgagtgggggaaccaatctgctgaaaagacaaacgagctgcaatgacatttgtgtcgctgcactgtgggtcacagcatcgtcaaccctttcgaacgaacccaaaacaccccgcagcacaaatgcttaccgattacgattacgagtgcgtgcactcgaacccaatgaacactgtagctatattgtcatttctcagctcttgtaggagtattaccaacgtaaaagctgagcttaaacaaaacttagttgctaactaacctattgcaatcatctcaattgtgcggtttctcgttcacttgaattcaacttccatcttaataataagatattatgtaccgcatcgaactgataattcttcgagtgcatgtgcttgagttcagtttgcgccgcttaatgcgcggcacgtgtctcgagcctgtcctggagcgatgccccctatgatgagtcataggccacagccaccacctaaggcccaacaaccccaagcgagtgtatggatggaaacaccagctcgcgtgtctgtgtgtgggaaatggggaaaccctcaccagtctagtccaacattcagattcacttacggaacccattcgattacagactattgccatgtcgaccagcccgaaaccggttaagaaggtgccgattcacttgcagagtgcccagaatcgcgtctacatcaagaatggtaagctcattattcgaccccgtggggaaataaaccgagttaaaacactgattccattgcaggcgagatcgtcaaccatgacaagtccttcaaagcggacgtgtacatcgaagatggaattatcaagtaagtatttcggaaattacacactttaatttctctagtccaagtccaagctacatgtgaagtgttaagtaaagctgcagattctgcttcgacttagcgagaaagacaaatctagaccaagaatagacaaagaatagacatagagcgttggcatgactcacggaaattttactcaaccaccctatcctattgccaggtttgtgggtccctcctcggaaataacgatacctggcggagtgcgcaccatcgacgccagcggactgatgatcattcccggaggcatcgatccccacacccacatgcagttgcctttcggcggagccgtggccgtcgacgatttctaccatggaaccaaggccgccgtggcaggtggcaccaccatgatcagtaagcaggattatcaaagcgtttgaaatgtactcatttattcctgtccacttccctagtcgacttcgttctgcccaacaaacatgagtcgatgatcgaggcctacgacaagtggcgcagctgggccgatcctaaggtgagaagtgtagggtgtatattgttttaaacacaagcaaatccaagtatcagggagtagtaagttagtaagcaactaggaaattctctatctagctttgttactcatttatgctagctaaacatacatatagctctataccatataaaatatcaagattaaagctcttgctacggatatggtttgttgaatcacgagcaatctatgagtacatacattttggcatgtaatcaatataaatatttatttaggtatgctgcgactacggattgcatgtgggcatcacctggtggtcgaagtcggtgtctgaggagatcggcattctgtgcaaagagcttggagtgaactccttcaaaacattcatggcctacaaaggactttatcaggtaagtctgctataatggaacgcatctgcttcataattaatggtcttactcccattttagttgaatgactcagaccttctggatgtgttcgagcgtatcaggcacctaaatggggttgctatggtaaagctacttggaccattactaatctaacttaaagcaagactagcaaaagaaatcataggaatttcctgtttaataggatacatccatcaggccaagtcctttctaaaattctattgaaatatattgtaaacaaatttgaaaagatgtacattggaaaaaagttcctgataggttcgattattgtactgatgcactttttgtgtgaagctagcttcttgcactttttacaaccatccacatgcatccatttgtagtacaactttattcgcttccacaggtccacgcggagaatggcgacatcattgcaaagaacacgcagcgccttttggccgagggcatcaatggtccggagggtcacgagctgtcgcggcccgaggaggtcgaggccgaggcggtgcaccgcgcctgcgtcctggcccaccaggtaagaccactcccatgtcgccagacagtgggggatggatgggaagagggaggaaggaggaggcggagtgtgtccatgccggttgagtgccattgtgcactgtgccgcgcactgtaatcatggtttatttatttatgtatgttatttatgattttgatttcctattatttccattgtgtatgatgcaccctgtacatattatgcggtatgcggcactcgatataaccccacgaaaaaaacataacctaggccgattgtcccctgtacgtggtccacgtgatgagcaagtcggcgggcattgagctggccagggcacgccaccgctaccgcgggcgatacataatgggcgagaccctggccgcggccctgggcacggatgccacctgttgccagcacttgggcttcgacgccgaggctgcgcatgtgctcagcccgcccttgcggcccgacaagacgacccccgagttcttgatgaagctgctggcgaagtaagttctgcctgttgcctgggttcacattccgggccgggaccgtaaatgtcagagggaaccattgttccgcaaattattcgagaatgttggaaggcacattcttgtatgttagttgatcgtcgcagaaagctacaggagtatttaaaatatatttatttatttttcaagtatggcaagaaataatttaaatttcataaataatgatttttaactggtagcatagaaatgctggctttataaatggacattggatcggattggcattaccatttcgcccatattatattacatttaaaattataatcataaaaatattatgatttaaaattatatgttgatatctaaggtttaaagcaatctaaacaattttttcatgtaaactgagtaggtaattaataatatgattttaaatgtataaaatgattacggtctctggtcctggaataacttgtccttgttgatactggttactctgaatactaaccaggtcattgcttttgcctgcctcaatcgtatccactaactttctaactgcgcttgttctcgaaactaacccattgatccaacgacgtttccatgtttgccattgcttcactcacacgcccacccacacgtccagatgaagacgccgctcttcgtgtccggcctcaccagcaaatcctccgccgagctcgtgggtcgcgcccgtcgcagtggctactgcgtgttcggggagacgctggccagctcactgggccgctccatgagcgccgtgcccaagggcgaccgcatctacgccatcaccagtcccccgatccgcgaatccgccgagacacccaggcagctgatgaagtccctggcttagtaagtatcgccttgttttagtggaatcgaagaccccgtactttggccgatgccaaatattagtaaagaatgctaaaatgcataggttttaaacgaggtttgcttaaaacaaatctaaagaattagaataaagaatactatttttataaatatatcagacgcacaataagttcatagattccaattgaccaggataccagaagtaagtatccacgattcagaacacgatcgctgcattccccaccctgccggtgattgtttgtttcgttactcttaactgaccatctaaaaaggttaccatgattccatcattgatccacattttgtccacagtgacgatttgcagctgactggcagcgacaattgcaccttcaacaaggagcacaaggcgctcggaaagggtgactttaccaagattcccaatggcgtcaacggagtcgaggatcgcatgtcgctggtctgggagaagggcgtgcacgctgggcttctggatccctgccgctttgtggccgtgaccagtacaaatgcagccaagatattcaacatctacccccagaagggacgcattggtaagtcagttggaggcaaccgacttgcactcagtgttttaagcgacctgttcttttttaccttgtagccgtcggctcggatgcggacattgtgatctggaatccgaatgccacccgtaccatttctaaggatacccaccaccatgcctgtgacttcaacatattcgagggcatgactgtgcacggcgtctgcgaattcgtcctggtgcgcggacggatctgcgccgagcgcgggaatgtgcgggtagcggagggctttggacgtttcattcccacaccagttcgtccgccgttcgtatacgacatcatcgagggcaaggtgcagtcgcagccggaggagcagcacgaggagaagcagaacggcagcatggccaagcggttcgctgagctggacatacagattccggtgcaggagcccatcagcgccatgctggctggcaacctagccatgccggcggagggatctctgtgcagcacgccctcggttcgtggtcgcgtcgatggaaaacgcgacttgcaggagtcttccttctccataagtggtacgttgactataatcaattatttcatagttgaaatctatcattcattgtttcaaaatctcttcagaggagctcgacaggtctggtgttcgagcgtgcatcaaagtgaagaacccacctggcggaaagtcttctggattctggtagatcacagacccgatgtcgcatcgcaagtcgtgtggatgcggaatcgcacaatctccgacgacagtgtaagccaaagtctgcgctcattcgacaactaaactggcatttaatatagatccctgaaacaaaatcgtaatctaatcaaatttcaaataagtacataagagcataaccacaaaccaattaagaaggtatcatagactctgcttcgtcattttgtatttagaaccgattgcctcttgttgatacaatttttgttaagatcatcaattgaatgaaatgcatcaaagcatttgaagtcgaaaatcaaacattatggctgcttaggtatttttcgctgaaatcgtttattttaatactttgtttatttacaaggagatttagcacaatttaactctgttaaattcatgacactattgcaattgtttattgattacccgattcgaagtagagcacatcgatcatgccacgtgagacaaagagtgcttgggagcaaattcggcatttaatctgaggatgtctaaaagtaatacttcaatcgattttttgataagaaaaaagtataaatgtggaaaactatttattataaatatacatactttatatacatataatatttaacaacaaaagccgaacacaaagatcaaactaataaactttaccaaaagatagaattgcatctttttatttccaatcgaaagccaatagggaaaactcatgaatatatattccggttttatgaactgaaataaacgaataacagcaagaaagacgacatgaactagttattgatcgcttttatttatatagatatttacaaatcgatttagcacaatttccagatgtatatatactgttatcaatcgtgttgcaaaaaggtatgactggcgcacgatgcgaaatcaagtgcctaatagatgaactgcattagctaaattgcccttccagttattcgtatgaatacataattacaattgttcaattacaattcgttcaagaaaaatatttgaccgccttatttggtgcaagccaatttgtcgtggctataaatcaatcatttttcgcagatgtgttttaatttaaatgtttaaattatcagaggtaaaatacgaattgggtttgccttcgcttaactacttacaattggttagtgcgctcatccgacacaattataatattatcattacaggtgtcgtataaattaacaatctaatgaactagtcttgatataaataaaaagttttgcagtgctttgggtaaccgaaaaatgggtggtgaacctgcttttgcgtattatttaaaaatattcacttctaccttttttgcttacgttctaaaaatcattcgtaatcatgtgacctaaaattgacttaacaactaaattccattagataatgacagtttatgagtttttcttttattttcccatagttttgcgttggttgctggtgattattgttggtttcatctgatggtagattgtaggaatgcatgcgagcgcaaattctattgatcttcctattcaacgctgaaagtagatagcatgattattattactttactttattgcatctagcgattgtgggattggacttactgtctgatactatgcgatcgcttgctcgcttacagtttctttaaataggcggcacacttaaccgca

SEQ ID NO: 1004 - DNA, 2789 bp, DROSOPHILA
tcggaccgagagttaaatgttttccgattttcaaacagcgaacttgtgcgtgcgttaaaattaaactcgttcagcatttaaatcgtgtgagatctttgccttttaacgactattgccatgtcgaccagcccgaaaccggttaagaaggtgccgattcacttgcagagtgcccagaatcgcgtctacatcaagaatggcgagatcgtcaaccatgacaagtccttcaaagcggacgtgtacatcgaagatggaattatcaagtttgtgggtccctcctcggaaataacgatacctggcggagtgcgcaccatcgacgccagcggactgatgatcattcccggaggcatcgatccccacacccacatgcagttgcctttcggcggagccgtggccgtcgacgatttctaccatggaaccaaggccgccgtggcaggtggcaccaccatgatcatcgacttcgttctgcccaacaaacatgagtcgatgatcgaggcctacgacaagtggcgcagctgggccgatcctaaggtatgctgcgactacggattgcatgtgggcatcacctggtggtcgaagtcggtgtctgaggagatcggcattctgtgcaaagagcttggagtgaactccttcaaaacattcatggcctacaaaggactttatcagttgaatgactcagaccttctggatgtgttcgagcgtatcaggcacctaaatggggttgctatggtccacgcggagaatggcgacatcattgcaaagaacacgcagcgccttttggccgagggcatcaatggtccggagggtcacgagctgtcgcggcccgaggaggtcgaggccgaggcggtgcaccgcgcctgcgtcctggcccaccaggccgattgtcccctgtacgtggtccacgtgatgagcaagtcggcgggcattgagctggccagggcacgccaccgctaccgcgggcgatacataatgggcgagaccctggccgcggccctgggcacggatgccacctgttgccagcacttgggcttcgacgccgaggctgcgcatgtgctcagcccgcccttgcggcccgacaagacgacccccgagttcttgatgaagctgctggcgaaatgaagacgccgctcttcgtgtccggcctcaccagcaaatcctccgccgagctcgtgggtcgcgcccgtcgcagtggctactgcgtgttcggggagacgctggccagctcactgggccgctccatgagcgccgtgcccaagggcgaccgcatctacgccatcaccagtcccccgatccgcgaatccgccgagacacccaggcagctgatgaagtccctggcttatgacgatttgcagctgactggcagcgacaattgcaccttcaacaaggagcacaaggcgctcggaaagggtgactttaccaagattcccaatggcgtcaacggagtcgaggatcgcatgtcgctggtctgggagaagggcgtgcacgctgggcttctggatccctgccgctttgtggccgtgaccagtacaaatgcagccaagatattcaacatctacccccagaagggacgcattgccgtcggctcggatgcggacattgtgatctggaatccgaatgccacccgtaccatttctaaggatacccaccaccatgcctgtgacttcaacatattcgagggcatgactgtgcacggcgtctgcgaattcgtcctggtgcgcggacggatctgcgccgagcgcgggaatgtgcgggtagcggagggctttggacgtttcattcccacaccagttcgtccgccgttcgtatacgacatcatcgagggcaaggtgcagtcgcagccggaggagcagcacgaggagaagcagaacggcagcatggccaagcggttcgctgagctggacatacagattccggtgcaggagcccatcagcgccatgctggctggcaacctagccatgccggcggagggatctctgtgcagcacgccctcggttcgtggtcgcgtcgatggaaaacgcgacttgcaggagtcttccttctccataagtgaggagctcgacaggtctggtgttcgagcgtgcatcaaagtgaagaacccacctggcggaaagtcttctggattctggtagatcacagacccgatgtcgcatcgcaagtcgtgtggatgcggaatcgcacaatctccgacgacagtgtaagccaaagtctgcgctcattcgacaactaaactggcatttaatatagatccctgaaacaaaatcgtaatctaatcaaatttcaaataagtacataagagcataaccacaaaccaattaagaaggtatcatagactctgcttcgtcattttgtatttagaaccgattgcctcttgttgatacaatttttgttaagatcatcaattgaatgaaatgcatcaaagcatttgaagtcgaaaatcaaacattatggctgcttaggtatttttcgctgaaatcgtttattttaatactttgtttatttacaaggagatttagcacaatttaactctgttaaattcatgacactattgcaattgtttattgattacccgattcgaagtagagcacatcgatcatgccacgtgagacaaagagtgcttgggagcaaattcggcatttaatctgaggatgtctaaaagtaatacttcaatcgattttttgataagaaaaaagtataaatgtggaaaactatttattataaatatacatactttatatacatataatatttaacaacaaaagccgaacacaaagatcaaactaataaactttacc

SEQ ID NO: 1005 - protein, 332 aa, DROSOPHILA
MSTSPKPVKKVPIHLQSAQNRVYIKNGEIVNHDKSFKADVYIEDGIIKFVGPSSEITIPGGVRTIDASGLMIIPGGIDPHTHMQLPFGGAVAVDDFYHGTKAAVAGGTTMIIDFVLPNKHESMIEAYDKWRSWADPKVCCDYGLHVGITWWSKSVSEEIGILCKELGVNSFKTFMAYKGLYQLNDSDLLDVFERIRHLNGVAMVHAENGDIIAKNTQRLLAEGINGPEGHELSRPEEVEAEAVHRACVLAHQADCPLYVVHVMSKSAGIELARARHRYRGRYIMGETLAAALGTDATCCQHLGFDAEAAHVLSPPLRPDKTTPEFLMKLLAK

SEQ ID NO: 1006 - DNA, 7478 bp, DROSOPHILA
tactgtactggattaaccagattgcaatccctgctgctggtttttatttttctggacttctttcagcttcactcttaattatgcaaaagttgttctcttggtttggctttctgggttctttggttgcatataaataaatgtaaatgcgggtcaatgaactttgcagattatcatatgataaccaaatgtagattgggtccgcatagagaaagtataatctaatatatgtttttgatcaggtaagtatcaataaatagttctgatcaataaaagttcattgaattcattgttttagtgttttaattaaatacaggaaatacaggaagaaaacgtgaaaataaattcccgaatcgaaagacaataaaactgcccgcttgaaattgaattaaatacaattgttaacttgttgtgatttctcaaaaaatttcaaacacgtgctgctgtgacattgacccatcaattgatcccttcgagttaactgggagtaagtacagcagcggtcaagaaactagcttccagaacattgaataatttcaaagtcaataaagcaagtaaaagtgctttgaagtgctaatacatgtgaaaggtattttaaaggtaattataatttaatacaatgagttcaaaaaacttcttaatatgcacattgataatttctttctaattgataatttctttctaattgataatttctttctaatttataatttcttcctggatttgcggacttttgtcttaacagaggacagttttaatataaaaaatattcactaagaagacgtaatggaattatttttgacaacacattatttatggtgcacagttcagcacttaaacttgttttttcttggctttgggtatatgtatgtacatatattcttttggtttgtgttcttaacacacttgtgtcactctattccttttttcggcacttgtttcgagtgcgtagttgtacttgtctcgtgatttcggggtcaaatctggcgttcttttcttttttttttttttttgcgattcaattccgttcaagctgcactctcgaggtgcttgacacacaaagattgttgggaccaaccgttgccagagcctcagtcacagccacagaaaagcgaaaaaaacacacgcaggagtgcgacctgttcgacggtcgacgcgaatctaaagtttactgagcacggcgcttttatcttatacgatagcccgtggttacaccgctcacccatacagatggaaaagccgaaagccgagaaatggagagccagtgaaacgtcgacggcttagagattgaaacgctgctttgcgtcggcgcagagaatcgcagattcagtatgctagttctatcgtagagcatgcaatgtagttgaacagccaagcaaaggaggtaaaaaaaacaataaaaaaggaagaaaaaaacagcacatgtgtgacccacacgaaacgcacagcgggcgattgcaatgaaataatggcagggcttacccggcgtatgcgcaattttgattcacgctgcacacatacgcagcgatgtcactacgtgtttttgaccctaattgcgctgattaacccatttctttctatttcgtatgccactgggcacttgagccactcgaccctagagttcacccagtcactcaacctgaaacaccccctacttttggaccaccccccgtggcggaagcgccgaagataaggggccacaaaaagtggcaaaaaacaaaccataataaaccaagtgcagacggacagacaaacgcagcatgcgggctcacaggaggggctttagcgggttaaccctttggggaaagcctcatatctaggtcaccgattaaagtatttatcaaattttgaatgttttatttatacatttacttgttggttcgaattaactttgattatttgaattgctaattataatttattatatttactacatgccagtcttcagagggttaatttggcatggaaaatggcatgtaactcgaaatattactgcggctagggccctgcctttggctaattgccacaaacctcgtttggctttcatccacactttttttgaggattaaagatttgatagttttaaggagaaattgaaatgggtgtgaaagggaattggaacataagctataaacgaaaataatctgctttatttactgaaattcgattatcataagccgattttcggaaagtgttaggctttgccttcaatttatagaacaagttaacaaatttaaaagagtatttgtatatcgtatgcgtgggtttaaaaaaaaaagcatcacgtgtccatctctaatttaaagaaatataaagtgacatacaaattttcgtataacagtctgccaaaaagtcgccgctgttatactcaattttttacggacacagcgccctctgacatttacaaagtgcaactactcgctttgcgcgccaatttcaagttgttaattctgtgaaaacccatagagtaccgaaatcccgcacataatgcgcatttggcgccatttgaatgataaaaattccaggaatttcagttctttttcgtcgtgtattaatgtatatttaaaattgatggtctttgttcaataatattgccttttttgatgcaaaaataagctttgcttaaataataatcattacatggtaaaatatttgttttcttgtttgcatttgcgtttcggtgccttgttgttcggttacggattacataaaaataaacaaataataagcgtaaattgtacctagcagaagtttacaactttcaactcttaaacgatagatcttataaataaagttttatggatgaaattaatgagcgtgtttgtttttgtgtgatatttgttttctttttttttttttgtttttagccattttttgttctgcttatcatctacaaatgattaaggggtctgatttcgggatcggcctcttaaatttaaatgacatggttcctcacgtttttagattataatgcacatttttcgtttgcttgttcgttggttatctttaaaatttgaactagagtgcttaaataattgaactaaagccgaaaccataaaaacaataataactaaacaaaagcgttaaattccaaatgaaattgtctgttttgcatgaatgcgagtgtcgggtgtgtgtctgcgtcgtgtgcgagaaacttagtctacggattaacaaatgaaaatcaacaaaaatcaacttaaaagcagcatgaaataaatacccctatacgtctatatatacaatacgataacacccaaacttagataacgaactgcacgatcatcccacaacctacagcatcagtcgcgagcgcgacttctttagccgcccggtggcaccgcccaggccatcgccgttccaggacttggacttggcgcgaaagtggcgataggcctcgttgtaggcgggatccagcatggtgcggtaggcatgtggttcgcacagctcaacgtgcgactcgaagaactccttgtagccgttgtgcagcagatagatctcgggatagtgcaacgccggataggcgttggtattcctctcgcgatccagattacgcaggaagcgggacattttcggtccacgctccgaggagaattcgcagtggaagataatgatgttgcgcttgtgtcccgattcggcgttctgctgctgctgcagctcagtctgttggacggtgaggaactcatcgaggatctgctcggtggtgtacaggttcttggctccctcgatgtggccgccctcgaattcgtaggggtagcggcagtcgatgatgcggtagctggccaccttatcgctgaactcgcccttaagcaggcgagccactgtttcgctggagatgctcttcagatcccgatgacgaccctccatcaggggcagggcataggctttgctgaagtcgccgattagctcgggctcgttgcggttctcggagcgggccagggcggacatgatctcggcgtcgttcagggacatgcacttcctcagtggaggggggtggctaatcgtgacctggctgagtgggctgggtgcggggcagttctccttctcaacggcggcgcagcgatggcgtttgctctggatgggcgagcagttggccgatgctggcggttccgggcgcttgaagcaatcccgggcagtctctggggtctttggtggtggggtggtggtgctgttggtgttgctctccgtcatgctgaggcaccttctgaccgaagggcggcgcatggacagacccgctggcgatttggcagcaggctgctccttgatctggccgctgatcagcgagtttaggccactggggaagcccagggcggtctgttggctctgcgactccatctcgaagagctccatgtactcatcgtccatggaggactccatggagcatgtggaggacaggctgttgaagatgcggaagctgcgcgccggcgtgtgatcacttgatactcccatagctggcagaattttcggctggcggacgatctggaagcgctggggcgagccctccggcgagagcagacccatcagctccggactggccgatcgctgctgatcctggggcacaacgtcgtcgtcgtagaacgacagctcctcctggtccatgctcatcagttccagggaacggcgagcacgacgagatccactcattttgttgatgctactcgaactgctggtgttattactgcaagagcaaacaaagagagggggaggattagtcaactgttcggcatcgaggaagagagctgcttttgcttccctaaactctcgcaagagcgggtcattaaacccagctaaaaatactgacaaactggtggtggtggtggcgttggtggtgtaaaaacaacaaaaatacccgagaaaatacagagaggggttgttgtaattgggtgaagagggagctgaactagaaatttactttaatgcagcttcgaaaactggaatttttgggattcgacttgcgcacacgatatcattgataccattttttttttttttgataatttttacaattccctaaaattgcgagggaaccgttgcgtaccgccttatcttcttcttcttgattctacttaagcattagcggttctccaaatggaattcccttttgcttttcgcatgcatctgcttttcagcttgacttttgcttttgggtcacacgtcacgcaagcgcagcgataatacaacaaaaacacgccacaaagaaccgcaaagaacacggaggaaaaaaggaacaaaaatcgaaaaaaaaaaaatgactgactgacggacgacggacaaaaagcattttttgctgctgcttttttttggagcctcgcggaagccggtttaatgaatgaaaaacggcaagcgagcaacaaaacaacagctgagcgccaaaataaaaatcgggcaaaaagcaaacgtgccgagcgtgataaaaagaactcttacttttgttggccccatcgtttacatttctgttttttgtattttttttttgctttgctgttgttgctgttgctcttgaacttgcactttttatcgcgtattttcaactggtattcctggtgcaaaaggggtttgctgttgctaatccttgggcggcataattacctgatattgcaatccatgctgcagttgttttcctccacaatagtttcccacagcattttgttggttttgttgtgttatgtgttgcgttggttgcttcgaagagccgaagatgtttgatttcgctggcgagtctgaagccgaagaaattgctaaaacacaatttgttcttggtcactctgcactcatttacagtttgtttttagaatttgagatggtagtccttggtttttggctagtattgcattttagttaatttaggtttttttgttttttttttttgttaatgtgtccgtttgagcatgattttttgttttgtatttcggagtgtggttgtgcgaggtttttctttttcttcaataatttgaaccgcacaatctcaattcaccgaacgaggaaccgaaaggctgaacaagaagagctgttgactcgacgacgaactgagaacgaatgtgctgaatatgccgagcagctggtttttataaccgcaccccggccgatcacgatcagctgatgagctaatgggcgcgagcgagatggcgcgcgttttttgttctctctgcttcgctctttagctcttagttctcagctcctttcctttgccttcccatcctatcctttccttcctatccttcccagaagtgccaatagaagaggaagggagacgggcaacgagcgacaccaacacacataacggggacggggccagagccatgtgcgatgcgaaaaggaaaactgggaaaatgggagaatcaggatcatatggactcagttttggaaatctctgctcatgtggagcacaagagtgccggcaacaggtagaatcctttcccctgcacttcccctatcgcaaaatcccgcaccgaataccaatgtcccgagaaacgaggagaatctggcgccttggtggtcgccagctctatggaggccactgattttggcgcgcgagcttttataccgcgacgcgtaccgccgaaggggatccgaagtcgccacaattggagccgaagtggagccgaggaggctccgaaccgaacacatgtgaaaatagtgtggagccccaagaagcgaagaggaaacgctgaagaactgcgcgaatctttaagcagaatttcaaggcggcatcgattgtgtcgtttgcaggtaataatgtgagatccacgcattcctgctgccccctgtccccccttgtaacccctccctgaaaactacatatcagcaggtagtggccgcagtcatatgatcgccgcaccggcgggatgggcggtcgtggagggggcgtggctcctttgtgttctgcagacgtagacgccaatgtcgttaaatgagcaaagcttccagccacagagatccattcacaggtagcactctacacgatggaccgtgtgtctttaatgagaatccgtacaaacacagatcttaagctagataaactactactaacagtagcaaacacgtggaaaatcatgatgtcaaccatgcgatatgaccaataatcgataatgtgaagctcagactagttgcccacgccgaagctccactgtagcccctcgtttgtgtgcaatcgcggcaaagttaaagcaaaaatcgagttacatatgcgccgatgccctgcgggagtcattctggaggatccgaggggttcactaaggagggttgggggtttgcgaacacccatgggctgtgctgtgcagttcgagtgtgtttttgtaaggttcgcggcaaacaaatgaaggacaggccagtgcaaccaggccatatcattcacaccgcttgaagagcaggcgaaagtaaatgatttcgggaccaaccacagccgaagccaccaaccaaatgagctacggtttcattccgctgaattcctttggccagcttttgttgttgctgcaggaaga

SEQ ID NO: 1007 - DNA, 3047 bp, DROSOPHILA
attctcctcgtttctcgggacattggtattcggtgcgggattttgcgataggggaagtgcaggggaaaggattctacctgttgccggcactcttgtgctccacatgagcagagatttccaaaactgagtccatatgatcctgattctcccattttcccagttttccttttcgcatcgcacatggctctggccccgtccccgttatgtgtgttggtgtcgctcgttgcccgtctcccttcctcttctattggcacttctgggaaggataggaaggaaaggataggatgggaaggcaaaggaaaggagctgagaactaagagctaaagagcgaagcagagagaacaaaaaacgcgcgccatctcgctcgcgcccattagctcatcagctgatcgtgatcggccggggtgcggttataaaaaccagctgctcggcatattcagcacattcgttctcagttcgtcgtcgagtcaacagctcttcttgttcagcctttcggttcctcgttcggtgaattgagattgtgcggttcaaattattgaagaaaaagaaaaacctcgcacaaccacactccgaaatacaaaacaaaaaatcatgctcaaacggacacattaacaaaaaaaaaaaacaaaaaaacctaaattaactaaaatgcaatactagccaaaaaccaaggactaccatctcaaattctaaaaacaaactgtaaatgagtgcagagtgaccaagaacaaattgtgttttagcaatttcttcggcttcagactcgccagcgaaatcaaacatcttcggctcttcgaagcaaccaacgcaacacataacacaacaaaaccaacaaaatgctgtgggaaactattgtggaggaaaacaactgcagcatggattgcaatatcagtaataacaccagcagttcgagtagcatcaacaaaatgagtggatctcgtcgtgctcgccgttccctggaactgatgagcatggaccaggaggagctgtcgttctacgacgacgacgttgtgccccaggatcagcagcgatcggccagtccggagctgatgggtctgctctcgccggagggctcgccccagcgcttccagatcgtccgccagccgaaaattctgccagctatgggagtatcaagtgatcacacgccggcgcgcagcttccgcatcttcaacagcctgtcctccacatgctccatggagtcctccatggacgatgagtacatggagctcttcgagatggagtcgcagagccaacagaccgccctgggcttccccagtggcctaaactcgctgatcagcggccagatcaaggagcagcctgctgccaaatcgccagcgggtctgtccatgcgccgcccttcggtcagaaggtgcctcagcatgacggagagcaacaccaacagcaccaccaccccaccaccaaagaccccagagactgcccgggattgcttcaagcgcccggaaccgccagcatcggccaactgctcgcccatccagagcaaacgccatcgctgcgccgccgttgagaaggagaactgccccgcacccagcccactcagccaggtcacgattagccacccccctccactgaggaagtgcatgtccctgaacgacgccgagatcatgtccgccctggcccgctccgagaaccgcaacgagcccgagctaatcggcgacttcagcaaagcctatgccctgcccctgatggagggtcgtcatcgggatctgaagagcatctccagcgaaacagtggctcgcctgcttaagggcgagttcagcgataaggtggccagctaccgcatcatcgactgccgctacccctacgaattcgagggcggccacatcgagggagccaagaacctgtacaccaccgagcagatcctcgatgagttcctcaccgtccaacagactgagctgcagcagcagcagaacgccgaatcgggacacaagcgcaacatcattatcttccactgcgaattctcctcggagcgtggaccgaaaatgtcccgcttcctgcgtaatctggatcgcgagaggaataccaacgcctatccggcgttgcactatcccgagatctatctgctgcacaacggctacaaggagttcttcgagtcgcacgttgagctgtgcgaaccacatgcctaccgcaccatgctggatcccgcctacaacgaggcctatcgccactttcgcgccaagtccaagtcctggaacggcgatggcctgggcggtgccaccgggcggctaaagaagtcgcgctcgcgactgatgctgtaggttgtgggatgatcgtgcagttcgttatctaagtttgggtgttatcgtattgtatatatagacgtataggggtatttatttcatgctgcttttaagttgatttttgttgattttcatttgttaatccgtagactaagtttctcgcacacgacgcagacacacacccgacactcgcattcatgcaaaacagacaatttcatttggaatttaacgcttttgtttagttattattgtttttatggtttcggctttagttcaattatttaagcactctagttcaaattttaaagataaccaacgaacaagcaaacgaaaaatgtgcattataatctaaaaacgtgaggaaccatgtcatttaaatttaagaggccgatcccgaaatcagaccccttaatcatttgtagatgataagcagaacaaaaaatggctaaaaacaaaaaaaaaaaaagaaaacaaatatcacacaaaaacaaacacgctcattaatttcatccataaaactttatttataagatctatcgtttaagagttgaaagttgtaaacttctgctaggtacaatttacgcttattatttgtttatttttatgtaatccgtaaccgaacaacaaggcaccgaaacgcaaatgcaaacaagaaaacaaatattttaccatgtaatgattattatttaagcaaagcttatttttgcatcaaaaaaggcaatattattgaacaaagaccatcaattttaaatatacattaatacacgacgaaaaagaacaaaaaaaaaa

SEQ ID NO: 1008 - protein, 479 aa, DROSOPHILA
MLWETIVEENNCSMDCNISNNTSSSSSINKMSGSRRARRSLELMSMDQEELSFYDDDVVPQDQQRSASPELMGLLSPEGSPQRFQIVRQPKILPAMGVSSDHTPARSFRIFNSLSSTCSMESSMDDEYMELFEMESQSQQTALGFPSGLNSLISGQIKEQPAAKSPAGLSMRRPSVRRCLSMTESNTNSTTTPPPKTPETARDCFKRPEPPASANCSPIQSKRHRCAAVEKENCPAPSPLSQVTISHPPPLRKCMSLNDAEIMSALARSENRNEPELIGDFSKAYALPLMEGRHRDLKSISSETVARLLKGEFSDKVASYRIIDCRYPYEFEGGHIEGAKNLYTTEQILDEFLTVQQTELQQQQNAESGHKRNIIIFHCEFSSERGPKMSRFLRNLDRERNTNAYPALHYPEIYLLHNGYKEFFESHVELCEPHAYRTMLDPAYNEAYRHFRAKSKSWNGDGLGGATGRLKKSRSRLML

SEQ ID NO: 1009 - DNA, 14322 bp, DROSOPHILA
atattccgccttatccgctcgtcggtttgctttttacaaatacaaatgttttcgggcacgtcgctttatatggctctgctcgagctctgcccaagctctgccgactttgctctcatcggcgctcttcgctctgctcacgcactgttaaccgaacgttaacagtgcaagagagcgccagctctcaatgttgcatttgtttacagtacattggccgaaatgcagcaacatatgcaatgaattcaggatttaaatatgcaaaatttgttatctccaacaatgtaggtttttaaaaaatgtattaagtgcttgcgaaagtacaacgagcttgccgctcgagcgcgaaagactagcaatatgttaatttattaatcataaagtaaattaaatctgaactatccacaaacaatgtccataactgttctgtgcatatgactgtgcatttgcattactttttagtgtgcaactcaataagaaaataagttttttaaaaaacttgttgtttgctatatgatgtttacctggatcattgatattcaattacaacttggtattaaatctttaagtcttgcgcccaaaactgcttttctagtccactgttcatattacagtcatgaaattcatgttgcaaaaaaaccaagagtagatcaaatggtaaagttgctcatatgtcttcaactaatcggataggaaatactaatttctgctttttgaagcaaactataaattgcagtttaggaaaatgcaaaccgcaactactaagatagttattgaattccaacacccaagggactgagtctaaagataacttaacggagagcgatattatttataaccgaagccggtttatttcagagaggaatctcaatctcgctgaggctctctgtctgtctctctttccctctctctctccgcctttcgaactgtgaactgtggtgagtatggcattccgctatgctgtttcgccattctcttcccccgcaaacggcgcgccaactaaataattatctattttacggctataaggccaatatttcgatccttgtgtggctcgtgcggcgacatccttcgagtggaaccgactggattatggccccccaattatgagcattatttgttgggctttcgtcaacgtcgcagttattcgtcacgaagcccaattgtagacaaaaacgtcactggccaggtgaattgattgatgcgaatggaggtttattgcttaatggtttgttttcgattcggttcgatctcaaacgaaacatgtgatcgagcacgggcaacactcgatagtatgtatgaaatgacaaaattaacgaacaaaccccctcatttcgttcgaagaacttgttacaattcaataggttatcttatcgattgataaatagcaataagaacaaattgtcctagtcttaaaatgaaaatctaaaaaaaaaatcacttaattatatataattaattaatcttcctgcttccgcacttttaatccaaagacattcgaaaatttggttgcaaattcttgtgtgcaataaattgattgccttacggaaatcgcagaggtagctaaaaaaaaaaagaacaatgcgatctaaatgattgatacaaaaaattgcaagtttcggtggagcccctaaaaataaaatagctcgctttgaaaatgggagcacggatgatatttgtatttatagcagcgctagaatatttcgcttgtgcaaatatttgatagtgacgtgctgctagctgggccatattaaattgcctcaaacaatgcccaatttacaattggaattccgctcgattgaaattggtataacaattgtattgctttccaaaggaaacccaaatgggaaatgcacccttaaaatgcaattggagaaatgcatttgattcgttaattaactcgagcaacacacatacataattaccatgaaagtgccaacatatctcacgcacataagctaacaagtttctgcaccattcatacccctttcaattcgtcttctatttgcacttacgaacaatgcaatgcatcgccacagcctaatcatatcatcagatggccaaagaccttgtgttcataccaactaacttggccttaagtagttcaactattacacaaaagagaaaatgtgtctttttcacattgattatttgttgagtaaagggggatatatcgtattcggtaaaccagaaacattttggttctggaatattcaacttctttctactccccacacagggttgcatttcatgagccgcgccttaagataggcaagctggttttttttaaatgttttttctttacaaaattattcgtaactttgccagctattactgtttcagattgtagactaaacttaaatcaaacgtttctcgctgtgtactacaaccattttcaatactacaaaacgctgcatccaatggatcgatagagggcggtgaaaattttggcgggggtgtggggaaaaccggggttagacacgacgagttggaaacttttcgtagtgacgtagtcctcaagtttgatttctcgtgagttgcgtgtgtgttttattgtttgctttttttctccccccgttttctctcgagagtgcgtgtgtgtgcgttgtcacgtacatcggtacaatcggttccattcgactttggttgtgttcgttcggtgagtggagctgaagagggggggggggggggggcactctaatttgacccattgccgctgctgccaaaagctttaaactgggccaaaaccgccagctgaggcaacagaatggggaaaatgctgcgggtcagcaccatttcgtacattatcttttggggcaaccagtttgcttggccatctcatttgttagtggcacggtaaatttggcacgtaaatggtaattatattcaaggcattacaacttgagcattgtaatcgaattacaaaaatgtttaggtctcaagtacaactatgtatgtacatatgtatgtattttctgtccaaggatatctacctttattattcattccaaacaaactatcaaagatttgatgataatgggtcagtttgtgcccgccaaaaataggaaagaaaacttttctatgtttagcacagctatctttaaattgtttgccaaagaacttatcattagttgttgtttactcgagatggcagttcattaaattgaaagttagcgcttagttgcttgataggcttcaaactttaaagtattttaaaaacacatttacataaaataatcaaaatacaaatgtggtaaaaaaagcggaggtaaaatggctaacctttcgtttcaaatctataactttgatctaagagcattgtgagttcggctttggcgcaagtttagttacttttcgtgtctcgttttcgtatccagtttttttctactcttttttttttttagtcggtgtctcgttgccgtcagctaaaaatagaatttgcaactcgctgcttttgttgttgcccgtccgctgctgttgttgttgttgatttttctccatatctatttttagttataaccttggcagtcggcggaaaacgtcgtggagaatcgccaagtgaagcgtaaaggagattggcttgcggaggggaatgggggggtccacattgttattgtctattgacggaacgttttgaacgtctaattagcgaagccggtccagaaccccagagcccccccccctccccatactaacgcagcataaatatactcgcggtcgcaataataggactagatgggagaaaaaataaaattcataaaagttaaaaacattttatttatcaaataatcatgattttcaaaaacattttattatgcaaaaacgtctttttggttaaaggttggtccaaaaccgaccggcacaagtgaatttagtgaatgttattgacatatactttataataatcatataatttacttaagtatattccttaaaatgtcgaatactcgctaggtgctacctttatgaccgctgctgtactcccccccgttcaaccacctgcagtttctctaattgcagtttttgcaatttgcttttatttatgaacatatgtacctgcagacctgttctctcatttttgttgcgcaatcaaattaaaagcgcatttgtgtgtaggtcagtgcctcacaaaagatgctatttctcaaaaaaaaaattataaatttgagtgcatattttagtttcctacacaaagtgttcggaattaaacagcacaaagttttgtttttattccctgctaaacttgaaaaaatattaaagcacagccacgtattatttattaaactgaatctttaggtttatatactaatttcgagtgagatttgataagaatgggcatatatcacgataattaggcatttttcctttccgcgccacgaaaagtcgctacatatttacatacgtatgtatgcattttaaagggtattaaagcgacgtcacgttttccttgtgtcatgtgcatattttccctgtcgcctcgaacttattttaagaattttgtgtgctctggttttgagatttcgagtacttattttgagtattaagtacataattcagagtactttttgataagataagacccacacacatcgccacactgaatcagtgttttgcgtggaatttccaaaagaaagagcaaagaagtgtgtatatattttgggaaagagcattcttgtgtctgctttcagaattcctcttagacattttttcatttttggcatgtgccttggcatgtggtcgcaaaacgagagaacaagaaatagccacctgagctgcccgaaccacctgtatttgtttaccttttgtgggtgcaaatgcacgggtcgttcgattcgggttgcataagtaattattaaaaaaaaaaaaaaaattgaaatgaatgaaaatcgaataaataatactgtcatctgggcttagttgaggcttttgaggtccggtgacaaatgaataccgcgtacgtgcgccaatctatccatctaaataggaatccactcgcttattcagccaaactggcatactatctatctaccaccattcacctatctaaatacacacataatgaatatatgtatgtacatatgtatctatttattcatttcatttatttgcatgcggagtatctgtggcaacgaaacccgtttcgtttggggacttaaaggcttcgttttgcgcattttaccggcaaatgccttcgcaatctggtaatatccagacatttagcttcagtcagacctcagacatccgtttggctctattatattccactatttgctaccctctttcatttccgacattagttagttcactttctattgtgttcaagccactgccgccttacacggactaaaaatcgcaccgatatgaacttttcgtataacagtacaaaatatgtgtaacagaacaaaatgtgtataactgtacaaaatatgtataacagtacaaaatatgtataacagtacaaaatatgcatatatgagaatataatgattggtaaatatgaatttatccaaaagaattaattggaatgttagtgggacatattcgtgatctatgttatatgtactacgaattttaaccatagcttattataatagtaaatactgtaaataatggtagatatactataaaaagcttactgcattttctagagatttctataggcaggaaaaaaaaatcgtcaactggtatgcaatttttgtacggtgtagttttgtggtgggtgaaacgttttccactgctgattgtgggcgaccatctaaagttcaagcttacgaccctctaatagatctagatggaagtggagaacaacccggagtgggaaatataaccaggaggtgacaaaagagccgccggaggacgaggatggaaggtacgggcgaacacattcaattgagtgttgttcggtgtccagttgttttgtttgtttgccgacacgaattcacaatgttcacagttcaaagctttaaagcttatttttttatataaatgttacagaatttcgattaaacaataacttgttaaataaaattggaattcgcggaaaagaagaaatcctttttatatctggcttataaatatacatatacagatatgtttaaatacccatttatccacttttttataagcgatattaattggttcaaatgggtagtatgaaatcaatcaacattctaatacgcaagagcacaaaagcaatgcatctatttttagcttaaaccgagagaatagaaaaaaaaaacagttaagcatgctttttggatgcgtatttacataaataacattataactatcgtacataattccgactttaatccgttcttcggattttggagcttcaaagttaaaacccccgtctctccttccctttttcacctaatcataattagtcagcattttttttcttttttgatggctattttcagacattttatagccatgcaaacgagacacgaggcaccaaaacaaaaccaaataatacacaatacaatacaaacagataaatgaaaatatgctaaaaagttgtctgccaatgagttttttttcggttattttaacagtcgccggttaaactgatcagcttcctgctgtagtgcatgagtggggggggggggtattattggttgtttttcatatggcggaaggacctgccaaacagctgttcaagtctcaatgcaatgataaaaaaaacagcgactacactgacaaatatgtgtgcacataaaaaataaatatatataaccaagattcagctttttttatccaagtgattgataagtttaatttttatttaatttggatatgacctaaatcaagaaatttttaactatttgtttaaatttagcagtcaagttcaattttgagcagtgtagaacttgagttggtttcgccggttggcttttgctctcctctcgaagactctctctcgctggttatctctctctctctgtcttctctcccactggttacagtgtattcaccttcgccatctgcacattaaagaaaagtttgtttatttccctttttacatttttgctgtatttttcagtttcgcccacaacaacttgtttgcgggacttggtgccaaaaacaaagaatgcaaattcagttcgtgactgttttgatatttttgcattgaaatgttttgactggtcgtttcggatggatcgtctgtctggcagctattgagcatttgtctttattcgttcgcgtttttttttttggcggatttttgcttgttttgtttacatcgtgcgcttcgcttcggcttatttgttttgttcgtagttttttgccaaaatgccataaattgctctctactacgccgcacacacacacacacgttgccgccacacctccaaaagccagaagcaacaacacaaacatcttgaaaactcaccacactgcaaaaatcggttctcactctcgctggttgcgctctcttccctcattcactcccgcttttcccagttcctttttttatactttgctcaaaatctgtaattttcattgcatttcagccgtcgtttctaattcggaattttacaactcgaaaccatttattcattgtaggacttcaaggtgaaaaaaaccatgaaaatggaaactattggtttatatttatcgtttccgcccttaaatgtatatgtttttaccaatttactgatattatatgtacatatttttatgaaatgataataataactgcatatacatacatatgtttggactttgtacatccattcatgtttttgaagtctcgccgggatcagtggaaccgcggttcatcagactcgcataactcacccaccatccacctacatatcccccccacccattcaatgttcaaattcgcatccagcaacctcgagcaaaacgcttttgcctcaatgcaaacgcacggtaaattgcatctgcggcatttttaattaccaacatacaaacggtcgtacatttgcaatttatatggtatttttctcgctttttttttgtttgtctatatcgccacgcatagagatatatgtacatacatatacatacatatatacacacaattccgtttggcgccaggaaaacgtttgcccgaatctcgacaaggttgatgagtctgtttttgggggctagtgccgggtcttctctgatgcttatcgcccatccatggaggctaaataataatcaatagtcttcataatcaactaaaatcttagcaactaagagtgcattgccttttaggtgtaagttacaggaccaagccttgtacagtgcaccctcactaaatggcatacagagtgtccttctatgttattcactttccttaagatgtaaacttatctaaactgatcgagcttcttttctcaaatatgaatactttccattgaaaatttttatgattcattgaatagtgcttacattacattcgcaactaactttctttagtaaatgcctgcaatttcctataaatttagatatgttttgtttatgctcacatgcttgtttacgatcggttgtttttgtaaatgcaaatggattgttgtcatcggtgcaacttttttggcaaagtgcctatgaaaaataaaattatttcatttaaattcgtggcatttttgattggcaaaagtgcatgcaatttcctcccgaataactcacacatgtgagtacatatataatatacatatgtatgtatgtatgtacatatgttttcaatccccacattgatgcgttctttccgttgcttttgttttcatgttgattaaatgacaatcgggaatatttaagggcattatctgctcgaattaatattcgtttcctgtttctataataagatcatgtgcaaatgaccagccctacttacatatgtacatatgcacaaacatagatatgaaattgtaaattaaattgctttgcaccttccccatatacaaaacaaaggcactgcactcgattcttttaatggaaagctaaaaaaccgaacttataagtggctcttatcaggatctaaaattgtccaacccacaccaatgcgtaaaaaaaataataattatacataaggtggcgctctagctgatattattttacgacttcaatcgaattagtcccaatatcagtagcgaataactcgtgcagatatagaataaagctcgtgatcttagtcagttagattaatcacacggctgatgcgattcgaaactgatgaaatagggctttgtgaatcgggcaaaccgatccgtaaatccttcgtctaccacaaaactcgaaagaaacggaaagttttagcggtctacgtgcatttgtattatatattatttgcactcctatcagctggcctaaatcgcatattcacgccaaagaacttatgtgcaatctttagtcatagtctaactcgcctgaatagtgtacgtttacaatgttttatacattttaacctgattagctggtgggttcgtaaaacacatgaccacagagacgttagttttatcagcgaccttgagattgtgattgggaagtgagataaaagactaaaacagcgtcgtgtcgtccggaaattaggacttttagatagtgaagcgagcaaaaatagaactgcagttaaatgacatcgtaaactcttgaattgccttgtacttgaatagtatgatctcgagattgtaaccatttataaggagtacatacatatgcaattgattgtatggtgttttattcattccaatgctgtttctggtaaatttaaagttttctaaattctatcagcaaatatgatgataattgtttgcatttgactttatttccctgatagcgatttcaacttagcgagcatccactggtattgcgttttcgcttattttatagtgatttatatccatgcaatatctattgaggaatttcgcttatattgccaaatcagcgataagcgctcatgcatatatgcaccgactatcgtaattaccgttaacgcccacctgacgtcatcggaagcgatagcggcaccgttaccttctctccgcatcttctctcttccgtagataactgtccatgcatgtgtgtatgtatgtctgccatttcagccagcatcataaatatgcatgtatgtatgtacacacatatagcacccacatgcgtaccactttcgttgtgcgttccacatgcaagcagataagctgcataataaaccgcattacgagtgggttgcaaattgtgaacctgtgggtgatggttgggttgggtagtttagcggttcgctggttcggtggtgaattggggttgctccgattgtatgcgaaagttcttctaatgcgcagtttgcttggaattggattttggattcgattgtaatcgtcaatggacaatgaatgaggtcatcgcgtggttgagattctgtggacattgtttggatgctacttgttcggaatttgattcgaaataccttcagaatccttggcctatttcaagtaatgattcattttgagttcaactgattttgcccaactacttttctttgatatgcttatacattgtacatgcatataaacagttcctttaaatgtttttagtttcctggaacaatgctatgcactattttcaaatatggacaatggaaaatataatttaaaaatgacattccgctcgatttgtttcataaaatccccatagctctgaatcaaaatgttttatcttcgatttgttgggtttctcgaaaatgcctacgtgtgtgttggcacgtctgcctcaaactcacctcataaaaccgcccgccgcccttaagcccgacaaacgtatcaaccctccaccaacgaacaagaaagttcaccacgagccgagtaaaatctgaaagacccgaatggtcatctcgctggttctctcttgcactcgcgtatccttttggtgtggtgagtacgctcagttgcactatatccacctccagccaggacctatccaagcgaaattgcgagaaccactcgcagaatctctagaattgccatccattacttgttacttcaggggccatattgtttttatattttactgtttttttttatttaaaaaaaaagaaaaaatgtgctatcaaaaaatataatagataattcatgtggaaaattgagctgggaggtatatagatttgtttactataatatatgttacctaataccttaaatagctttatttataataaataatattattttatttacttatttgttgctcagtcttattccaatgaatggaattttatcagagggtatgtctaagtcgaatagattcagttttatagggcgccttgtcagagaggcgccttgacccactgcagggtcaacgactgcagcacaaagctggacgggatgtgggtcacatttgtagccgttagccgcgttatgttatgtgaacccccccactactccggcacagaaatcccatgggcagttggttatatttttgtcttaaaatgcgaatggcatacggaaatagtgttatgtactaaatacatatctgtaatgctatcctttcagattgtggcccggcgacatgacctgaagctgatcgtgacctccgccacgatggactcgagcaagtttgccaccttcttcggcaacgtgcccacgttcaccattccgggacgcacctttcccgtggacgtgatgttcagcaagaacacctgcgaggattacgtggaatcggcggtgaagcaagcgttgcaggttcacctcacgcccaacgagggcgacatgctcatcttcatgcccggccaggaggacatcgaggtgacgtgcgaggtgctcgaggagcgactggcggagatcgataatgcgccggcactaagcatactgcccatctattcgcaattgccgtccgatttgcaagcaaagatctttcagaaatccagcgatggattgcgcaagtgtgtggtggccacgaacatagcggaaacatcgctaaccgtcgacggcatcatctacgttatcgattccggctactgcaaactgaaggtctacaatccgcgcatcggcatggacgccctgcagatctatcccatatcgcaggcgaatgccaatcagcgcagcggtcgtgccggacgcacaggacccggtcaggcgtaccgcttgtatacgcagcgccagtacaaggacgagctgttggccctaaccgtgcccgagattcagcggaccaatctggccaatacggtgctgttgctcaagtcactgggcgtcgtcgatctgctgcaattccactttatggatccaccgccgcaggataacattcttaactcgctgtaccagttgtggatcctgggagcactggaccacactggtgcgctgaccacactgggtcgccagatggccgaattcccgttggatccgccccagtgccagatgctaatcgtggcctgccgcatgggctgcagtgccgaggtgctgatcatagtttccatgttgtccgtgccatcgatcttctaccggccaaagggccgcgaggatgaggcggatggtgtgcgcgaaaagttccaaaggcccgagtccgatcacctgacctacctcaacgtttatcagcagtggcgccagaacaagtaagtcctacaattgcggcaaatctccgccagaaatgaacaactcgttgctttcgcccacagttacagttcgacctggtgcaacgaacattttatccacatcaaggcgatgcggaaggtgcgcgaggtgcggcagcagcttaaggacatcatgacgcaacagaatctgagcgttataagctgcggcatcgactgggacattgtgaggaagtgcatctgctcggcatacttctaccaggcggccaggctcaagggtatcggagagtatgtcaatctgcgaactggcatgccatgccacctgcatcccacgtccgcgctgtatggcttgggcaccacgcccgactatgtcgtctatcacgagctgatcatgaccgccaaggagtatatgcagtgcgccaccgctgtcgatggctactggctggcggaattgggtcccatgttcttttcggttaaggagtccggtcgcagcgggcgcgagaagaagaaacaggcggccgagcatctcaaggagatggaggagcagatgctgaaggcgcagcacgagatggaggagcgcaagcagcaggccgccgaacgggaggaacagctggccaccaagcaggagatcgccacaccgggcaatgccacgccccgacgcacgccggccaggattggcctttgagcagatgcagatacagatacaaatatccgtgtgaagcgtgtgttcaatgtattaatttaagtttaacaagtttttttgctacatcctaataaagaatcattgtgaactggatacaaaggaaggccacaaagcctcttagttgataattcgttgcggagttctccacaaaaacgcacttgttgtcctccagtcgatgggtcttactgcaggagcactcgccccaattgcacaccatgggatggccaatggatgctgtggcattctcctggtccatgggctgcatccggcattcgctatcgtttcgacagagtgccccgaacggcacgatgggtgcgcaagtgatccgctccagattgttcaccgcatcgagatcgtcgttttcgtccttggccacctcgttggctacccttttggggtagtgggtcgaacggcagacgcagaggtgatccaggcacctgccatcggcacccaggtttagcttgcacggcgaactgtgctcgcacgtgtcaccgtaagcggagcccttgatgcacttggtcatgttgtggttgtgcacaaagtttttggagcagccgcaccgcttcgtctttgtcaggcaaatcgaggctccacagctgccgcaatccttgtcctctagacagcttgattctaaggtaaatacagaggtggaatttcatgtaaattatgctatttctgccagtgtactcacgcaaaacagaaagacaacgtccctcgtggaactcgaattggttaaggcagaggcactggttgccaatgcaggagctaaaccgatccgcccgctggcactgttgctgaaactcacagcttccgcccaccgggaccaccgccggcaggcagcgtctgcggtcgtcactggacacatgaccctcggagcagtggcactgctgccatcgcgtgtggcatatggcattcggcatgggacatggacaggcaccaccaatgatgttggtcagcttgaggcgctcctccagcggcgtacacggcacccgttcgccggagccacgtgctgtgcagatgcaggccatgtccacgcagcgaccgcgctcaaactgggcgcactgtgcgtccgagctgcaggacaactccagcagat

SEQ ID NO: 1010 - DNA, 1950 bp, DROSOPHILA
attatctattttacggctataaggccaatatttcgatccttgtgtggctcgtgcggcgacatccttcgagtggaaccgactggattatggccccccaattatgagcattatttgttgggctttcgtcaacgtcgcagttattcgtcacgaagcccaattgtagacaaaaacgtcactggccagattgtggcccggcgacatgacctgaagctgatcgtgacctccgccacgatggactcgagcaagtttgccaccttcttcggcaacgtgcccacgttcaccattccgggacgcacctttcccgtggacgtgatgttcagcaagaacacctgcgaggattacgtggaatcggcggtgaagcaagcgttgcaggttcacctcacgcccaacgagggcgacatgctcatcttcatgcccggccaggaggacatcgaggtgacgtgcgaggtgctcgaggagcgactggcggagatcgataatgcgccggcactaagcatactgcccatctattcgcaattgccgtccgatttgcaagcaaagatctttcagaaatccagcgatggattgcgcaagtgtgtggtggccacgaacatagcggaaacatcgctaaccgtcgacggcatcatctacgttatcgattccggctactgcaaactgaaggtctacaatccgcgcatcggcatggacgccctgcagatctatcccatatcgcaggcgaatgccaatcagcgcagcggtcgtgccggacgcacaggacccggtcaggcgtaccgcttgtatacgcagcgccagtacaaggacgagctgttggccctaaccgtgcccgagattcagcggaccaatctggccaatacggtgctgttgctcaagtcactgggcgtcgtcgatctgctgcaattccactttatggatccaccgccgcaggataacattcttaactcgctgtaccagttgtggatcctgggagcactggaccacactggtgcgctgaccacactgggtcgccagatggccgaattcccgttggatccgccccagtgccagatgctaatcgtggcctgccgcatgggctgcagtgccgaggtgctgatcatagtttccatgttgtccgtgccatcgatcttctaccggccaaagggccgcgaggatgaggcggatggtgtgcgcgaaaagttccaaaggcccgagtccgatcacctgacctacctcaacgtttatcagcagtggcgccagaacaattacagttcgacctggtgcaacgaacattttatccacatcaaggcgatgcggaaggtgcgcgaggtgcggcagcagcttaaggacatcatgacgcaacagaatctgagcgttataagctgcggcatcgactgggacattgtgaggaagtgcatctgctcggcatacttctaccaggcggccaggctcaagggtatcggagagtatgtcaatctgcgaactggcatgccatgccacctgcatcccacgtccgcgctgtatggcttgggcaccacgcccgactatgtcgtctatcacgagctgatcatgaccgccaaggagtatatgcagtgcgccaccgctgtcgatggctactggctggcggaattgggtcccatgttcttttcggttaaggagtccggtcgcagcgggcgcgagaagaagaaacaggcggccgagcatctcaaggagatggaggagcagatgctgaaggcgcagcacgagatggaggagcgcaagcagcaggccgccgaacgggaggaacagctggccaccaagcaggagatcgccacaccgggcaatgccacgccccgacgcacgccggccaggattggcctttgagcagatgcagatacagatacaaatatccgtgtgaagcgtgtgttcaatgtattaatttaagtttaacaagtttttttgctacatcctaataaagaatcattgtgaactggatac

SEQ ID NO: 1011 - protein, 534 aa, DROSOPHILA
MDSSKFATFFGNVPTFTIPGRTFPVDVMFSKNTCEDYVESAVKQALQVHLTPNEGDMLIFMPGQEDIEVTCEVLEERLAEIDNAPALSILPIYSQLPSDLQAKIFQKSSDGLRKCVVATNIAETSLTVDGIIYVIDSGYCKLKVYNPRIGMDALQIYPISQANANQRSGRAGRTGPGQAYRLYTQRQYKDELLALTVPEIQRTNLANTVLLLKSLGVVDLLQFHFMDPPPQDNILNSLYQLWILGALDHTGALTTLGRQMAEFPLDPPQCQMLIVACRMGCSAEVLIIVSMLSVPSIFYRPKGREDEADGVREKFQRPESDHLTYLNVYQQWRQNNYSSTWCNEHFIHIKAMRKVREVRQQLKDIMTQQNLSVISCGIDWDIVRKCICSAYFYQAARLKGIGEYVNLRTGMPCHLHPTSALYGLGTTPDYVVYHELIMTAKEYMQCATAVDGYWLAELGPMFFSVKESGRSGREKKKQAAEHLKEMEEQMLKAQHEMEERKQQAAEREEQLATKQEIATPGNATPRRTPARIGL

SEQ ID NO: 1012 - DNA, 5383 bp, DROSOPHILA
gctggttccagaaaaagggggtttgacctcagcacagtcagagaaaaagccgttctcaacgatctcgatttaagaacttcgatctcaaaatctagccaagatcgaatcatgctcagcatactcaggtcgagatcgaaccattctcagattgcaactgactttgctcttatttttcgatctctttcttggttttttaaccttacccacacatcatcttctacaatctgaaacccgatactgcttccgtctaaaatatgtatccaacatagagatcgttttcgtctcgaaaaaataagtcttcttttcatgagaatgattgatgggatggtagggattatcctggctgtgtccctgtaccgattccacaagaccttgatgctagacgtgttgaggagaccatacacacggacaatactcaagtatgggttgaactagggatacttgaggttgtgaggatccttaagctctttcgacgaacgcttgacaaatatgtacaagtaaaacttttgttctactaacaataatgccaatgtgattggaaaagctgatagtgaaatctcgcaatgttactcttgtgcttgcttgtgttttcgaatgcatacgttgaatgagcattttggtttcgctctaaaaaagcaagacaagcagttgtgaaaagtgtctaaaaggttaagattttgccaggcatcaggcgaacacaactgcaaatgtatctaaaggatatgaatgcctaactattgttattgaaatacaacaaaagtaaacttatcaaacaaacaaatgggcttggcagttggaacattcggcttgttaaagtttccgagatattgacgctcatacggacagacgtacatatatgtacatacatatgtaactggatggagtcggctagtgatctcctcaagaatacaaatagtatgcccccttacactttgagtaaatgggagactacaagaaaatgcataagacggtctggcttacaaattgtataaaaagcatatttatatattcatagaggattatattgagttaaaaaagtcttcatatacataataaaagagatttcacattttggtttttgtttcatccgttaaaggagtgcacttttaagcgagtagcctgctaaaccgagtttccgcaactggccatgggttcccgggaccgcctaggaagggatcactgtttattcaatcagatcgtgcttaggaatcgggcggcactgcaggacagcggaccatggaggtcaagaaggatcggaagggcaggctgacacgcaacatatagtataacctaaataaattgctcgctttgagacaacacagataagggtaaggtaaacagacaaaaatgaattaacatacaatataaatcggattggattcgcttagcctagatgcgtattacaataataattcattgttaatcgcgtctaaatacataataggaatacaattgttttcgtgtgtggtttcgcttgatagaagtgatatgagttcgctgatggttggtgttccttatgttctttgtttgcttctgatgaagcaattgcattgcaggcatttgcatacgcggcaggtgtaagttagatgtgtgtataaatgtatgtggtgtgtatatctagatactacggatatatatatatggagaatgcgaaattaatacagaatacttagcgcccgtcgtttcacaattgagagtagaattaaagcgcgatcgcaaccaaaatctgcgtacaaaatatatgttttgtatatgtgtatatatacgacttgtgtataactagagattgccgcctccgccaagcgcgtatataaaagatatacccgcctgctcactgctgggcctgcatgcgcgcctgcatctgggcgagcatctcctgcatgcgccgcagctcggcctccttctcttgcaggatgcggtccttctcgccgagcacgctgttcgacaccacctgcgagctgctgtcccgctcggccttcacgccgttctccttgcccttgatgcccttggcgaggcggtcggagcggtagttttcgtagtgcacctcctgcgtgacctcctgcaggtcctgcatgtgggtgctgtggggcagcgggataggtggttagttaataagcaatcagatattggaatatttgcttcacttacatgagcatcgtgcgcagcttgatgaagtcgcagtgatcgggattctctacctcgaccacgccccatggatacagacgaccgcgcaccttcttgcccttgacctcgagcagtgtgttggcgccgcagacggcgaaaggcacagcttccttaagttgcttcacctgctccttgtagtcctcgtcctcatcggaatcacagtctggcagtgggtagatcttgatgccgtggctctcgatctcctgcataatgcggcacttcaggcgcaggatctccttctttgtgagacaatcggcctttgcgatcacgggcacaatgttaactttagagtgcagcttcttcatgaactctacgtccaggggttttaggctgggtacaaaaattgatgtgatacttcgtttatactttctattatacaatttgcaacactactgagctttgaactccttatttttaatattaaatgttcaaaagttaaacggaaaaggaacgcacccatgaccgaacggcgatataaagtagaaacagcagtgaatgcgattgtccacaatgttgcgtctgttcaggccgctctcgtcgcgcaggaagcgctcgtattgctcatcgatgtactcgagtatggcaccaaagctgttggagttgtcgatggcatcgccgaatccgggtgtgtccaccaccgtcaatcttagcttgacgccgcgctcctcgatctccaccgtcgatgcctccagctttacggtttgcttttgtttctctgcaagaggggaatggtttcctggatgagtaatcaaagcgagtgatgacgaaagactatgcccacctatggcgtccggaataatgcgctcgggatagagatcggtgagaaagagactattgaccagcgtggacttgcccagtccggactcgcccaccaccattagggtgaactcgaatccctttttcacggactttcgatgcacctggttgggcaggttggcgaagcccacatagccgggcgtctcgatgctggaaaactgcacgagaataggtgaataacattagtatagagaaccaaaagtcctaggcttcatatataaataaaaataattaatattagaaactttctgagaatctactagataggtaatgcctttaatttcagaacaggtaaacaatcaaacattgcttgcaaaaccaagaattactcagttcaatatcagcactatttctggaacgtttaaaggcgaaacaaatgtggacttttttgcatatggaaattataatcttaacgaattgcatattaactaaatgtgccgtgcattgtgttctatacatatgaatacatatgcgaataattaagtgggtcagcctatgctgattaagctataaaaccatgcaatgcagactgacgataaatcatagtaatattgtacatatatctgcggtcgatcaatttatctaccaattaattggaactatgtttctcggtaaaacacttttgggaatagtaaaaacttgcatctcatgaagagaaagttgagttgagttaagaaatgggttcaaggatatgacccaaaatggacaagtgattgaaagtattccatatgccttattaactcgtaacccaactcagttgggttgagctaatgtctggtagttagggttttgggtcttagaaagcgatggcttggcttgatttgcatgcccatcacgcgcggatcagttttctcttgggcgcccaaactatgggcacggcactcatttctccgtgcaccagaatgcactgccatgtgggtcacgggcggccgaagttgcttcgcgagggcggcagaggtcccgggaacaaaggaacaacgccgacgccaccggcatgttgtgaatcacttgacttctacttccacttccttctccactcccgctcagcaatgcccgctcccaccgagtggacaaagggcggtgcaggaggagtgtccgatgaactggcgcggcgagatgagcggcaaacaaatcaacaggagcgccgcattcggcatttgatgcactggcaaccaggagtggatggcacgccacgcccagttggcggcggatcgagttcgttgggggactggccgttggccattagcatttggacaagtgaacagcggctactcacgccctttgtatcggccattttaaaaaaaaacacgaaacgaacgaagaaatcaacgtaatgacgaacaaaatagcagggcaactagtgtgaccgcagcgcgcaactggcaaatcctgctgccagtgggaccagttcggcggcaaaacaaaaatgacgaccgtctgaacaagatcaagctggtatttcttttgaaaatctggttgaacgtaaccatatttaataagttatttaattattatggttttatatggtttatattatatcatgactatatttttatgatttcactttattaatcggaaatttaagcccggactatatttacgatttagttcgtagcgtttttgacagtagataacatcttatgtagataccatgtcgaatatctcctggcgccatctattgtgtatcgtaaggtatattttgattgaatcgttttccaattcgcgcgtacacatttgaaattgtttacacattggtggcttttataacttgtagtctttatttttaaaacaatacacatattaatattggatgcacttaaattcacaatacatatctatataatccacaatcatagccgctctaatcaaaacacagatcattggatctcaagcgaatcgtgccgagccttagccttaggactccggactggggcttctgggctctgccgtatccccaccggggatctgctcccactttccgatacgccttagtgcataaacacatacatatatcatatctgcacggctctatacacatatatatgaattgtttcgcatgctgattggtttcaactttgggtttttcgctgtaatgtgtgattcgttaacagaacatcgactagaagacgggtagaattgagaggagacgcatgcaaatcaggattcgaacagcgacatatcgcggggtagcatcgaaattgcgtcactgccatccatccctatccctatcccattctaggtgattagccgcggagcgtgcagtccatggacattctcgatgggcgggcagtgggtggcgccgggtggcccccagtcgtgcaggccgcgggaattcgccagacgatgggtcagccggtgggcgatgctgaagccgccactgccc

SEQ ID NO: 1013 - DNA, 2006 bp, DROSOPHILA
ccagttgcgcgctgcggtcacactagttgccctgctattttgttcgtcattacgttgatttcttcgttcgtttcgtgtttttttttaaaatggccgatacaaagggcttttccagcatcgagacgcccggctatgtgggcttcgccaacctgcccaaccaggtgcatcgaaagtccgtgaaaaagggattcgagttcaccctaatggtggtgggcgagtccggactgggcaagtccacgctggtcaatagtctctttctcaccgatctctatcccgagcgcattattccggacgccatagagaaacaaaagcaaaccgtaaagctggaggcatcgacggtggagatcgaggagcgcggcgtcaagctaagattgacggtggtggacacacccggattcggcgatgccatcgacaactccaacagctttggtgccatactcgagtacatcgatgagcaatacgagcgcttcctgcgcgacgagagcggcctgaacagacgcaacattgtggacaatcgcattcactgctgtttctactttatatcgccgttcggtcatggcctaaaacccctggacgtagagttcatgaagaagctgcactctaaagttaacattgtgcccgtgatcgcaaaggccgattgtctcacaaagaaggagatcctgcgcctgaagtgccgcattatgcaggagatcgagagccacggcatcaagatctacccactgccagactgtgattccgatgaggacgaggactacaaggagcaggtgaagcaacttaaggaagctgtgcctttcgccgtctgcggcgccaacacactgctcgaggtcaagggcaagaaggtgcgcggtcgtctgtatccatggggcgtggtcgaggtagagaatcccgatcactgcgacttcatcaagctgcgcacgatgctcatcacccacatgcaggacctgcaggaggtcacgcaggaggtgcactacgaaaactaccgctccgaccgcctcgccaagggcatcaagggcaaggagaacggcgtgaaggccgagcgggacagcagctcgcaggtggtgtcgaacagcgtgctcggcgagaaggaccgcatcctgcaagagaaggaggccgagctgcggcgcatgcaggagatgctcgcccagatgcaggcgcgcatgcaggcccagcagtgagcaggcgggtatatcttttatatacgcgcttggcggaggcggcaatctctagttatacacaagtcgtatatatacacatatacaaaacatatattttgtacgcagattttggttgcgatcgcgctttaattctactctcaattgtgaaacgacgggcgctaagtattctgtattaatttcgcattctccatatatatatatccgtagtatctagatatacacaccacatacatttatacacacatctaacttacacctgccgcgtatgcaaatgcctgcaatgcaattgcttcatcagaagcaaacaaagaacataaggaacaccaaccatcagcgaactcatatcacttctatcaagcgaaaccacacacgaaaacaattgtattcctattatgtatttagacgcgattaacaatgaattattattgtaatacgcatctaggctaagcgaatccaatccgatttatattgtatgttaattcatttttgtctgtttaccttacccttatctgtgttgtctcaaagcgagcaatttatttaggttatactatatgttgcgtgtcagcctgcccttccgatccttcttgacctccatggtccgctgtcctgcagtgccgcccgattcctaagcacgatctgattgaataaacagtgatcccttcctaggcggtcccgggaacccatggccagttgcggaaactcggtttagcaggctactcgcttaaaagtgcactcctttaacggatgaaacaaaaaccaaaatgtgaaatctcttttattatgtatatgaagacttttttaactcaatataatcctctatgaatatataaa

SEQ ID NO: 1014 - protein, 361 aa, DROSOPHILA
MADTKGFSSIETPGYVGFANLPNQVHRKSVKKGFEFTLMVVGESGLGKSTLVNSLFLTDLYPERIIPDAIEKQKQTVKLEASTVEIEERGVKLRLTVVDTPGFGDAIDNSNSFGAILEYIDEQYERFLRDESGLNRRNIVDNRIHCCFYFISPFGHGLKPLDVEFMKKLHSKVNIVPVIAKADCLTKKEILRLKCRIMQEIESHGIKIYPLPDCDSDEDEDYKEQVKQLKEAVPFAVCGANTLLEVKGKKVRGRLYPWGVVEVENPDHCDFIKLRTMLITHMQDLQEVTQEVHYENYRSDRLAKGIKGKENGVKAERDSSSQVVSNSVLGEKDRILQEKEAELRRMQEMLAQMQARMQAQQ

SEQ ID NO: 1015 - DNA, 2796 bp, DROSOPHILA
tttcctcttctactcaatctatctctctcgctcactctattttctttctttcctcctttctgattgcccactttttttattccgtttcctacgtacgcagtttctcacgctcttcgctctcctctccagtgaaaactcgcgccctggattttcacgcacgtcctctccgctggacagcctttcgatcgtttcaattagacaaggcaaacttaaataatataatgtatatttatgtggagaagagccgcgttcgtgtgcgtttccactggagttttttcagcgccgttgcgtcgtcgaatctgactgcctctcctcttcactgctcttcttcttcacttctgctttgctttgcttttcctttcgcaccaattattcgtgtaaaaatactgcaaaaaataccgataccaaatggtgacccgggtatggtcacacttggcactagcaggtgcgggaaataccgttcccacaacaatcacttttgtaactattctgtatttctttttgtacttttctcccggcgtttatttatttatatggctggtaaaatgatagcaagagggaacgctttagtggaggtactgactatcagatacccgttaaattacttcgaataacgagtaactaataattaaaaagtaaatattccaataacgatttgacgctgctcatagatgtcgctttaatctcattgtgaactttgatcgcatttccagcagatggcgctgtggcaaagctactatttctggtatctactaaaattctagcatttacttatgcaagcatgcaatagtatcgatactatcgataaattaatctagctagcattattttggaatatatttttgaaataattaatcgttgataaaattgtaatttttgtatatatgtatatacatatatttatattaaataacgtatttatttatttttgcagagctttttaccttttggattcgctggaattccagcgcctggtaacactaattcacgattaaacttccttgacttaacatttacatatatttactattattcattattatcattattgactagttagtaggcgaaataagaagacgggaccatgcaatttacgagccttttactggctgtgatttttctcataagtctggtttcaatcgatggtgagttcgtgttctcgttgaagtcttttgtttaagttgcatatgtgttgtgtgtgtgtgagagagatataattcgattttcacatggggaaaacggcgaaatcaaattaaaaactaactttttccgttgtattgttatttgcttaattgttccatttgcatattatttaaaattttcatttttaattcacttttagatttaaacgctcagtaaaaccatgttttaaattttaaatatttgaactttcaattgtaggccttctgcgccgctgctatcagtgccgatcccgtggcgaactgggcagctgcaaggaccccttcaccttcaatgcaacggacgtggagcaggaaccgggagtggcggccatcccgtgcgccagcggctggtgcggcaaggtgatcgagggcggcggcacctatgccatcgacgactacgacctggccatccagcggatgtgcgtgcagcgcggtccggacgacaacatggatcgctgtgcggacaccatctacaactataagaaggtgtacatgtgcttctgccagggcgacctgtgcaacggcgcgaggagctggtccagtgcaccccagatgatcctcatcaccatgctgccgctgctcggctcctggctgctccagcggatgcgaaactagactgtttgctttctgtgctcttagccggcaatgtgtatatacatcttccaatactcagcaacactcaatgtaatatcaacagttcgataaatacaaacaattttttgttattacttaaaatcgaatgttcttgctctgcttaagattttattgccgtttactcgtgcattttttcgtatcatttttccgatcgcaaataaggtacttacattcaatatgtaaccattgattatggctatatatggcatagatcccgacttcgggtcaatcagctatcagtggaacagactcgattgtttgcgaaaaagaaacaatatgaatattattcatatacctaattaaatcactcctgctgcgtaacaccattctctttgtttgcaaatagaatatccattcgttttaattagtatatttataaaataagaatataataatcatttatataatcatataatcatttaagtaataataaattttaatataaaaacacgaactcagcataccaactagggttgattcaaatatatacaatcctttatgcaagaatgagaaacatttaacatcaatggctcacttggcaacgcactacttctccaacttatctttttcgcgcaagcatggggggcagcgagagttctgcagctgcatcagctggcgatttttggtgaactcgtggcagtccatgtggtataatccgctgcacaagtggcagtacatcgcttcggtttctgggaaaaaaaaaacaagcaaaacaataaaatattaataaaatcattaaatgggtaatacgaatttaagaaaaccaactcaacaagtttgtggttggtggatgactcacccacacgacgtttgcattcacggcactcgcggcatttgcggcacttggaggcaccgccgtctttatgctgacaggctgatgaagacgcagttcccgatgcgccagatcctcctcctgcgctgctcttctccgaaatctcgtccggcgacttgctcttgcgtg

SEQ ID NO: 1016 - DNA, 540 bp, DROSOPHILA
cttgacttaacatttacatatatttactattattcattattatcattattgactagttagtaggcgaaataagaagacgggaccatgcaatttacgagccttttactggctgtgatttttctcataagtctggtttcaatcgatggccttctgcgccgctgctatcagtgccgatcccgtggcgaactgggcagctgcaaggaccccttcaccttcaatgcaacggacgtggagcaggaaccgggagtggcggccatcccgtgcgccagcggctggtgcggcaaggtgatcgagggcggcggcacctatgccatcgacgactacgacctggccatccagcggatgtgcgtgcagcgcggtccggacgacaacatggatcgctgtgcggacaccatctacaactataagaaggtgtacatgtgcttctgccagggcgacctgtgcaacggcgcgaggagctggtccagtgcaccccagatgatcctcatcaccatgctgccgctgctcggctcctggctgctccagcggatgcgaaactag

SEQ ID NO: 1017 - protein, 151 aa, DROSOPHILA
MQFTSLLLAVIFLISLVSIDGLLRRCYQCRSRGELGSCKDPFTFNATDVEQEPGVAAIPCASGWCGKVIEGGGTYAIDDYDLAIQRMCVQRGPDDNMDRCADTIYNYKKVYMCFCQGDLCNGARSWSSAPQMILITMLPLLGSWLLQRMRN

SEQ ID NO: 1018 - DNA, 8388 bp, DROSOPHILA
tgctgttgttcgtgctcgactgcttaacaaattagacttttgcgtgccgctttcagcaaagaggcaaatgaaaatgccatataattagacagaagaatgaaatgggaatgaaaacgaaaacgaaaacgcaaacgcaaatgggaaaaatgggaaatggtgcaaaatatctcaaatacgatatgcacatagaattgcagaagcagctgtgctcgcagcagatcctgtccatcatcatgcgctgggctcgaatggaattcaattttgctgccactaaacaaagcgcttttccatgcaaggcatgcggaatgggattagggggacttggggtttcgggtttcgggtttcggacttcgggcttagatgtgggacgtggggtatgcgacacgggacaattcaggatgggtcattgtgatttcggcaagctgagggacagggcgtgcacattgaagagaacagaaccgaacagaatagaacagaacagaggaatgtcatcgccgtcgccgacagcgtggttcgacgaggtacaattagaaagacaaaaacaaacccaatttacacccactctgtccacaccggagaccttgcagaccagaaaggcggtcccacccagctggactgtggtgttgtgcgccatcagcttttggagcaggaagaatcgcagaatggtggcaggaagaaacagagcgagagagaaagaacacaagacaaaaagttaaaagttcattttttacgatgccgaaagaggtggtttaaaaagcgaaacgcgtccaagtcgcacaattagtcagcaaaacagtgccagcccaggatccatgacccggaccgagcagcacgagcagcacttcagaggcagagctgcttgggctcaaggacagggacgcgaagaggttgactgggtgttggttgtgggtggccgtggtccgggcgtctggtggttgcggcgcgcctgctatttgaataattagattcgaagccagcgcgaatgaattataaataagcactaaagattaattagtgccggcaatggagtccagatcacatcggactcgtacccgccgtgctggtaattagtgttgtacggagaaagtggtccgaatgattcgccttgggtaatgctgcatttttcggatacgggcagggcacactattttgctgactggagaatcgggtgtcggagcaactgcacttgctggcgattcaatttaaatttgatttcgaatagcactttattaaatccggccggacggagaaagagcgcaatctgtcaatgggacttacctcgctgtcttcaaacattggactgtcgctcgagtcgagattattatccaattttgagtcgccatttataccgccgcgcatccatagcttcttccaatcgttatctgtgagtattgacttttgatctgcaatcaaaaaatagcagccacgagcgttagacaaaaccaattgcagagtggaaagtgcagtcgcaaattgtgttaaggtccggttcttgtttcctctcttccctgccacccaccaaatccgattgatgcgattcgaatgtaatcagcacaagtgtccggggtgctgcagctgcaaatgaatgtgattggccccgcagcaaggacaatccaattcccaagcaggtcaagatacttactttcgcgcttttctaagcctaccgaagtgtgcagtaaagcggttgatttatgtttggctttgctatccattaccaatcatgcgtgagtcgaactccacatctatctatatctatacatatatctatctatatatctatctatctatctatctatctataaaaaaaaagcgtacgaactttcaaacatgtaaagtatagctttttcgtacatataacacttttagagctgcgtaaatcataaaaatttattcgttgttttgggacttgaacttggaagagcgcaacagtagagccaaactaatcataatcattggacctgactaaagtattcggtagttaaaccaagcttcaccacagtttatatggaaacttaatgaagggatagagggaggaaaacagataagttggccctcttcacaggtaagatttaatttcttgagaagctcttgcttccaaacttagaaaataatatttgctaaaagcttctgcaactaaaatccgtatgccatcattgcttacgatcagcgaagtggcaattaatatgccggctctgggattattaagaattcaccgaggcttcctttcgtattttaaatttaatcagagcaactacggtccccgtctgccttttgctctaattaggaaactttgattgcccgggcaacgtggtcgagtagtgcagctgaccgtttggcatccaaaattaaatttacgcaagactgcgcaacggtttttaatatttttttatgctgcgtgctcgagacccgcttggcagaaaccagccgaaggcaggtcgtctactattgactcactgggtgctcaagggttgtgtgtgcttggctgtgaaagtgagtgccctctggaaaggaatttatccaatcaatcagacagcgtagcccgtagctctacgagggactccttagcctcggcggcttgcaatttgttgtgctaaaaatcgagagggggatcaaaacagcgcaaagcagcgcgaaacgcgccgtgtcgttggccaaatcgcccacctccggctgtcggccataaaacacagcggagcgagctttcacttttattgcctcgtaaatttttatagttcatactttaggcatgcgtatgcaatgccgcagttgtacggtatctgtgagtgtactgctcctgctcctgcgtgtgtgagggtcatgtcgggccgtatatgtgttgggattgtcctttgtgcgccaccatgttatttatgtgaccaaagtccgcagtgacgtcaaggcccgctgcattgatttcgaatttgttctgattgaccgaattcgagcttatttatttcgtcatcagatatatccacagttatgatttgactagcacaatgagcaggacaatggtcaaaacacacaagaaggtaatgacaaaaacgagcttcgagctttatcgtttttatggtggtttctgaatgagtgacaaccagatggcctttcgtcgggactcatccgtggtacaaatttggtaatatcgacaagctttccgttttacagtgggtatataattgagaaacacacttcttgttcaagcataaaaacggttattaaaataaaatcaccttcttcctcctacaatcaatgctataccaattcaaatactgggcttcaatttagaaaagttgccagaaggaaaaattaaaaaaggtgaagtgtatatctatatatatataaattttaatgctataccgttgggctttcatataaaatagaaccaaaaaaaaagctcaattaacagcttgaaaatgtcgtaaataaaaataaagtaacattaatataactcaaatttgtcttataagcgctttctatggagccaaaagtgtgggagtgtatatacatataaaaccgaaatgttttcaatctgcgaaattggttaactattccaacgtcttggtattaggtactacaacaatttgcggttatgttcggaattcaaaaacccatctgcatttgaaaaagaaatgatttcgaattattacatttaagagccaccatatttttagtttattatacctatacggcttatacatatatgtaattcaggtcgatatagtttcttcaatgctaaaaaataaagttcatagattcaggatcggccaatatggatccatctgattttcgggtattacccagcgttctatattcgaaagagctacgaataccggtgttcagttcgaaaggaatataccctcaaaccatcgcttccggggtatacaaatcaagggcagacaatggcgaggccacttgacccaagtcgattgaaggcggctttatgacgggtcaggttggttttggtggtgaaaagatagaaagcgaaaatgtttgtacacacacacactcacattatttattcctgcttttgtatgcatggcaggcctccacacacaggccaagtggaaatatattgggcaagttaagaggaatttaaatgctcagctcagcccgagacacaaagccaactgctcagaaactaaggtcatgtgtgggagtggaggggtgaaggccgagcgcgataatagtgagaaaacacgcactgctaataaaatggctcgggccgcgtattccgacgcatcccattcggcgaggcggtacgtgcgcatgtcagctgcctgcggcttaggcgtgtgaattatattatgcctggaagtaggcaacagtaataaaacttcgcaagaagcgataggaaacggaccccggcagtggggctttcagttagaaatccatttctgggctaaccggacgccgcaacaaaagtggctaaaacgggccatatataagttttcgtttcgttcgtcgcatatttcattccccctccttctccgccgcctatgcccctgtccctgcgcctgctaaaaagcgataaataatgaagtcagcaagtgcggctggcattctcgcatgtttattatttataataaatatttcttgtcaatctctcgaccgacgcccacccccacgtccacgccgcttaagttgtatggcccacagtcacgacacattggttattgtccttgttgtcgacgatgtttttgttgtgactgttgctgttgctattgctattgctgttcctgcgcacttgccatgcttcaaattattatttatctgtcccagccctgtcagcagtcagagtcgagcctttgttcgcaagctccgcgcgacgtatacgtaatattttaataccccaccaatatgtttgcagcgggcctgctagtgtgcgagtgttaatccctaaatctgcttaagtcgacgctctttgcccgccagcccgagtgccgaagtgcttagctgtttttaagccctttccccccgttggcccccgtggcccgactgatgtagcccgtaacccataacccataacccgtgtcccataacccatagcccaagacccggtctcagctcgcaggtgaaagatctcgccaggttttacacacggcccacgagcttaattttaaaaccgctaagcaaatttgcaaaaaagctgactgcgtgggaagtgtcttccttagccacccagcttcaaactcatttgcacttgagcccgggaacgagtgtgtggggaagccaggtgaaaggcatccgtttgtgcctcgtttgtgcttgataatgtgcgtgcggaggagcgaccttgagcggagcgtaccacctacacatggacagaccgacatatatgtttgctgagccgcctgccattcactgccaaaataatattttggccgtgctctgcgctgccaacgaagccggaaaaatgtagctgtggaagcccctcacccggatgaataggatagtgttatcagtaggtgatactttcggtctctccctgcagaacccgactcgcttccaagtagagacttgcaaaaatctggccctgaaattaaccccaaagttactggcttcgtcactccactccaccttgtaaatttcacctgcgccgacgctttcgctcttctccgcaaataccgcgcatattttcacacgccacgtcacactttctgtgcaatttaaaagtcaattttaaaagttttccccgacaacgattttcaagccacaagtcgtcgccataaattttcaatttttgcactgtcacacgagccccgtttgttttcgccgcgccaagtgtccaccccacttgcctcgtcaggttgcgtaatgagcggaccgcgcgctttgataaggtgtcgtcgtgggtggcgtggcttgctaggtaatttatgcgtaacgcgtttggccggggggggggggggcggtaaaaaaaataggaccaaacaacgaggcaaacggcgcgacttcgacttttcgtggcgcctcaggtcaaaccaaagccgcaagggcagcaactgcgccgttcccatcaacaaggtgggtcgcccttggcgctaatctctcccctgtgtatttttcattatccttattatttgtgaatgttacgtgttggccataacttaggcgctctaacaatgcgtatacgtgccggtcgcaactgtcaggcggaaggaggcggacttgggggcgtcggggcggtctcttagggtgtggatcgccgcctattttaagtgaattagcggaaggttaaatcgcaatgctccgcggatgggtcattaaatggcttgcatagagtatccgaaggccttaagttacttgactgcatttggataattgctcaaggcctccccattgccattcatacatccctcgtgctcctccaagctcggttgcattccatttgcgaaatgaattgcaaacatttaaatatcccaccgataggagaagccaccccgcccttccataactgaaaatattcgaggcaaagttttgtgccgcaggtgcttgcttagaacacttctagcgtaattaaatgcggcggagactacaataaaattcctggcacaataaatccgcaaattggtaaagtttcgcgctggcttaccgtccgcgttaaggagctttaattgcgaactgcgactgcgaccgagactgagagcacggcttgaagcaatttgatagcttgtgtaaatattaaaataaaccgggtatcggagtgtcagtcagccctgtcagtccagcaggctgagccgttcgcataaatttcgctttaatttacttagcacttcagcaagtccctgccaagcaggcctaattaaattctgtgggccggggaggacaataaagtggacacggcaaggtgatttggtgatttggggggcattggaacgcacctggttcgagggtggtggccaggagcagcgtcggcaggcagagcagcaggatgcgcagttccatcaggtgcaggggccgccgcagacgcagcagcagccgtggcggcaccattggcatccttgctcccttgctcgccaggcccgtgatttctctgttgttcctctcctccgatgacggcctactgtccgcgccctttgtcctgacacatcgatgggcgggcggatcgtattgtctgactgccttttgtggctgcttattagggttaatgggtttttgaatgaacgcgctgaatcctttcagctacggcaaccacacaatgccggcatctccggtgcacatatgcctcgccgggttgctcttgctgctgctgctgctagttgatgcgatgggatgcgatgcgtcgctgataaatgatgctggtccgatggcgatgtgcagctcagccttttttgccagctccgtttttccgtcgcctgtcaatgcgttgttgtcctgcgagtcacaatgcgctttcccgccgctcgcactcctcacaaatttgcagctcctttcttcgaggcttccctctctattgagtcggtgcggaaaaaagctgcatggtcttcatcatttttcatgtcactgcgtgttagcacattaagccacgtcggggtccgtgtaacactggctgtatctatcttgtattgtgtggctggcaaaaaattaacactcgcctttttatgaaattacattcaatttgctctagtggacgttctgcctccttgccgcctcctgcgaataacaatgtcggaagcgtagtgccgatgatgaatcgctttcaacgtgatgtcctcagagggtccttcctctttcagctacccgctgcccgcgttgttagctaaaaagagaaagcgcgcatatgagatggcggtataatataatataataaaataataataatagggtcttcgtgcgccaagagtgcctatggaaactaatggttgctcctaattacaattgcaatgcccatcgcgagattcgtttcccgacctaattccgacggcgcgctcgacctcacgagctgcgggggattcccattcatttgcatatagaaagaaggaaatttatttattgttcgagcgaatttggcacattatttataggtcagcgatagccggactccccgagcgaggggaacagaaacagggcggtggctctctggacagagattatgcaaaatggccggccaacaatttgctgaactggacgctgcgcagcaggactcagtcggggttttccataaatttgtatttatttgctcgcacgcgtgagtaagtttatttaaatttttatgctgagagccgtaaaaaacggagagcacttgagactcggacaaagttttgtggcatgtcataatttttatctgaagcgcggatctgtcttctgagtctgctccttattattgccccacatttagcattcagtagtattttcacattacgacgcagcttatattgctatgggagccag

SEQ ID NO: 1019 - DNA, 699 bp, DROSOPHILA
cgcattgtgactcgcaggacaacaacgcattgacaggcgacggaaaaacggagctggcaaaaaaggctgagctgcacatcgccatcggaccagcatcatttatcagcgacgcatcgcatcccatcgcatcaactagcagcagcagcagcaagagcaacccggcgaggcatatgtgcaccggagatgccggcattgtgtggttgccgtagctgaaaggattcagcgcgttcattcaaaaacccattaaccctaataagcagccacaaaaggcagtcagacaatacgatccgcccgcccatcgatgtgtcaggacaaagggcgcggacagtaggccgtcatcggaggagaggaacaacagagaaatcacgggcctggcgagcaagggagcaaggatgccaatggtgccgccacggctgctgctgcgtctgcggcggcccctgcacctgatggaactgcgcatcctgctgctctgcctgccgacgctgctcctggccaccaccctcgaaccagatcaaaagtcaatactcacagataacgattggaagaagctatggatgcgcggcggtataaatggcgactcaaaattggataataatctcgactcgagcgacagtccaatgtttgaagacagcgaggtaacacggcgggtacgagtccgatgtgatctggactccattgccggcactaattaatctttag

SEQ ID NO: 1020 - protein, 99 aa, DROSOPHILA
MPMVPPRLLLRLRRPLHLMELRILLLCLPTLLLATTLEPDQKSILTDNDWKKLWMRGGINGDSKLDNNLDSSDSPMFEDSEVTRRVRVRCDLDSIAGTN

SEQ ID NO: 1021 - DNA, 21748 bp, DROSOPHILA
aagtcaaaaaagtgtaacacgcctcgtcgcattttaaccccttctgtgcctcagaaagctgaaactattgggttaagagtccgggaataccaacagcatttgatagcttggaccatgtttaatgaattctaaggaataagatcacaccttctcactaaacaagtacgaaatgttcttaatccacaatgcacacgtaattaatagagcgagtgtttacagcaagatgtaaatattatatatcaattgtattgccatttgtgattaaggatcgtggatagtcatgatgcatttaaaacatatttttaattatattgagcaatactttttactaaagccgttgatctgcctttgttgatccggctcgaagcaccaatgtctgtcgaacttccttgattagtacttacatatgtttggttaaacctttttcgaaaaaaaccgtattccttatttcaattattttttttttttttttgcagatgatttacgttaacccatcgatggatcagcaagagcagttagtagcagtactatggtaatatcgatcggtacgatgggcctcgtgccgcagccacatcgaaaatttgcaacctatcgtaggatgtaaaggaatatccccgaagagaagaaccgcaaggcgaatatcagatagtggataaatagtttagaaaatagaagaggcgaaccaggggtgaagcgccaccccacccaccgtcacacaaatgagggtgccaccaacaggttgaccaccaaaaaaaaaaaaaccccaaaaaataagcaaaataacgtagtaataaaaaaaaagccaaccgcacgacaaatagaaaaggcaaaaacaaccgaaaccaccaagccagccaccgaaagagatatagcgctaaaacagagcgagaggagagtgtgtaaacagaaaaaggcgaagcacaacacacaaaaattcaaagagaaataaacccgaaaacacacacaacacccccttcaaaccacagtatcccgcaacaaaatgttacaaaactcgaacggcgctgccgcagcgcattcggcagcctcagcggtggcgactccggcagcggcggcatccgcagcagcagcagctgctgcagcggcggtggctgcagcggccaacaacgccgccctggccgcctcctccatccagcccaagctcatcgtcatccgccggcgacccaaccagggattcgggttcacgctgcgccacttcatcgcctatccgccggaagatgaccaggcatcatcatccgcatcgggtttggtatcgggatcggcgacagcagcaacggcggcatcggtatcgaccaactggccacaggtgagtagggataatgatggttatagtgggggaatataggaaatattgagaatatagagaaaacagaggatgaaaagaacacaaatgatagtatttacagagaatataaaggattttccaatacatattgtatacggcagtctgagtagtgacgaagcgcaccaggagagttttagcaaacattaagagacaatagagagtactggctagaggttgtccaaaaccaagcgaatagtggtgactgtagccacaatgggtcgggatataggtgcagaattaaaaaaaaagggaatacactttgaaaaataatcgacgttaaatgtagaaagtttaaattgtttctcatgtatctcaagctctaaatgaattatttaggaatatatgaactttggcaatttaacaatgacactttaactatgatttaatttgtttctttttataaaaatatatcgcataaagtttgttaaacagatggtaaaactaaatgtctttggggatttaatatatagtagaatataccaaacatcgcataatctacattcttgtgtagagatttgtaagaagaaatcttaataacatcatagaaatgtccttaaaagcaccaagtttaaaatctaatgggagatgtagtgcattttttattcttcattttttagtccgatatttttgtctattggccccaagggaagtgcaagtgagagagcgaacgactctctctttctgtctctcgcgctgcgctgaagcgctgcctcagttgacgccgacgtcagcgttggcgttacgtgagcgctgcgcacgggcgacttattcaaattgccgcatttgctttttctgctttctttttgcttttcatttaagcgacggtgatacccagcacgaaagatcgccaggtgtatttcgactttaatcaaagaaatactctaaaagttaaaattccatattttaaaatcaccctcccttgaaaaatcatgatttatatatatatatatataataaaaataaaaatgtaaaatgagattgcaaaatatgtcgttcaaaacattttagattttcctaatcttttcagtgtcgttgatttaacgctttaatgcccctaatacaaaaaaaacccaatgcgattctaaaattatgagttaaaagatgagctctcttatctttttttttttatattgaaaacaaaataaaaataataaaatagcaacaagtatggcgatactatgatcttaataaatttattagggtattgaaatgtcggtaggggtcccctctctttctcttttatttttgcactaatttgcgttttgctcacttcacttttttgagcccgttttatttttgttttgttgatattacatcctccgcttgccgctcttactcactcgcacactctcttttcgtcttcttcttcttcttgttgctcgcaaggcgactcaattcaatctacactctcctcgcaaaatgtggtctcacgacccacagtcgcgttcgcattaataggtctatgttaaatgccacagaaaaaggtttttacaatttttaagtacttatcgaatgtttggatttcgtggctttataagagaatttaatttaagtttttctattatttcatttaatgtactcagtaaatgactttaataatttgatgtataccgaaagagatttactatttgatgatattacaatcgtttgaccatttgcataatattctgtttcgattccaattggcgtgcagagatccctcaaaacatccctctgtagttgctatacggcagacataaggattatagtctatgcactcatggtctatttgtgcagcggggggtacctagttttcgcacctcaggcgtacagctgactaactatttttttttttttgtttcggtttcgtttggtgtgtaggaagcctccagtgcggcgggcagcaacagcggcagcagcagcagcgtcggcgtcgctgggatcaccggtttggagccaacgtcgccgacgtcgctgccgccgtaccaagtgaaagcgatggagaccattttcatcaaagaggtgcaggcgaacggaccggcccactacgccaacctgcagacgggcgaccgcgtgctgatggtcaacaaccagccgatcgctggcatcgcctacagcaccatcgtctcgatgatcaagcagacgccggcggtcctcacgctgcacgtggtgcccaaggagtgcgatgtcctgcagatggtaagctcatccggaaagaggttctcctcatcccaactccatcccacatccccagagaccggaataccgaagctgccaaagtgcttgctgcttctttggccaaagtgtgtgatgattaaaaaaaaaaagtggtcatctttataaggtctgaccttaaattggacaaaaggcgttagagtaaaaaaaaaaaggccagcaaatccggtgaattacatgagccaatcgggtctagtccgcaatatcactgatcttttaaatatcctgtatataaacatctaaagaaacgtatctcaacaggtcgcagatggcttaggagtaatcatgactcacaaactgagaaacttcataaatacttatatatatatatttgtaactatgtgatatcaccgtaacaatagagtgaatatctcaccttattcacaatagttaaattgagatgaaattgaactcttatttattgaagaccgtgtaacgggcaacccgctttgccatgcaattcagtttttaaacaacacgaatcgaatttccattaatcattaattaatcgtgttatatgcatgaatggtgctacatttcgcagcaataataatgcgtttggaaatgaccagaacttgcagcattgaccaaagtccgcacttaaattattaattggtcgaattatagctagcttgagatacatacatacggtatgtacatatgttcgaaactactaattaagaatgtgactactattgaaatacacccactgactaattcgtcgcgttgtattatcatcatctctaacttgttttcctcgtctttttaacagcactatacgagcattgcccacacgccggagtcgaatcgcctgaccatgtcgacgcactcgccctcgctgctggccaacggctcccacaagaccacatttccagcggcggcagcagttgcagcaccaccgcatcagcatcagcagcagcagcaacagttgatctcatatcccgctgttgcagccgtgaccacatcaacgccggcaggatcgccgcaatcccaatcccaatcccaatcgcactcgcaccccaacacccatcatgcaccatccctgcacggaggcagtcgatcgggcagcatcaccagcacggccagcggaggcatcaccgtcctcagtcagccgttctacccacagcagcagcagcaacagcaacagcagcagcaacatcgtcatccagcgctgactggcggcagcagcagcatcgatttcggggacatggcacatggactgcgccagcatcagcagcagcagcaacatctgtaccagcagcagcaacagcatcaccagtttatgcggtaagtcaacaaaataaatgagctcaccttggcgaacggcaagcggcgattgacgtcacacatgatggcaattacagcggattttcggatttcggacagcagaagaaagcccacgtatttacaacactttgagattcataaacaaaatctagcacctgtatgccaatttgctgtattcaaattgaacacacgggtcccattaatgttggtagggttaaagcagatttcagttcacaaaggttcgacattcctgaaaacgtatttatcagattgaactatatgcttataggatgtatgagcattctttcctagcacttttttttttagttgccttattcgtaccagtcatgaatatatgatgagaccaagtcgcatcaggaccaaaaaaccaaacccattaaagaccagacaaagtttttacgtttgccttgatccaaagacatttaatttatgtacaattggctgaaaattacacgtcaccggtgggcaacacttggaagccatcgaagtacttggccagcggaatcgccagcgagaagagtccatagctctttatgaaggtccagcagaagtggtcattatagatgatcgtcaatacggcgcgagccattagcagcagctgaagtgttttggttttctccaccatagcgccacaaaactgtccatgaattgtgaattgtgtattatggtgggggggggatttcgatagtgctggccaactggccaacagcttacctgattgctcgactcaacgggaacgaaaactatgtggactcctttttttttttcaacaaaatttctgatgtgtgtgctctccaaaataactgaaactgactggatcaatacggaaatgctgaaaacaccatgtcaactaggattccaagtgcgtctgacttcaaattctcggctactagattgtttttagggctacacgagtaaactgaatgcaaagcacggtcaaatgcaatttgctccactgtgcagtggcgatccgttttgtgatttatggtggcaaaagttgagaggcggtcagtcgtctcagccagctgtttttagcaaacggcacacacagatgcatttactcgcacattatgtatttcactttcattgccacacaaaaaaaaaaaaaaaccaacgaaataagttagtgaaaacttaatatttgaaattggaaatggagaaatgccaggcgatcaggggggcggaaaggctgccgccaataaggcaggcagatgagagatgaaaattgtgttttatggcgatgaactaaatgacaataactaaccgactaatgaacagcaaaatggcggcgcacaatgtgcataattaaaaacgattgtaaacgaactctctgtggaaaaggttttattcgccacgacgaggctgctatttcctagatacagtatgtatctatgtttgttggaatttccatctgatgtccgagtttttgtgacattattgttattttgccaacgatttattgcaagttctatggcaagttgataatgtttttgatcgcagatttaaagatagttgtaatatttgggagcaactcggatgactcgccgcagttgccacatttgggcagccccaatattggtcgccattgtggctgcgccggggcctcgggctcggtgatttcatcctagtttcccctcggacgcaacccactcactccagtgctccttctcatctggcgttcccatttcatacattcctcattttagtctcatttcattcatcgcccgactcgacgactcgcactgtctttccatgcatatttgtcattgttttgcgtctgtctgttctgaatgaaatttattttccatatattttccgctgtccgtctgtccgtttggagatgtgcaaaaaaaataatttattatttcgtattctataaaaagttcatgtgacgtcagcggggatataaaacgtacttatatgtacatagataagatctcgacctctgcaaagggtcaagttttacgaaataatcaatttgttttattcttcctgtttaagttaatgcctattttaattatttattgatttctgttctatacttttgagttagttatcgttaaagtgctctggtgatggaaatgtttagaccgaaagggaaaaccattagtttaattagattttgtggtatgaaagattcaatggcttttgtgtgtgtacccttcgctttaattctttgtttacgatttctcgtattcttttcggaaagtttgtcacgtcttaagctgcctgcatgtgcaattttcaaattacgtgagttggttggtgcaaacttaggcgagcatctaaagaactgtcagttagaatagatacacacgtcaattgacccacagtcttcacaagttttttaattgagagatagctttggaaattgattgattattgattgcgtttcatgcgcaacgaacatgtaaacacttcacttggattattacaacaaatttaacacctgcatgtttcaataaaccatataaccatttctcacgatttgttttcttgttttcccatgtgaaacaaattctttggttgaaatatagatacttttctatactttcagctcggttttattgaaggtaaaaccttgctaaaaactttaaagcgccaatttctgccaccgcataaataattcaaaattattttaatattcaaaacgcaatatcagacatttttcaacatcccctgcagtcgcattgcgtatacgcagcgttgctgcacatgaatatgaataaataaatcaattattattactgcacagtaaccactacccccattgactaatcgggggaaaaattgaggggaaaaaggaaataaataagtaaccgcataactttatgcacacacaacgaatgtaagcggacacctcgcaacaataacaataaatttgttgaactgcaaaagcgaatatttgctccattgttaaatgattacgataaatttaattgaatgttgtatgccagcaaagaatgggtagcaaataatgccttcaattcccgccaacttcaagtcgtctcctcgtttcgcccatcaaccagctacccccccccccccccctcccccctcctgtttctctcgagcggatgcggatttatcttttcgagatcgagatggaaactgagaccactcattggattgggtttgagttgatctgccgggcagccggcaggaggcttcatgttgtaaattattgactactccaggcattccaaacatgccactgaagtaatttacactgcaagaaaatcttgcgcctttgtgtgcggcgcggtatgtttgtatgtactttcttttgtttgcatatgaatttcgacttcaattgattgattgattgatcgtccgattgattgatggctggcgaaaagatgtcatcggaaatgcaaaactcattgctgcgtgcacagtgagtgggccttattttcatttgcatctaatatcatatcattattttgatttgaaatattctattgtaaaaatccaagcaagactttgtcccactgtgcactgtacaaatttaactactttgctttgacaattacgtatacgccctgcggttgggtggctgtcccccctcccccctcccatcaccccatcacccctttcccccgaccatccgcccactcggtaaataaataagcaagacaaggttgccagctggttgatggagagaggggtggggcggcttggcggtagagtatggggtatatatttggtcagtcggtgactgatagtgatatagcgattcccactctctccctttcgccgatcctgtgcaaactgtgggcagctccctgcgcccacttgccgcccctcgcttcatttttatttgtttatctatttattggttacaaaatacagttggcactggcatttggcatactaatgggataatggataatggatagggttgtgaaaagggttactacaatcaaatcaaagttaaatccaagtagatgtttaatttttattgtcttgagtgcagttgttatgaatttaataagtataaaaataaattttatacaatgtgtactcaactttcttatgacgagacaatccataggatgctacatcatgcctgcagcgaattaagttcactgtatgaaacatctcgcagagggctcactgtactgaaataataaaaaaaaggaaatcatgtgagaggagagcatcggtcggtgggtcgttcgccattcggtcactgcccactcaatgggtctctttcaattgctgagcctccgccgctctttaatacaaatttcatacatgcatacaaagccaatttttgctgggttttgttgtgccttcttttttttttttatttatttattttagtttagtcgcaggaactttgcgtagtactttagtttagttgacgatggcgagcggttcgtgcagatttcagatattgtgatacgcggcaaacgaagttttgtatttttttttttattcacttactcgcataattcggcagctccggctgccgtacactgccagaaaaatgtatgcgctaccctatcagggggtgaaaaagccgatgcttatacacatgaaaatgatacgattcgagatcgatccgaataacgaaaacaggttaatttgccatttctctagcattaattaattcaaattttttgcctgtgctactgataatgtgataatggaatagaatgaaacccaaacaatttgagcaacaagaattacaagaaaacacaatttaccgagaccttgtccgaatacaaaaaaaaaaaaagaaagaacattatatcaagtgttttccatttcaaacaaagaccacaatgaacgtgcctcgagtaaaggtgcaaacgacgaatcttcgaaacgccagttttcgtcaaggaagtgtttcagatcagttccaaaagcgcagtggatatatctaacagatatctaacatagctcccaacaagtaaataagtcaataaaaataactctgaagtcaaacttttctccacgagcgtctttcacacaaatctcttcgattgtgcaatgaaaaccctgtaaataaaatactcgccaacgacattttctatattaaatgacttaagtttctaaacattttttttttttttgggagaaagaggagaaaattgtggaacctgcggaaattaaacaccgcgagaaaattagagtgtgtcagaggctgtcttttttggatgtgcgatggcggtcggcctctctctctctctctctctcactctctctctctctccctcacttttccttatctataccgttccctctgcggtttctgccgcttatcaaatatgtcaacaattttttatttacgacttgttaattgcaaagagtcgcaagagttggcaaaacgcaaatcaggcaactgaaagtaatacgaaatgtgcccacagtgcagacaataaaagcgcgaaattccgcacacagcaagggacagagcttatagatagatatgtatgtatatatgccccctatagatacagatatggctaattcgctggccgccccttatcgatatgcaccattgtggggtgtactatgtgtgtgcatgtgggggtgataagggcttttgggtgtgggtttaggtgtggttgtgggtggtgaggggaaatgtatcgaatcgaatcgaattgaattgaattgaatgcgagtctcacttgtgtagcagcttttctgcatcacgcacccaggcagagaaaaaaagggtatattagatgctttgcggagtatgaaacagatgacacgtagcgtttcctgatcaggatcacttggcaaaccaaccgtactgtccgtccgtatgagcgtcgaaatctcaggaactataactataataatgcttaaatcatattattagatttgtaaaggtcatggttctgtctcaataatgttcatatacgtgccgaaaatagtttaaatctggccatgagaatacgatttaaagttaactaaaagttcattgaagagagcacgctaaacatttgtatctccagctctctcgcgttttcattggctatttaaagggtatccaatagtcgcgccactcgattacagcattctcttgcttgaattatggttgtaacatacaacatttaacctaaatcatctttaactttttttttatcgcttttaaagggaatacaaattttgtgtacccgttcgttcaatcgaaatttttgctcagtgtgcaaatcatcgaattttatatattaagcttatgcatagataataatcccgacaaatgcccgcgcgtttaccaataatcacacatatatttgctgagcacacgagctcctgatccgactttttttttatttccattgctacctgctatgccgctgcacagtgggctcgattcgcactgaatcggttcataagatgagtctataaaaagaatcaagttgtttgtcggtgaaacttacaaaaatgtacctaaaaatgtgtctcaccgataacgccgtagtatcaatttaatataacttaatcccagcgacaagaatcgttacaatttagaccactgtgcgctgacaactaggcaatagaaacatggtgcgaatgtgtgtgtgtgcttcctttattctgcgacctgtgaaatatgatccacggatatatagaaggtgtggggttgggggctacgtttgggtttggggccatctattcattaccttttgaccttgacagtctgccggtgtttggggcgtcgagtgtgggaaaggcttttaaaagcgaattgaattaaccatcctggcgcacacacacacttgcatttaccatactatttttagctttgaactttcatttgacaatctgaagaggcggagataggttacgaacgcgggatgcaggctgtgggctgcaggatgtgggttgcatgatgtgggatatgcaggatacgggatgcgggggcaggaagtggaggcatagttaaactaatttgccatttgcagtgctgccaccacagccgagaagctaaaactcgatacgcaaatgctgctcctttgtgcgccacatggaacttaattattcgtgctgctctgttctcagccacttaaactatggcccaaatcaaatttgttttgttttgcccgcccgtagccgttggttaactaagtgagtgcccactgtagcaacgctggtggtggtggaaaagcaacagagaaaaacaaacatgcagcggacaaagaaaaatgcccaaaaaccggtccacaatttgacattttcacatatcacaaaaggcttttagccatgaacttatgtgttgtgtgtatccacttgacattcatgtcaattagggatgtcagcggaaaatgcagaaaatttgacaaacgcgtgggtttgattgcatgttaaaatttgctacatttttcattaacatgataattctcggaatgtttttgctcaattcttttgctcttgcaaaattctgcaaatttttgtgttgacattcgtgggaaatgatcgcaggttaattaatttttaaatccacaggaccataagtgatgatttgaatactgactaaagcatttatgtttttggcttttaagcaaatgaaaccgtgctatttaagctgtgaatcttttgtattgtgtggtcattagcggttgcgaaagtcggaaatgtaaaactttttccaactggtggtgtacgagctatgaatatgtgaaacgcattgtttggcttccgaatttccccctcagtcaacctgtacgtcatggttggctgataataaaacagagattcatgattttcacaccaaactttgtgtctagcaatgacagttataaattgtatcgccggcaaaggaagtgccttaaacttaactaacttaacaagcttaactactactactacttggttctaaatttattaattaattgaaaatcattttttaagactgaaacggaagcagatttaagttcaatttgaagcgcattaaatcaattgtttgcttaagatataagaatattgagctttggatatgttttccgcaaaatagggaatggaattcggctatatgtcgccgatcgtgatcggcgtacggtagtgggaatattgcgcatgcgcaccgtgtgacgacagtgaatcggcggagccaaactcgaacgcattgagcgactgacaaactgatggtggcacgtgccatcaaaatgtggtcagcacacttggagcgcactgcttttgggcgattgccaatttggagctactgcgtctgcccatcagccgctgattcaattgacaaatatttttgttgtggtgcgaaaaaattatggggctacaaaaaatgtctagatccgccaacagaagcacttgtgctcggttatcgcttattggaaggcaaatagaaaacccgactgttgaatttggtgtttaaagaggcgttttttcggtgtaaattgtggaaacaaagttcagtactaaagtacagtggctaaactaaataaattgaaagttttcgtgttgagttttttgtttgttttttgtttgcattaaatgacacaaataaggtggtattgcgaatatataaatgaatatggttgctaggaattacaagagaaatcgaatggcttttcatgttgtaaataagagtttggtgttttatgttctcgattctagctcgacacattttaatggtatcaactatgtttctctatattgttgcagtgctaatcagccgccaaatttaacagtattatcggccagctcggcaacgaacacgcccacacccaccgcccgccagcccaagtccgcgacgagccacaatcaggcgttgtatgcagtcggagcgggtccgagctcagcagctggatctgggtcgggatccctttcggggggcagtgagaacagcgaccttatgatccgactgcgcgagtccatcaagcagaaggaggagttccttaagtcgccggtgcccgcctccatgagctccgcctcctctatcaacggcaaccaggcgcagtcgtcatcgccggcacagcagcaacacctgcagcagcaccagcagcacttctttccctcgcacacgccgccaggtggtgtccaagtggtggtgcctccaccgcgcagtcgccatcaagtgatgctcaagcagcagcagcagcaacagcagcagcaccagcaacatcatgtccttggctacgacatgtaccactccggtggtaagctggtgcagcggtcttccacggcgcctggcagtgtgtgccaccaacaccagcagcagcagcagcatcacctctatcaccagcagcaacatcagcagctccagcagacgcaacatcgccaggtgatgatcaacaacaatgccaagtacgccaaggatctggactattttgagacgttgcaggagacaggagtcaccaataaggtgtaagtactctgtaaagtacgcacccaatgcgtgaataaatcattaatttgttctttctgttcatccacagctttgagcgcaagctggtgtcacacatgtccaagggattcgatccgtttaagccgctgtcgatcaacaccagtgccctggagtcgtctgccagcacgtcgagcacttcggccaccacgacggtgaagaagcaaagtgtgctgtatgaatccctgcagcagcatccattggccaagtaccatcagacgcagcagcaaacgacaacgacgacgacggtggatggacagacgagtagccggatggagctgcacaaggcgaccctggcgaatgccaccatcgatccggtgccagttggatccagcagtgagtctagccttccatctactccacatgcccttctagctactaagatacttaacttatttttcatatttggtacagagtttgtgacgctgccggataagccggataagggttcctccgttgccaccttggcggacatcgccgagagcagtggtaggttcttggtttgcctgtctcgtttgctcattgttcctttgctatatgtgatgcccatgtaaagcggaatatcaatataaagtgtcccttactttgggcagaatggtgcagggttgagcttagtgttcagaactgaattaccgaaacgttattatcctgcaaagtgtgacagctttgcttttataatttcagtccattagagtctttatttatcgcatttggtagtcttaaatatattattaaactaatggttggtcaaagccgatggtcaatttatgtttcgccttttattttacagcagcagccattgtggacagtgcgtcgggaagcggcaacgttgtgcggcgctacaagccattatcctccagctcctttgacgaaggcaaaccaatgcgtaggatatcctacctgcgggcaaccaacaatgagaccgacttcaatgcggaggctgccgctggcggagatgccgcggcaacaggggcgtcaggaccagcatctgcatcagcagcttcatctgcacctggacccacgccctcatctgctcctgcaccagctccagcaccagcacccctgcccatttcgatccccattccggtggctgctgtcgtcgagccgcaaaagacgaagtccctggtggaggagcatccggatcccacctacgatgtgatcggaggcacaggtggtggccacgagttcatcgagacgccgaacggcctggaggatgtgcgtctgtcggcccacgggagtcggagggcctccatgagcagtgacatgcgaagcaggtttgtccgtatatcatattgccaatgaataaataaataaacttgtttttcgaaattgaatagcatccacattgatgccgagttaaatggcaagtatgtgccaaacgaactggaggcctttgagacggaaatcgagatcaagtcctcttgcatcaacggaaaagtgagtggtccttctcacaaggcagccagaataagcatacgaataatactcgttccgttttcagcgcatgtccgagtaccgatcatggcgtcaggtgaagctggagatcaagggagatctgctgcgtatctactcaggccgacatgccaaatcggagcacaatgtaagttctttctagatggatggaacctaggcctcgttaactaatcgaaatgatcgtcttgttaccttaggtgatagaacttgatattagaaactttaagttcttcgacgagtcgatggataagaagaaatacttgatccgtatgcagtcgaagccatcgcccagtggagcccatttggcctccttgggcaacgagttaaacctggacgagggtcacgacaagctgctaacctcgtcgggcagcagcagtgcgaatgagcccgctgccaacgcagcatcggccctgaccgcatccacctcctcgtccacctgcagcagcggtccttacacggagatcctattcaagacgaagagcagcaacgagatgaagcgtctgtttggacttctgcagtggaaggatagcctcaactacgatgataatgtaagtgttcatataagtgcatataaaccgaaaaacgttcacttacattacatttttaacaggagcaccagccacagggcaagcagttggcagaaccacagaaaacagtggccagcgccagttatctggacgacgtccaaggtggagcgagtgcagccgacagctcacccttgagctcccattccggtggcattgcagacgctagtggcagtcatcatgtttctgcgctaccagcagctgcggctattgtcgccgccaccagcgactccatttcgccggtgatgaaggcaaggaagtcctcttcgcacaagcatatacctgataaggatttgggatcgcccaaatcgaagaactggaaggatttgctcttccgccgtggcggcagtggcagcggaggagtgtcacaccacgacttggcttcgccatccgcctgtgcagccaagcagattggatctattggcgttccactgcgcagctgtcccatgtcgaaggtcaatgcatatgtgccgcatctggtagaggtgtgcacgaacattgtggagacaaagggtctgggagtggtgggcatctatcgcatacccggcaacaaggcggccatatcagagctgtccgaacttgttaacaccaaggactttcagttcgagagctgtgccagcgatgaccgctgggaggatgtgaatgtggtgagcagcctgctcaagttgtttatacgcagcttgcccgatgccttaatgccggcaagttactatatcaactttattgaggcggacaagaagtttggcctggagagaattgtactgttgcgcgagattgtggaatcgttaccacggcatccctacgaaacgatgaagcacttgattcggcatctgtgccgagttagcggcaattgcgatgtgaaccgcatggagcccaagaacctggccatcatatttgggccatctataatcaggacgccgaacgatactctggaaacggcagtcaaggacatgaagcatcaatgccgcatcgttgagctgctggtcacacaggtaaggatcctgaatttatagttttatataataaatgaacaatctacatatatgtatcgttgaattgcagtacgactacttcttcgaaggcggcagtctgccggatatagccgaagtaagcggcggtacagctgccgtaagcgccgctcagccgcagcagcagacgcaggaggatcagacgagcatgctgctgcacaacctgtcgaagatcgagcggatcacagagcgcgaaaccacgcgcacctcgcgctttatgccgcagctcagacgaaagacccatggcaagcgcagcgccgtaaactcggacacgtactccggcgagagcgttctggtaagcgggagctccttcaacaccaccaccaccaccaccaccaccacccacaccacaagtagcacaagtagtagcaacaccatcaccacaaccatcagcaccaccaccatccagcagcgacgggcgcagcgcaaggctgtgcagagcatttgcgaccaggctctaatcctgctcctgcccacacccgtttcttccgtctctcttccctttcagtcgttggactacgccaaggcgtccgcctctgcctcggcatccgcaagcagcaccgccagtacttcgagcagctcgacgcttcacagcgggggcaaggcatccgcctcatcctcatccagttccactaccaagttcagctcatcgtcatcgtcggcgtgctcaacaacggcggtggctatttcttcctccatctcggcgacgtcctccaaattgttaagcgccaattttaagaagcgtagcacaggaggtttcttgggctcaagatcctcgcaccagacgcgcaaggccagcttggacgaaaaggactcaggacagtcgtctggcagccttggtcacagcctgggagtaggcataaatctggccaaggaacaacagcgcagcagcgtggacatatccattctgctaacggacgacgactctagcagcaggctaagcgatacgggtaaggatttaaggcgtaaagataagtgatctgataattatgttatgtccctaccgttaaccaggttccatgtcgctgacgaccattacggatacactggacagcaagctacgcaacttgcgcagcggctccgaatcgaatgatgagaatggatcgcccgagtttcccaagaaccggcggcacaccttgggccagcctctgcacatgcactccgagaacattccgtatgcggacgagtcgcccgagcggctgttccatcagttttgcaatcccctggagacagcccccttatccctgcatctaagccgctcctgcacggccacaaatacaattggtggcgatgaaaagccttcgaaacagtcgggtggagttgcaccactgcccccaagtttgcttaaggccgcacataagctacagcactcagccacggtgcccattcatcagggaagctccactgcaccaactagcggagcagccacgccagtaggcacgccaaccggaagcggtggggccggagctattccctcgcgcagctcatcgagcagtgtcacgacgctaaccaaaagcatacaacccaggttcagtaactatctaagctacgaaagaggcaatgcagccgctggaggcgccgaaagggtggtgggatccgccggaggagctgcctccgacgacgattccgagggctcgaccaccagtgatcccaaggagaagctgcttctcggtgaacgaccgtcgccttcgttttttatcgagcgctacaacaaaaagagacgcgatcatcggttatttcgcagcgccagtttcaattgccggaactactccaccaggcacataacggcgcagacatccggaggagtagcggcgggagtatcgggcggagtagctggagcggtggcggtgggggtggcttgctgccaggcattgagcaccactggcttgaccaaggacgagaagactgatatgaacctgaccaagaagcgccagatccagaacaagcagaatcggtccattaagcggcggcacacagtaggcggacctcacgactattccgccagcaatggtggctgctcgaatcactcacacggtcacgacctggcagccatcaactacaatcaccacaatcgccatcaccagcaacagttgttgaaactgggcagcgctacatctggcggtggaggcagtggcgcagccgcggccgagacgacgaccaccacaacgaccaccaccacggtgctgcggcgcctcggtacaggtcaagctggcgccgaagctagtgtggcattgcccgcatcaagttccggatcgagcagcaacaacaataactcgccccaaagcgatggcagtaatggcaacggcggtggagtggcgggagttgcctccaatgcaccaccaactggcgtaggtgtcggtggcaacaacagcagcggaagcagcagcaacagcagcagcaccagcacaactcccgctgggaacggcgatcaggtcctggaagtgggcatacgtatcaagaacattagccggggtcgcttctaaaaacctgtatacccagactaagaaaacagacggtggcaatttcacatggtgaaacacacatgaaacactctgggcgaactcacattcttagcaaacagtctatacaaagctaaaagtgctaatatggctaaaagcaggcagtctgcttatatcgcgttttaaagaacctgacaaaaaacatagttaaaaatagctcctagtgcagattgctgcgacaagaccaacccgaaatagcagttgcttaaatgtggttaacctgattaattgacactttgaaacccacagtttacaagagtattaacgaaaggtttaatatataaccaaaaggcataatgagaagatatttaacaatagtctgttaaacacacaaaagctaaacacacctttaaaaaaaaacaaaaaaaaacaaagttaaattgaatgttaaccctgaacaaagttgctagaaaggcaaatcgttgtagcaaaggctatgcgaacacctctaagtagtcttgcttcacagacccttgcgtttaaaactatgttttgcatgttaaacgatgaaaactaaatttaaattcaaatagggcgtggcaaagctacttcaatggagtgcattgtaccttctgctacttaggatctgtaaaaagtagtcatcataatctattttactatatatacctatatatcaatgtgcagttgcagtgttgtgtccgaattgggtcttaaaagttaaccagaaggcgtgtagagaagtgttgattgcgaaacaaatcagcagggcagttgaaatacataatcttacatattctatcacaatatatttatatattcatgcgcagaccccaggaagttgtgtcgaatacaatatattacaaatataacccattgaaactcgacccaggaaaacttaaactaatcagttagcaaggatccgagatcgaattgcttaataccctgtaatgagaaggcacaacttcgagggaaaacaaatcgtattaatgcaacgcaggcaaaacaatctgtacgaggtcaggaagtaatttattcgcacacacgaagtacacaaaacacacaaattaaatgggaaccaagcaaagatggcagatatattgcgagagacagagcaagatatatacacataacgagtgacaaggcgagggagatagaaagagaaagagagaactattttgtaaaacttatacaacacattacagagaaatcgcataagcaaccacctacggtaaaggaacaattgatggatagtcgcctgtccgtgtccgtgcaccattgagttggatgagtccttttgacaaccaagttgtgctaggtcctgcatagggatcagttctgttcttgatttagatgtgcatttgtttttcttttcttctttgtacctctgtacctgttgtacaaaaattttagggctgatgatccccattttggtgccttaaattattggctttaaattctgttaacctttttttccacccacaaaattgttttttgatgaaccaatttttttttttttttgtattatttatttggagaatggtgctggcggaaatgcatgatataggtgcagctacaaagctatgaagtaggggatacattttcccgattatcccgacaggcgactagaagagggatggcgtgttcgaaattaggtttgattgataaagcgactatatgtttaccatgtgacgcacgagaaacggcataaatttacatttacatatataatattatatatttttgtgtagtttgtatatgatttaagtttggaaaatacaagaacgcataaaagtacatgcaaatgcatatgattaagcgattagatagtagttgtatagtattcctcccattttttttgctgtatatacgagttaatttttttgatttcattcacaattatgatttacaccacc

SEQ ID NO: 1022 - DNA, 7243 bp, DROSOPHILA
atgttacaaaactcgaacggcgctgccgcagcgcattcggcagcctcagcggtggcgactccggcagcggcggcatccgcagcagcagcagctgctgcagcggcggtggctgcagcggccaacaacgccgccctggccgcctcctccatccagcccaagctcatcgtcatccgccggcgacccaaccagggattcgggttcacgctgcgccacttcatcgcctatccgccggaagatgaccaggcatcatcatccgcatcgggtttggtatcgggatcggcgacagcagcaacggcggcatcggtatcgaccaactggccacaggaagcctccagtgcggcgggcagcaacagcggcagcagcagcagcgtcggcgtcgctgggatcaccggtttggagccaacgtcgccgacgtcgctgccgccgtaccaagtgaaagcgatggagaccattttcatcaaagaggtgcaggcgaacggaccggcccactacgccaacctgcagacgggcgaccgcgtgctgatggtcaacaaccagccgatcgctggcatcgcctacagcaccatcgtctcgatgatcaagcagacgccggcggtcctcacgctgcacgtggtgcccaaggagtgcgatgtcctgcagatgcactatacgagcattgcccacacgccggagtcgaatcgcctgaccatgtcgacgcactcgccctcgctgctggccaacggctcccacaagaccacatttccagcggcggcagcagttgcagcaccaccgcatcagcatcagcagcagcagcaacagttgatctcatatcccgctgttgcagccgtgaccacatcaacgccggcaggatcgccgcaatcccaatcccaatcccaatcgcactcgcaccccaacacccatcatgcaccatccctgcacggaggcagtcgatcgggcagcatcaccagcacggccagcggaggcatcaccgtcctcagtcagccgttctacccacagcagcagcagcaacagcaacagcagcagcaacatcgtcatccagcgctgactggcggcagcagcagcatcgatttcggggacatggcacatggactgcgccagcatcagcagcagcagcaacatctgtaccagcagcagcaacagcatcaccagtttatgcgtgctaatcagccgccaaatttaacagtattatcggccagctcggcaacgaacacgcccacacccaccgcccgccagcccaagtccgcgacgagccacaatcaggcgttgtatgcagtcggagcgggtccgagctcagcagctggatctgggtcgggatccctttcggggggcagtgagaacagcgaccttatgatccgactgcgcgagtccatcaagcagaaggaggagttccttaagtcgccggtgcccgcctccatgagctccgcctcctctatcaacggcaaccaggcgcagtcgtcatcgccggcacagcagcaacacctgcagcagcaccagcagcacttctttccctcgcacacgccgccaggtggtgtccaagtggtggtgcctccaccgcgcagtcgccatcaagtgatgctcaagcagcagcagcagcaacagcagcagcaccagcaacatcatgtccttggctacgacatgtaccactccggtggtaagctggtgcagcggtcttccacggcgcctggcagtgtgtgccaccaacaccagcagcagcagcagcatcacctctatcaccagcagcaacatcagcagctccagcagacgcaacatcgccaggtgatgatcaacaacaatgccaagtacgccaaggatctggactattttgagacgttgcaggagacaggagtcaccaataaggtctttgagcgcaagctggtgtcacacatgtccaagggattcgatccgtttaagccgctgtcgatcaacaccagtgccctggagtcgtctgccagcacgtcgagcacttcggccaccacgacggtgaagaagcaaagtgtgctgtatgaatccctgcagcagcatccattggccaagtaccatcagacgcagcagcaaacgacaacgacgacgacggtggatggacagacgagtagccggatggagctgcacaaggcgaccctggcgaatgccaccatcgatccggtgccagttggatccagcacagcagccattgtggacagtgcgtcgggaagcggcaacgttgtgcggcgctacaagccattatcctccagctcctttgacgaaggcaaaccaatgcgtaggatatcctacctgcgggcaaccaacaatgagaccgacttcaatgcggaggctgccgctggcggagatgccgcggcaacaggggcgtcaggaccagcatctgcatcagcagcttcatctgcacctggacccacgccctcatctgctcctgcaccagctccagcaccagcacccctgcccatttcgatccccattccggtggctgctgtcgtcgagccgcaaaagacgaagtccctggtggaggagcatccggatcccacctacgatgtgatcggaggcacaggtggtggccacgagttcatcgagacgccgaacggcctggaggatgtgcgtctgtcggcccacgggagtcggagggcctccatgagcagtgacatgcgaagcagcatccacattgatgccgagttaaatggcaagtatgtgccaaacgaactggaggcctttgagacggaaatcgagatcaagtcctcttgcatcaacggaaaacgcatgtccgagtaccgatcatggcgtcaggtgaagctggagatcaagggagatctgctgcgtatctactcaggccgacatgccaaatcggagcacaatgtgatagaacttgatattagaaactttaagttcttcgacgagtcgatggataagaagaaatacttgatccgtatgcagtcgaagccatcgcccagtggagcccatttggcctccttgggcaacgagttaaacctggacgagggtcacgacaagctgctaacctcgtcgggcagcagcagtgcgaatgagcccgctgccaacgcagcatcggccctgaccgcatccacctcctcgtccacctgcagcagcggtccttacacggagatcctattcaagacgaagagcagcaacgagatgaagcgtctgtttggacttctgcagtggaaggatagcctcaactacgatgataatgagcaccagccacagggcaagcagttggcagaaccacagaaaacagtggccagcgccagttatctggacgacgtccaaggtggagcgagtgcagccgacagctcacccttgagctcccattccggtggcattgcagacgctagtggcagtcatcatgtttctgcgctaccagcagctgcggctattgtcgccgccaccagcgactccatttcgccggtgatgaaggcaaggaagtcctcttcgcacaagcatatacctgataaggatttgggatcgcccaaatcgaagaactggaaggatttgctcttccgccgtggcggcagtggcagcggaggagtgtcacaccacgacttggcttcgccatccgcctgtgcagccaagcagattggatctattggcgttccactgcgcagctgtcccatgtcgaaggtcaatgcatatgtgccgcatctggtagaggtgtgcacgaacattgtggagacaaagggtctgggagtggtgggcatctatcgcatacccggcaacaaggcggccatatcagagctgtccgaacttgttaacaccaaggactttcagttcgagagctgtgccagcgatgaccgctgggaggatgtgaatgtggtgagcagcctgctcaagttgtttatacgcagcttgcccgatgccttaatgccggcaagttactatatcaactttattgaggcggacaagaagtttggcctggagagaattgtactgttgcgcgagattgtggaatcgttaccacggcatccctacgaaacgatgaagcacttgattcggcatctgtgccgagttagcggcaattgcgatgtgaaccgcatggagcccaagaacctggccatcatatttgggccatctataatcaggacgccgaacgatactctggaaacggcagtcaaggacatgaagcatcaatgccgcatcgttgagctgctggtcacacagtacgactacttcttcgaaggcggcagtctgccggatatagccgaagtaagcggcggtacagctgccgtaagcgccgctcagccgcagcagcagacgcaggaggatcagacgagcatgctgctgcacaacctgtcgaagatcgagcggatcacagagcgcgaaaccacgcgcacctcgcgctttatgccgcagctcagacgaaagacccatggcaagcgcagcgccgtaaactcggacacgtactccggcgagagcgttctgtcgttggactacgccaaggcgtccgcctctgcctcggcatccgcaagcagcaccgccagtacttcgagcagctcgacgcttcacagcgggggcaaggcatccgcctcatcctcatccagttccactaccaagttcagctcatcgtcatcgtcggcgtgctcaacaacggcggtggctatttcttcctccatctcggcgacgtcctccaaattgttaagcgccaattttaagaagcgtagcacaggaggtttcttgggctcaagatcctcgcaccagacgcgcaaggccagcttggacgaaaaggactcaggacagtcgtctggcagccttggtcacagcctgggagtaggcataaatctggccaaggaacaacagcgcagcagcgtggacatatccattctgctaacggacgacgactctagcagcaggctaagcgatacgggttccatgtcgctgacgaccattacggatacactggacagcaagctacgcaacttgcgcagcggctccgaatcgaatgatgagaatggatcgcccgagtttcccaagaaccggcggcacaccttgggccagcctctgcacatgcactccgagaacattccgtatgcggacgagtcgcccgagcggctgttccatcagttttgcaatcccctggagacagcccccttatccctgcatctaagccgctcctgcacggccacaaatacaattggtggcgatgaaaagccttcgaaacagtcgggtggagttgcaccactgcccccaagtttgcttaaggccgcacataagctacagcactcagccacggtgcccattcatcagggaagctccactgcaccaactagcggagcagccacgccagtaggcacgccaaccggaagcggtggggccggagctattccctcgcgcagctcatcgagcagtgtcacgacgctaaccaaaagcatacaacccaggttcagtaactatctaagctacgaaagaggcaatgcagccgctggaggcgccgaaagggtggtgggatccgccggaggagctgcctccgacgacgattccgagggctcgaccaccagtgatcccaaggagaagctgcttctcggtgaacgaccgtcgccttcgttttttatcgagcgctacaacaaaaagagacgcgatcatcggttatttcgcagcgccagtttcaattgccggaactactccaccaggcacataacggcgcagacatccggaggagtagcggcgggagtatcgggcggagtagctggagcggtggcggtgggggtggcttgctgccaggcattgagcaccactggcttgaccaaggacgagaagactgatatgaacctgaccaagaagcgccagatccagaacaagcagaatcggtccattaagcggcggcacacagtaggcggacctcacgactattccgccagcaatggtggctgctcgaatcactcacacggtcacgacctggcagccatcaactacaatcaccacaatcgccatcaccagcaacagttgttgaaactgggcagcgctacatctggcggtggaggcagtggcgcagccgcggccgagacgacgaccaccacaacgaccaccaccacggtgctgcggcgcctcggtacaggtcaagctggcgccgaagctagtgtggcattgcccgcatcaagttccggatcgagcagcaacaacaataactcgccccaaagcgatggcagtaatggcaacggcggtggagtggcgggagttgcctccaatgcaccaccaactggcgtaggtgtcggtggcaacaacagcagcggaagcagcagcaacagcagcagcaccagcacaactcccgctgggaacggcgatcaggtcctggaagtgggcatacgtatcaagaacattagccggggtcgcttctaaaaacctgtatacccagactaagaaaacagacggtggcaatttcacatggtgaaacacacatgaaacactctgggcgaactcacattcttagcaaacagtctatacaaagctaaaagtgctaatatggctaaaagcaggcagtctgcttatatcgcgttttaaagaacctgacaaaaaacatagttaaaaatagctcctagtgcagattgctgcgacaagaccaacccgaaatagcagttgcttaaatgtggttaacctgattaattgacactttgaaacccacagtttacaagagtattaacgaaaggtttaatatataaccaaaaggcataatgagaagatatttaacaatagtctgttaaacacacaaaagctaaacacacctttaaaaaaaaacaaaaaaaaacaaagttaaattgaatgttaaccctgaacaaagttgctagaaaggcaaatcgttgtagcaaaggctatgcgaacacctctaagtagtcttgcttcacagacccttgcgtttaaaactatgttttgcatgttaaacgatgaaaactaaatttaaattcaaatagggcgtggcaaagctacttcaatggagtgcattgtaccttctgctacttaggatctgtaaaaagtagtcatcataatctattttactatatatacctatatatcaatgtgcagttgcagtgttgtgtccgaattgggtcttaaaagttaaccagaaggcgtgtagagaagtgttgattgcgaaacaaatcagcagggcagttgaaatacataatcttacatattctatcacaatatatttatatattcatgcgcagaccccaggaagttgtgtcgaatacaatatattacaaatataacccattgaaactcgacccaggaaaacttaaactaatcagttagc

SEQ ID NO: 1023 - protein, 2110 aa, DROSOPHILA
MLQNSNGAAAAHSAASAVATPAAAASAAAAAAAAAVAAAANNAALAASSIQPKLIVIRRRPNQGFGFTLRHFIAYPPEDDQASSSASGLVSGSATAATAASVSTNWPQEASSAAGSNSGSSSSVGVAGITGLEPTSPTSLPPYQVKAMETIFIKEVQANGPAHYANLQTGDRVLMVNNQPIAGIAYSTIVSMIKQTPAVLTLHVVPKECDVLQMHYTSIAHTPESNRLTMSTHSPSLLANGSHKTTFPAAAAVAAPPHQHQQQQQQLISYPAVAAVTTSTPAGSPQSQSQSQSHSHPNTHHAPSLHGGSRSGSITSTASGGITVLSQPFYPQQQQQQQQQQQHRHPALTGGSSSIDFGDMAHGLRQHQQQQQHLYQQQQQHHQFMRANQPPNLTVLSASSATNTPTPTARQPKSATSHNQALYAVGAGPSSAAGSGSGSLSGGSENSDLMIRLRESIKQKEEFLKSPVPASMSSASSINGNQAQSSSPAQQQHLQQHQQHFFPSHTPPGGVQVVVPPPRSRHQVMLKQQQQQQQQHQQHHVLGYDMYHSGGKLVQRSSTAPGSVCHQHQQQQQHHLYHQQQHQQLQQTQHRQVMINNNAKYAKDLDYFETLQETGVTNKVFERKLVSHMSKGFDPFKPLSINTSALESSASTSSTSATTTVKKQSVLYESLQQHPLAKYHQTQQQTTTTTTVDGQTSSRMELHKATLANATIDPVPVGSSTAAIVDSASGSGNVVRRYKPLSSSSFDEGKPMRRISYLRATNNETDFNAEAAAGGDAAATGASGPASASAASSAPGPTPSSAPAPAPAPAPLPISIPIPVAAVVEPQKTKSLVEEHPDPTYDVIGGTGGGHEFIETPNGLEDVRLSAHGSRRASMSSDMRSSIHIDAELNGKYVPNELEAFETEIEIKSSCINGKRMSEYRSWRQVKLEIKGDLLRIYSGRHAKSEHNVIELDIRNFKFFDESMDKKKYLIRMQSKPSPSGAHLASLGNELNLDEGHDKLLTSSGSSSANEPAANAASALTASTSSSTCSSGPYTEILFKTKSSNEMKRLFGLLQWKDSLNYDDNEHQPQGKQLAEPQKTVASASYLDDVQGGASAADSSPLSSHSGGIADASGSHHVSALPAAAAIVAATSDSISPVMKARKSSSHKHIPDKDLGSPKSKNWKDLLFRRGGSGSGGVSHHDLASPSACAAKQIGSIGVPLRSCPMSKVNAYVPHLVEVCTNIVETKGLGVVGIYRIPGNKAAISELSELVNTKDFQFESCASDDRWEDVNVVSSLLKLFIRSLPDALMPASYYINFIEADKKFGLERIVLLREIVESLPRHPYETMKHLIRHLCRVSGNCDVNRMEPKNLAIIFGPSIIRTPNDTLETAVKDMKHQCRIVELLVTQYDYFFEGGSLPDIAEVSGGTAAVSAAQPQQQTQEDQTSMLLHNLSKIERITERETTRTSRFMPQLRRKTHGKRSAVNSDTYSGESVLSLDYAKASASASASASSTASTSSSSTLHSGGKASASSSSSSTTKFSSSSSSACSTTAVAISSSISATSSKLLSANFKKRSTGGFLGSRSSHQTRKASLDEKDSGQSSGSLGHSLGVGINLAKEQQRSSVDISILLTDDDSSSRLSDTGSMSLTTITDTLDSKLRNLRSGSESNDENGSPEFPKNRRHTLGQPLHMHSENIPYADESPERLFHQFCNPLETAPLSLHLSRSCTATNTIGGDEKPSKQSGGVAPLPPSLLKAAHKLQHSATVPIHQGSSTAPTSGAATPVGTPTGSGGAGAIPSRSSSSSVTTLTKSIQPRFSNYLSYERGNAAAGGAERVVGSAGGAASDDDSEGSTTSDPKEKLLLGERPSPSFFIERYNKKRRDHRLFRSASFNCRNYSTRHITAQTSGGVAAGVSGGVAGAVAVGVACCQALSTTGLTKDEKTDMNLTKKRQIQNKQNRSIKRRHTVGGPHDYSASNGGCSNHSHGHDLAAINYNHHNRHHQQQLLKLGSATSGGGGSGAAAAETTTTTTTTTTVLRRLGTGQAGAEASVALPASSSGSSSNNNNSPQSDGSNGNGGGVAGVASNAPPTGVGVGGNNSSGSSSNSSSTSTTPAGNGDQVLEVGIRIKNISRGRF

SEQ ID NO: 1024 - DNA, 5066 bp, DROSOPHILA
gtcacttcgtttgacctatcgttcggacgcggaacaaagatctctgtacgggtctcttcctctatgcggcgcttcgtagatcctttcatgccaattagtccaccgtaaaatgatctgcaaggatatgtgtcagagatatcgtcagcggttctttgtattcaacccacttggacacatgaatggaaagactaaaatcgccatttgctgactccttaatacatttgacaaccgcatcgtcctcgtcatcatcatcatcaccataaagatctggacagaagtggtcaatgtggataattaaaaatctacaatatccacttacccggctcttcgtaggctttgtactctagtttattccgttggttttgaccattccacttgtcgccaccgaagtcgtcgtgaacaacgttgactctatagcgccgattctggctcatcttttggacaggaggtgataacacttcgcggctcatggtgatcaaaaatatttaggactcttttataattacggcgatatccaaaatcaaatgtacttcattaaatgatagacaagccgggaatgactactatgcactttggtatattaggaaacactttaaaaaatactagacttgaataagtaatagtgatggcagctacttatttaagtattaaaaacatttatatgggatgaaatatttgttcttaatttcataacaaaatgtacacgttattttataccaaacattatatagagtgggtgtacgaggaaatctgtcttggatcatgttagatgtttaaataaattaattgtaccataataaaaatctgagactaaataattatgaagaattattatatttatatcagaaacatatccaaagtcaagcaattatatattgaaaactacgcagaatacgatgatccaaaatgtgttaccaattgaaattcttataatcgatagtatcgtgtcacggcacccacaacacacgaaccgcccatccctaaaccaatttgagtttccccaatttgacagccaaaatttagttggtttcatctgaaaaagcaaattaactgagaaatactaccgaaaatgtcgcagcgataaggtgaaataggcacctgtccgcccaaaaggggaagcaagcagcggatagcgtcaaaaagcgtttgttaacagcttgcgaagtcagtgaatcactaaaagataaagacattgaattggccagtggagcgaccgctggaggagcacccacaattgcagacccatcgatcgcccctaatccgctccagctccaggtggaggtgacaccaacgccccgagacacacgcgcccttgccgaagtggtggcccacataaatagaatgggtaacgacgatcatcgacggcggaagacaccctgcggattttgtatggcagtcttcaaatggataccagtgctatttatcaccgcggtaatagcttggtcctattacgcttatgtggtggagctatgcatccgtgagttgtatttacagtcatgtaggggggggatataacctgatgtttcctttttcaggcaactcggagaaccgcattggtatgatcttcatgcttctgttctaccacctcttcctcaccctgttcatgtggtcgtactggcgcaccataatgacctccgtaggccgaataccagatcaagtgagtgaatcatacaccttatcagctcgtgttattaaaagaaaacggaaaagcctacaatattcgattgcttttctcccgtttttagtggaggataccggatgaggaagtgtcgcgacttttccgagccgacagcccggacacccagaaacgcattcttaacaactttgcgcgcgatttgccagtaacgaatcggtaagcgttatgttatgttatatcttgtcagttgatttgtatttgtataactttatcaaacaaaaccattttatctaagaaattaaaagttgtcccaattaagacatttccaaatgcatttctcagcagcagaacaattaggacggcgcattccgaagcatttttgataatatttaaacctttgccttgcagcacaatgaatggttcggtgcggttctgcgaaaagtgcaagatcatcaagccagaccgagctcaccactgtagtgtgtgcagttgctgcgtactgaagatggatcaccactgcccctgggtaaacaactgcgttaacttttacaactacaagtacttcgtgttgttcctgggctatgctcttgtctactgcctgtatgtggcttttacctcgctacacgactttgtcgagttctggaaggtaggtgcagtaagtttccgattcgtttctactcttgctaccaccctaaatgcccgctgcatgcgaagacctgttagttaatgaatgtattctctcgttttgctgtaatgttatctaaactgcttgtacttactgatccaagtacgataataatggttactcggcacagggacagctaaatgccagtggaatgggtcgttttcacatcttgttcctgttcttcattgccattatgtttgccattagtttggtgagtttatttggctaccacatctaccttgtgctggtgaatcgcacgacattgggtaagtacctaaagcctgacttataaatcacatgcataccatagcctctttaatctatcttccattcagagtcgttcagggctccgatcttccgcgttggcggccccgataagaatggttataacttggggcgttatgccaatttctgcgaagtatttggtgacgactggcaatactggttcctgcccgtgttttcgaggtatttgacgattcatttactacaccatttctactagttccaccagaagctctctcactcattagttgttgttcttgcgcacttttatttaattagatttgatctaatggctatttgattttggtttttatgttgatttcggcaaattaaaggcatgttccaaaattaaagctttgtagctaaaacctttaatatccttcaatgtgtgtttggtgtgctaagttattaagaaaaacaaacgactattgaagatcacagattttagattaacttaaagcaatttctaacacgtataatttatgtaaacccataataactgtgtatgctgaaaaatgagaccgaaaagcaatgaatcaatgtggtcgatctccttttgtaatttagttttaagccaaattcaaattatcactttatttcaattgtgttcgttatttatttttgtaaataaaaagagacaaattttgccagcgatttttagaaatagacacttagatctaaccaaaacaagcttagtaaccaattgtccgccccgtaaagtgactaacttaaagtgtccaagtttgaaattctgacggaactttctgaattttaaatgctcattaagtttctttaaaaccaaaacacttgccacacatgaaaagtcgattaaatttttacattcgtattcacacatctgtgcaaaattatataacaaaaaaacctcaaacaacaacagctacaactacaataagctaaactgtaaaaaaacaaaaacaatatttatgtttacaactctctgtttaacgcaataccccaaccttctgcttattcataatcacggaactagtcgcggtgatggctacagctatccgacctccagcgaccagagtcgagtgtccaccagctctcccacccagcggtacgatgccatgggagatacgaccaccagcaggttagatggcaatccaacagataagttgattggcgctagtcccctcgacaccactaaccatcatcacaaccaatcgcctcatcaagtaagaagcaccagcgtcctgccaacccagctgttgcagatccagccgccatctacatgccgggacgagctcaacgagcggcagcaaaagctggcaaacggccaatcattagactgcagcacgccagcagccatgtctagcccggacgagcgtggagtcaatggggcagccgtatacatcgaaatgattggagatcatccgttgacaagcgctgatcctgccaaaggcttcccacgcccgccgaatggcgatctgccagtttaaataataacgtagaatgtattatgtgtatgtttttgtaccatagagccaagtaaactgccagatttgtcagcgttgcggttcttagtaagcaaataagttacctctatgcaattcatcagctgtttagtgtaggctatttaaatgtttaaatggctgggaccataatataaatcaccacatatgtataatcgactaagttaacattaggcaatatgtcattggtttcacacacgcatttatcgaattttttaatggaaattagaagaatcgaatgtggaatttcctagtagatgagatggtgttatcctccgaagatttgtaccttgctaatgcattcatgaaaccaactatccttgtagatatcgaaagatcttcaagacttaaacctaatgataagcaatgagatttcagtacacactattaacacacacggaattcagtaatttccatatggttttaatttatgtagttagtaactgtttgcaagtttttatactttttcttactttgtacaccttaatgcccaaatacatatattattgaacttctgcaagtgacgaaattaaatggattttaaagtatttaaaacttataaaggtttgtttttagtttgccaaataaataaacatgacagctttgcttcatctgcacagcaccgaatcttcaatcaatccattacatacacaataacgcactcattacttatcaatttcccactgatgatataattcaccacatatcctttagctttggcgatggcaaaacatttccgattcgacatatggaagaggacacggaatctttgctaggatatcacagcgatacgcgcatcgagttggaggaggactttctgccagagccgcgatttcaagactcgattccatagctaatcatgaccagcgacaatgtagctacatattacatttagagattcagttgtgaagcctccttacgacatacatatactttcagtgtgtaaataacagaggtacagacagtc

SEQ ID NO: 1025 - DNA, 1673 bp, DROSOPHILA
ccaatttgacagccaaaatttagttggtttcatctgaaaaagcaaattaactgagaaatactaccgaaaatgtcgcagcgataaggtgaaataggcacctgtccgcccaaaaggggaagcaagcagcggatagcgtcaaaaagcgtttgttaacagcttgcgaagtcagtgaatcactaaaagataaagacattgaattggccagtggagcgaccgctggaggagcacccacaattgcagacccatcgatcgcccctaatccgctccagctccaggtggaggtgacaccaacgccccgagacacacgcgcccttgccgaagtggtggcccacataaatagaatgggtaacgacgatcatcgacggcggaagacaccctgcggattttgtatggcagtcttcaaatggataccagtgctatttatcaccgcggtaatagcttggtcctattacgcttatgtggtggagctatgcatccgcaactcggagaaccgcattggtatgatcttcatgcttctgttctaccacctcttcctcaccctgttcatgtggtcgtactggcgcaccataatgacctccgtaggccgaataccagatcaatggaggataccggatgaggaagtgtcgcgacttttccgagccgacagcccggacacccagaaacgcattcttaacaactttgcgcgcgatttgccagtaacgaatcgcacaatgaatggttcggtgcggttctgcgaaaagtgcaagatcatcaagccagaccgagctcaccactgtagtgtgtgcagttgctgcgtactgaagatggatcaccactgcccctgggtaaacaactgcgttaacttttacaactacaagtacttcgtgttgttcctgggctatgctcttgtctactgcctgtatgtggcttttacctcgctacacgactttgtcgagttctggaaggtaggtgcaggacagctaaatgccagtggaatgggtcgttttcacatcttgttcctgttcttcattgccattatgtttgccattagtttggtgagtttatttggctaccacatctaccttgtgctggtgaatcgcacgacattggagtcgttcagggctccgatcttccgcgttggcggccccgataagaatggttataacttggggcgttatgccaatttctgcgaagtatttggtgacgactggcaatactggttcctgcccgtgttttcgagtcgcggtgatggctacagctatccgacctccagcgaccagagtcgagtgtccaccagctctcccacccagcggtacgatgccatgggagatacgaccaccagcaggttagatggcaatccaacagataagttgattggcgctagtcccctcgacaccactaaccatcatcacaaccaatcgcctcatcaagtaagaagcaccagcgtcctgccaacccagctgttgcagatccagccgccatctacatgccgggacgagctcaacgagcggcagcaaaagctggcaaacggccaatcattagactgcagcacgccagcagccatgtctagcccggacgagcgtggagtcaatggggcagccgtatacatcgaaatgattggagatcatccgttgacaagcgctgatcctgccaaaggcttcccacgcccgccgaatggcgatctgccagtttaa

SEQ ID NO: 1026 - protein, 443 aa, DROSOPHILA
MGNDDHRRRKTPCGFCMAVFKWIPVLFITAVIAWSYYAYVVELCIRNSENRIGMIFMLLFYHLFLTLFMWSYWRTIMTSVGRIPDQWRIPDEEVSRLFRADSPDTQKRILNNFARDLPVTNRTMNGSVRFCEKCKIIKPDRAHHCSVCSCCVLKMDHHCPWVNNCVNFYNYKYFVLFLGYALVYCLYVAFTSLHDFVEFWKVGAGQLNASGMGRFHILFLFFIAIMFAISLVSLFGYHIYLVLVNRTTLESFRAPIFRVGGPDKNGYNLGRYANFCEVFGDDWQYWFLPVFSSRGDGYSYPTSSDQSRVSTSSPTQRYDAMGDTTTSRLDGNPTDKLIGASPLDTTNHHHNQSPHQVRSTSVLPTQLLQIQPPSTCRDELNERQQKLANGQSLDCSTPAAMSSPDERGVNGAAVYIEMIGDHPLTSADPAKGFPRPPNGDLPV

SEQ ID NO: 1027 - DNA, 5024 bp, DROSOPHILA
tgtcagtctttgattatattaataggtcagcccgtttttgtctattttcgatatttagtttaattttaatgggtttgattgtatgtcacaattgtgtaactcttgtcctggtattttggtgcacttgctgcagaaatcatttgaccttgtttttaattattaatataggtttttacttttagaacgctaacctaacatccgcccctctacacacgtaagttaaataaagaaaataagcattatggtataatgaaatgcattcgatttttattcgcccttcagttgcagtaaccagttaaaaataaaactgcaatagattcgctttcattatgtgtagaaccaaatttattcattaacttaaacataaagtattgctattttagttatagttttgcgatcccgtgtgagtgtttgtgtgtgattaggcattccatgctgggagcgagcggagacgaagaattggcttccccatcaatcttcaggaggtgtgtgagtctcacgtggaacattgcaaaatacccaagaatcaacagaagaccaggcaacggaaacaaacaagggataactacacacatagaaaacagcaggttgattagattaacgctatcgatcgatatactcgggggcagggcgtgggcgtgggttcggaatttccagggtgcatgtagcgcacaaaacataatatctagagctacgcagagcagccagtgggccaatataaaaatacaaagtttcacaaatacaggacgtggacacgagaaaatggctgccgattggagtgtgggtcttttaaatgctctgagggcgcaatgtcagtagcgaatcacgtttccatataatacaattatccaattccgtagacagaaaaagggcgcgtgctttgagcacgtcggcgttgagattaaaatcgcaatagtttttgagtagcgtgtgagggaatggaaatgggaatgactgcatagacgggactgagactagagccgggatcaggagcagctgcttaggccacgtaaatgaacatgttgatatcatcgtcgtcccgtctcatatacttgttctcaatcagccactccagctgctccttgatcatcttcttggacggcaggaacatgttcttcaatatgtcgatgagttcaccctgtagaagaatgttttttttttagatcccttgaaacgcacaactagctatcgaacaacgaacctgcagcgctgcgttgttcatccgcttgcgcactttcatgattttgataatggcctcttgtgtgcgcagaatacgcagttgcacaatggattgattgtcctcctgctgcgagcgctccgtgctcaattgcagtcgcccgatgagattcagctgcgggtgagaactctggttatggattatctattagatagctaatatgcgtaatcacctttccacgacgctgggatttgccattcttgacaatagcaaattcctgattaatatagaacattgtgttctcggcaaagtccttgggcgaactgatcgccgccggttccatgagcaggatctgtttctttatcttagggaacgctaccagcgaccacaacgttcgcctcagttcgggatcttaaaaatacacaaataattatcatcaaagcgaaaagtaaatttgcaagcaatcctaacctggtagttctgtggccaggcggagattctcgtaggaaattttgtcatgctgacgctgattccaggcaaacaagacggccatctggaaagtggtcacatccagatcgtagcgcccgaagttattcacaaaggtgatagtgccattgctcatgtgatggtaccactgcagcttacggccggaatgcttcttcttgtaaaactcctccacatcaggaatatagtcctcgagctcgatgggcagtgagaccgagactcgctccgaacagcgggcccaggcacccgcgttgagtatttttatgttgatagcatcgtgccgacttatcgaggtgcggaattgagtatttaagtcttcgctgacctatatacgaaaggggataatgaataaacctgctcctaacatcagtctggtaaaacctacctttatgtcttggaacatgcgcgccagccgattcacgtagtccgccggcatgcccacctccctcagccactcgactatgtcctcctccttttcgctgtccgcactggtccccagaatcaagctgtaattggaggaacaagagtatgtaatcgcttcatttgaaacattatgcagtcaacttaccgcctcgtcaaatgaactttgtgatagcgcataaagacgtccttgttgttgacgtacttcaggaccaagaggacatcgcgcagacgggcgtcgatctgttcgctggtgaggcgtttgctgagcggcgttcgccgcagcagcatgtcgcaatagttggccagtagttccgggcatttgctctccggcgctgtgtactttacaccccgattggcgatactcgtgggtagctccatcttgaacacgctggtgtcgttgactaccgtcttaaaagcaatgtcgcgggcagtgaggaagcggggatcgtcgttgaaggcgttgcgtaccaggtcgctgaacttgttgaacagctcaagtagccgctcaacgtacttttccgaatcctgggtaatcacctccgaagcggacagcatgtcggccagtccggcggacatgatgtgacgctgcaggtcacccatcatgggctccacgccaacgccgtgcatcactctatccatcaggcggaacatgagattcaatcgctccgtttcatagtccctgatcaaagccggacactcggcgatgattgagttgaggtggtccactatgagcacattaaccagcgtgtaagtaagtatactgaagctgctgggctccagataccgcttggccctaacctcctcctcacgcaactttgagtcggcgtatttcatataggccagcactccgttctcttgctgttgttcggcggatttcaggcgatagaactcgacagtggccttaaggtacgccatctcaaagttctccctgtagatctctagtttgtcctctgcattcgaggagagattcacatagctctcgcgcacgcctaccactagctgggcatcataggcatcgccgttccgctcggcgtgcacaatcttcatggccgactcctgcagacgatgcttgatgtcgtggaatatgtgcttgttccaggagtccagcattagttttcgtacaggactgtcctccgtggggtttttcttggaggtagaggtgctgctgctggagctcccacttccggaagcagctgcagctgccgctgctgagcttgtggaggcggatgtggaggctgcagcagcggcggctgaagtggaggctccagctgcggctgaggtggaggctcctgactttccagcctggccgctgcaggaagtagctgctgccgccgcggcggcactcgtactcgctcccgaggcggagacggatgcggaggagctgctgccactggaggagggcttcacctggggcgactgctccagctggcggaaaggcagcggcaggtagttggactgtgtaaagaacttccgccactccacaatataggtggccagaagggcctgctcgccccgttgcgcttgcacctggctttgggcctggacgataaactcaacgatgtcctgctgcaggcagtcgtagatcttggccgcgcccttctcgtcccacaggcacacgaagtgtacgccgaagaataggtcctgccattcgcgctgcgacaccgtgtcctggcgcagtagctttaaaactattcgccttttgtccggccaaacttcctcgaagatgtccctgtcccgtttcccgattgcctgtcgtacagggagataaaggtatatgtgcacactgaactctatatgcgttttcatcgccgatcaggtcacttacccgtagcattttgatcgtagcaatctctttgtttttgttgctgcgtccgcttcacttcatttatatttattttttgtaattaggcgatacgatacgatagttggctatcgaccagtgttggtaaaatttcgcccgtagggcttatcgcccatcgaccaatcgatttcgggcagtcgataaaacaacagttcggagtgcagcaaaagtgcgggaaatctgcggaaatgttattaatcgaacattaagggatacctcgcccagccgcggtaataataaccaaggagaaatagggcaataatacaaagttgtcttgtcgagggttttgtgaagttcgctagtttgcccacttcgttttggtttttttcttctctacctcttcgtgcgcgagtgagacaaaagcagtactagcagacatctcggtctagcacacgtccccgacctaatgtctggtctgcattgtttcagggctgtcagatgtgcctgaaatactcagttccgcatttcaaaatatcgcttactatttcgtgttctaaaaataatatattttgtttttagtgcggaaacttgtatggttttctttatattcttatttgttaaactagtaaaataaagttatttatcaatttaatttcgttacgttattgccgtcttgatgtttatttacattcaaaaagtctttcacagacaggtgtcaaccctagtttttataacttatcgtaaacaacgcgcttaaatctttataaatcacaaagagttttctaagcttttattaaagtgactgttttatttataaacattgaattcttgtagaaaaccatattttttagagtgaatacaatcgatggttgcggggcaaacatcgatgctgccagttatctgtatacatcgatagtatcgactaaccatcggcttctcttccagctctagcattcaccatttccctttgtttgcggcggcggcgctcgttgtacggccgtgcgaatcgagagaaaaacgcataaaatcggggaaagtgcactagccccgtgctgcaatgtaaataaacaaggctctgatgagcagttgccgatcaagtgcttcgattagccagcaaaa

SEQ ID NO: 1028 - DNA, 2645 bp, DROSOPHILA
gtatcgtatcgcctaattacaaaaaataaatataaatgaagtgaagcggacgcagcaacaaaaacaaagagattgctacgatcaaaatgctacgggcaatcgggaaacgggacagggacatcttcgaggaagtttggccggacaaaaggcgaatagttttaaagctactgcgccaggacacggtgtcgcagcgcgaatggcaggacctattcttcggcgtacacttcgtgtgcctgtgggacgagaagggcgcggccaagatctacgactgcctgcagcaggacatcgttgagtttatcgtccaggcccaaagccaggtgcaagcgcaacggggcgagcaggcccttctggccacctatattgtggagtggcggaagttctttacacagtccaactacctgccgctgcctttccgccagctggagcagtcgccccaggtgaagccctcctccagtggcagcagctcctccgcatccgtctccgcctcgggagcgagtacgagtgccgccgcggcggcagcagctacttcctgcagcggccaggctggaaagtcaggagcctccacctcagccgcagctggagcctccacttcagccgccgctgctgcagcctccacatccgcctccacaagctcagcagcggcagctgcagctgcttccggaagtgggagctccagcagcagcacctctacctccaagaaaaaccccacggaggacagtcctgtacgaaaactaatgctggactcctggaacaagcacatattccacgacatcaagcatcgtctgcaggagtcggccatgaagattgtgcacgccgagcggaacggcgatgcctatgatgcccagctagtggtaggcgtgcgcgagagctatgtgaatctctcctcgaatgcagaggacaaactagagatctacagggagaactttgagatggcgtaccttaaggccactgtcgagttctatcgcctgaaatccgccgaacaacagcaagagaacggagtgctggcctatatgaaatacgccgactcaaagttgcgtgaggaggaggttagggccaagcggtatctggagcccagcagcttcagtatacttacttacacgctggttaatgtgctcatagtggaccacctcaactcaatcatcgccgagtgtccggctttgatcagggactatgaaacggagcgattgaatctcatgttccgcctgatggatagagtgatgcacggcgttggcgtggagcccatgatgggtgacctgcagcgtcacatcatgtccgccggactggccgacatgctgtccgcttcggaggtgattacccaggattcggaaaagtacgttgagcggctacttgagctgttcaacaagttcagcgacctggtacgcaacgccttcaacgacgatccccgcttcctcactgcccgcgacattgcttttaagacggtagtcaacgacaccagcgtgttcaagatggagctacccacgagtatcgccaatcggggtgtaaagtacacagcgccggagagcaaatgcccggaactactggccaactattgcgacatgctgctgcggcgaacgccgctcagcaaacgcctcaccagcgaacagatcgacgcccgtctgcgcgatgtcctcttggtcctgaagtacgtcaacaacaaggacgtctttatgcgctatcacaaagttcatttgacgaggcgcttgattctggggaccagtgcggacagcgaaaaggaggaggacatagtcgagtggctgagggaggtgggcatgccggcggactacgtgaatcggctggcgcgcatgttccaagacataaaggtcagcgaagacttaaatactcaattccgcacctcgataagtcggcacgatgctatcaacataaaaatactcaacgcgggtgcctgggcccgctgttcggagcgagtctcggtctcactgcccatcgagctcgaggactatattcctgatgtggaggagttttacaagaagaagcattccggccgtaagctgcagtggtaccatcacatgagcaatggcactatcacctttgtgaataacttcgggcgctacgatctggatgtgaccactttccagatggccgtcttgtttgcctggaatcagcgtcagcatgacaaaatttcctacgagaatctccgcctggccacagaactaccagatcccgaactgaggcgaacgttgtggtcgctggtagcgttccctaagataaagaaacagatcctgctcatggaaccggcggcgatcagttcgcccaaggactttgccgagaacacaatgttctatattaatcaggaatttgctattgtcaagaatggcaaatcccagcgtcgtggaaagctgaatctcatcgggcgactgcaattgagcacggagcgctcgcagcaggaggacaatcaatccattgtgcaactgcgtattctgcgcacacaagaggccattatcaaaatcatgaaagtgcgcaagcggatgaacaacgcagcgctgcagggtgaactcatcgacatattgaagaacatgttcctgccgtccaagaagatgatcaaggagcagctggagtggctgattgagaacaagtatatgagacgggacgacgatgatatcaacatgttcatttacgtggcctaa

SEQ ID NO: 1029 - protein, 852 aa, DROSOPHILA
MLRAIGKRDRDIFEEVWPDKRRIVLKLLRQDTVSQREWQDLFFGVHFVCLWDEKGAAKIYDCLQQDIVEFIVQAQSQVQAQRGEQALLATYIVEWRKFFTQSNYLPLPFRQLEQSPQVKPSSSGSSSSASVSASGASTSAAAAAAATSCSGQAGKSGASTSAAAGASTSAAAAAASTSASTSSAAAAAAASGSGSSSSSTSTSKKNPTEDSPVRKLMLDSWNKHIFHDIKHRLQESAMKIVHAERNGDAYDAQLVVGVRESYVNLSSNAEDKLEIYRENFEMAYLKATVEFYRLKSAEQQQENGVLAYMKYADSKLREEEVRAKRYLEPSSFSILTYTLVNVLIVDHLNSIIAECPALIRDYETERLNLMFRLMDRVMHGVGVEPMMGDLQRHIMSAGLADMLSASEVITQDSEKYVERLLELFNKFSDLVRNAFNDDPRFLTARDIAFKTVVNDTSVFKMELPTSIANRGVKYTAPESKCPELLANYCDMLLRRTPLSKRLTSEQIDARLRDVLLVLKYVNNKDVFMRYHKVHLTRRLILGTSADSEKEEDIVEWLREVGMPADYVNRLARMFQDIKVSEDLNTQFRTSISRHDAINIKILNAGAWARCSERVSVSLPIELEDYIPDVEEFYKKKHSGRKLQWYHHMSNGTITFVNNFGRYDLDVTTFQMAVLFAWNQRQHDKISYENLRLATELPDPELRRTLWSLVAFPKIKKQILLMEPAAISSPKDFAENTMFYINQEFAIVKNGKSQRRGKLNLIGRLQLSTERSQQEDNQSIVQLRILRTQEAIIKIMKVRKRMNNAALQGELIDILKNMFLPSKKMIKEQLEWLIENKYMRRDDDDINMFIYVA

SEQ ID NO: 1030 - DNA, 5836 bp, DROSOPHILA
gccgaaaactgcaaacaactgatgccaaagctgcaagaggccgttcgcaacgaaagtcatcccatcgaaatgaagatgacccgagtggccagtgaactgagctacacgattaagagttatctggaggagaccatggagacgatgatgcgcactggcatcgagcagtgtccgaaaacgctgggcaaccagatcgtagttcaggatcttcgaaaggctcttgccgagcgtttggtggtgcccgaggaattcctgcagatctgtctgcttaacaacgccggcagcgagattatgaacaaagttgggtgagtttcgacgaacttaatcaactaatttaagagagtagactaaaaagcaaaatagttaggcgaaaggtgtttttatttaaatgagcgagacaacagttcaagccattatcaaccaactacatatacaaaaagtaagaggtgagataggagagaaatcgaatttttgactaattcgatgcgaatgttgattaggaaaatgcaaaaacaaattttataactatataaatatagggttaacggagattaggaacataagattattaatattttatagctaaacctcgaaaacgagatatgcgaaattcgtgacattaaataaaatatttatttttcggctgaagaattgttagaataagatacacaaataaatatgtatgtactatgagtaatattctcggaaacgtgaacaagctaattcgcaatagaattcgcacatcgcctaaaatgagaggcagcaagaacgcaaaaaaaaaaaaaaaacaaatgactctattttttttcgcatactcgacttcctaaaccagctccatgtggaacgctctgcgcgctcttttcgctccaacgaaagttggaaaatatctgtttgtttacgtattcccatatacacataagtgggagggagagctaccgcttagataagattaaaaacaacagaccccgaaaaccagaaacagctgaatgcattttcactgtggccgggatctcggagccaaacgcttgttgcggatttggccgaaagtctataggtttatctgtgattattgaatcggagcagcgctgctcatcccttcatttagcttccagctgttgggaaaaagtgtcgcgaagaaatgggtctcatgcgcactttgtgctgctgcttcggtgcagggcagagtaatcagtcttcgggcgcaagtccagcttataaggcgtgtccggacgaggagcctttggaggagttggtcacagatccagaaagagcggatcagtctcctaagaagtagattgccgaatgccttctctattgctaactaattttgttcattcttcatgttctcctctgcccacagtgagatcgaacaatccctggccgccgccatctcagaccgtgctacggatgaggtgctggaggccctgacccgctaccgccgtggcatgggcatcgcggaatcgccatcggtgctgctagacgaaccgcagacgccggacatcgtgcgcagtcgctccagtcatgtaagtgctacattcgatacgacctgcgagcgaaccaatcgagtgtgggtggctcttatcagccccaccagctaatgggaaatgtgatgtcatggtcctaagcccctcggctggtttcactttcgcttcgacccacaaaaaaagtgaagcagttggtattttgatcgtcggtgctgctgctttgcctctgcttatcagcgcattcgattacaaatatttcacccactttgaggagttgccgaatcgaagaactatttagagtggacctagactcagactaacgaatatacggtgtgcttctgttccaggatgcggatggtttaatcatacgaccgggtggacgaggctcgatattgcccaaactgggcttggaatcgcccactgtaagtgttgaaaatctgtcgctacccaagtggatgcaatagacgcctccgaaatcagccaaataaaacgaattagtccataaccacatcatatattaaagagtataagcgaacagtagagtaccaagacctataagaagaattcgtatacaccccaccattatccaagcacacgctaccacatacatacatacatacatacatacatacatacatatatgcttagtatattcatgtgtaaaactgaacacttattccatacccaagtagctggacgtagtcgacacatgcaaacacatgaaagaagaaccccacttgcatcacaaacgtcccaacatactatatatacaacgaatctcattaataaattgcttaaatgtgtacaccaaatgctcatgctcattatttttctcgtgtcttcctgccctgatctgatcatcatcatcaccatcaatgtcaaccaaaaccgaaaacgaaaccaaaatcaaaatcaattgtacaaaatcgcaaatactcgtactcgtactcgtacttctaaacatactataattaaaccttgtctccaactcatttacataattgcatttcaaaatccaaaccaacacaaaaaagaaattggaatatctcaaccttgtaagtagtttttgtcttgttcttaagtctatctatcaatctacaaatcttccgaaaggcagtgttttttcaaaacagaaagaatccgaatttcttctggcttcttaggtagttttgttcactgtttttggggaagaattcccttttattatcccaatcctctgtagactgctcgtttctgtagactatctgtcgtaactctttaaacgttttgatttgtagttgttcttgtagagtccctaaaaaaaaaaacctaaaacaatcttcatgatttcacacactcaatgaagcataagcatctcataatatacaaacatccatgcaccagacacatcttaatcctgttcataatctaccacaggccacaccgcatctgcccaccaagcgacgcagtctggcaaagaaagtgcgtccccagtccgtggtggagaatctcagcctgggccacttccctgacctcctggagtcaccctcctcgcaccgatctaactcccagttgtccgcccgtgcagctgcaggtgccgccgccttggtgggagccgccaatatgaccgacagcatcgctgtggacgacggaggagtggatgagtgttgcgactccatcaccgagctgcccagcgcctcgttccagctccagcatctggtcaaaggacgtccgaagcgggccaaaacgcgtgcaccaactcggccgttggtcaccaccgagtgcgccgggggcagcagggaaattggcgaaggtttggaacacttcttccggcccggttctgttacgcccactaccctgactcccctagtttctccaacgtcggaggaatgcagctccttgtcgtttgtggacagtcccacgatgagccgcgatgggaatggacatatgacctccgaggagaccactcccattctggaggaacgccgaccaattaaattggagcgccagtcgccattgctcaaaagtaagagacaaatttcctcttgatatgagaagcagctctaaatgttccaattatttacaaaaaataaaggtgcgtcatgggccacccgctcccggtccacggacaatctagagaagtattcgccactggtgggtcgtaagtccccgctggtcaagatgcgaactgaaggaggtcccggctcgggatctgccaccggtgctgaggagacgtctatgcccagttctaatctgcttaaggcaaccgcccgagaggacaaaacgcgttcgcccagcagcgattcgatcaaaagccatgccgcaggcgagggtagtgttattgtgaagactggcaacggcatcctgcgaacacccatagttctgcagaagccgcgtccgtggtcggttgttggaagcgagccaaaggcaggcggagatcttattacaggcaatgggaatgccgactccagcaagaccacgccggacaaactagaagaaggtgtgtgaagaaattagaagggaatgcgaataatgaagttaatttttctctttccgctcagatgatgtcgagatagtgacatttggaaatacctgcagtggctcaattgttggcatcacgccgggcatagctttatccaccagtggcggtggaagcattgtgggcattacaccaggtaggtcatttcaaaatgtttgcatatatgtacatatatcaattattttcgctttctttctctcaggaggtgcccttgaaaagaagtctgtgcgagaactagcagcgggtctaaacagaatgggtaagttgttcactatgcatgcgcacgagtagtagcttgaaaatgcctgcctagcacttagcttctctgttagtagaagtgatgcaacctcttttgacctcctttgttttgtatcttatttattttcatattttgatttgttgtactcgttcgttacccgtaaagaactccccctaaagccgcccgttatgccaagaaccctgctgaacgcgactagtgtccgcacaagcacgtcctccacaggctccacctccaatagtgtatcagtcagctcatccacgaacgccaacacatcgatgacagtattaaaccagagccagacacgatcacggatcgtaagctcgaccagcagcactgacagcaccgagaccatcacagagcgcagcaccaccagcactagcagcagttcatccagcagctacgagaagcagcatgccaaggcctgtgccaatttaatcagcaacgaaatcctcagtatgcgcaacggacagttgggcgccaagtctggaagctgcgcagaaagtggtggtgtgaagcggatagccggcaaggagatctccacgctattcgaggtttgatctccgaggccggagctgcaatgcgataacttttattcatcagcgatcaaaattggctggctacttcgcttggttgatttcggtgctcatcctgtgcgtctaacattcgcatttgctgcatagtgtgtattccttaagttgtgtcgtattagccagtatgccgcattttgcctgtaatttcatctagtttgtgtttgcctgtttagctcctatttaatcgagccgtctaatagaatcactcttccacttacccacaggagacattagttgaagaactgcagcagagcatggcgaccagacgcggttttagagactcgacctacaccaaggaggatgtcgttgatttataagtgttctagttatatgctcaacattccctcacgtcgatccctagtccttcacccaacctgccacagtttcacgtgatagatagtagggttgatgataacgttaagtgatgatactgatgataaggaggaaatgagatgaaatggtgaagacagaaggatagagggaaacaaggttgcaacttatcgtactgaaccattaatttatgtgcaatgccgcgtgtgtgttgttttcatttggcaatttagaatgaacgtgatttatttattgatacaaaccctgatacttttatccaaattaacctttgcatatttttaaaaatgttttgtgtactatattttatatttttatgtatttaaatcagttaagtgccaattatatacagaattaatctacaaatatttttagcgtgtgctctacatcaatttcaatgaaactaacgaaaataacgcaatgaatatgatacactatacatattatgtaattcgattgagtgtataagaactattttaatgggctaaacctaaaaaaatctaaatgaaatataatattttttataactgcttccaaatacaaactttatggtttattatttccccttttctgtttacctcccctatacacatacttatagtatttatagtatttaagc

SEQ ID NO: 1031 - DNA, 2025 bp, DROSOPHILA
ccgggatctcggagccaaacgcttgttgcggatttggccgaaagtctataggtttatctgtgattattgaatcggagcagcgctgctcatcccttcatttagcttccagctgttgggaaaaagtgtcgcgaagaaatgggtctcatgcgcactttgtgctgctgcttcggtgcagggcagagtaatcagtcttcgggcgcaagtccagcttataaggcgtgtccggacgaggagcctttggaggagttggtcacagatccagaaagagcggatcagtctcctaagaatgagatcgaacaatccctggccgccgccatctcagaccgtgctacggatgaggtgctggaggccctgacccgctaccgccgtggcatgggcatcgcggaatcgccatcggtgctgctagacgaaccgcagacgccggacatcgtgcgcagtcgctccagtcatgatgcggatggtttaatcatacgaccgggtggacgaggctcgatattgcccaaactgggcttggaatcgcccactgccacaccgcatctgcccaccaagcgacgcagtctggcaaagaaagtgcgtccccagtccgtggtggagaatctcagcctgggccacttccctgacctcctggagtcaccctcctcgcaccgatctaactcccagttgtccgcccgtgcagctgcaggtgccgccgccttggtgggagccgccaatatgaccgacagcatcgctgtggacgacggaggagtggatgagtgttgcgactccatcaccgagctgcccagcgcctcgttccagctccagcatctggtcaaaggacgtccgaagcgggccaaaacgcgtgcaccaactcggccgttggtcaccaccgagtgcgccgggggcagcagggaaattggcgaaggtttggaacacttcttccggcccggttctgttacgcccactaccctgactcccctagtttctccaacgtcggaggaatgcagctccttgtcgtttgtggacagtcccacgatgagccgcgatgggaatggacatatgacctccgaggagaccactcccattctggaggaacgccgaccaattaaattggagcgccagtcgccattgctcaaaagtgcgtcatgggccacccgctcccggtccacggacaatctagagaagtattcgccactggtgggtcgtaagtccccgctggtcaagatgcgaactgaaggaggtcccggctcgggatctgccaccggtgctgaggagacgtctatgcccagttctaatctgcttaaggcaaccgcccgagaggacaaaacgcgttcgcccagcagcgattcgatcaaaagccatgccgcaggcgagggtagtgttattgtgaagactggcaacggcatcctgcgaacacccatagttctgcagaagccgcgtccgtggtcggttgttggaagcgagccaaaggcaggcggagatcttattacaggcaatgggaatgccgactccagcaagaccacgccggacaaactagaagaagatgatgtcgagatagtgacatttggaaatacctgcagtggctcaattgttggcatcacgccgggcatagctttatccaccagtggcggtggaagcattgtgggcattacaccaggaggtgcccttgaaaagaagtctgtgcgagaactagcagcgggtctaaacagaatgggctccacctccaatagtgtatcagtcagctcatccacgaacgccaacacatcgatgacagtattaaaccagagccagacacgatcacggatcgtaagctcgaccagcagcactgacagcaccgagaccatcacagagcgcagcaccaccagcactagcagcagttcatccagcagctacgagaagcagcatgccaaggcctgtgccaatttaatcagcaacgaaatcctcagtatgcgcaacggacagttgggcgccaagtctggaagctgcgcagaaagtggtggtgtgaagcggatagccggcaaggagatctccacgctattcgaggtttga

SEQ ID NO: 1032 - protein, 550 aa, DROSOPHILA
MGIAESPSVLLDEPQTPDIVRSRSSHDADGLIIRPGGRGSILPKLGLESPTATPHLPTKRRSLAKKVRPQSVVENLSLGHFPDLLESPSSHRSNSQLSARAAAGAAALVGAANMTDSIAVDDGGVDECCDSITELPSASFQLQHLVKGRPKRAKTRAPTRPLVTTECAGGSREIGEGLEHFFRPGSVTPTTLTPLVSPTSEECSSLSFVDSPTMSRDGNGHMTSEETTPILEERRPIKLERQSPLLKSASWATRSRSTDNLEKYSPLVGRKSPLVKMRTEGGPGSGSATGAEETSMPSSNLLKATAREDKTRSPSSDSIKSHAAGEGSVIVKTGNGILRTPIVLQKPRPWSVVGSEPKAGGDLITGNGNADSSKTTPDKLEEDDVEIVTFGNTCSGSIVGITPGIALSTSGGGSIVGITPGGALEKKSVRELAAGLNRMGSTSNSVSVSSSTNANTSMTVLNQSQTRSRIVSSTSSTDSTETITERSTTSTSSSSSSSYEKQHAKACANLISNEILSMRNGQLGAKSGSCAESGGVKRIAGKEISTLFEV

SEQ ID NO: 1033 - DNA, 3117 bp, DROSOPHILA
tcatttcaaattgatgaaactgatcttgattcatgctgaaaatatggtcatctttattgatgaacttggtagtttgctttaattcttttaaaaagtacttctatttgctatatggccatttcattcaaaacctatatttaccaatatttcttctctataacttcttaaatttgtatatatctttgattacagttcgcagtaaatcataaacaaatgttatgctatatacagtacaaacacaataacgcgatcaagtttctttagtatgaaaattttgtttacactgcgcttttcttcgaatgttttgaatgtctccaattctacgcttaatattccgaaacttatgccaagcgtttatgcgcgctaattatttgcgaacagaaatgtcagcatttattattcactttggtttcctatgctcgggtttaaattagtattacccaggtcaattgtgggtcagagccgccgtgggttttccgggtctccttttgtgtggcaaactgttttgggctgcgcataaacgtggtgggaatgtatgtgtgcgagtatgcagagtatatccttccgcctccctgccgccttcttgttgttgttgttgtttggtgcgcctggcatttctgcttacctgcacacacagccagccataccctgtggccatctcgctctggctcggcatctcggccttcttatccttgcgggctcagcgggagcggcagctgcagtgtcctttgtcgttatcctgctcgctcctcgccgaacagctggtcgccgtccttggcgggctttgacgcatccattgtgcacgtcacattttggacggctcgcaggacgggcagtcagtcgcctggcgctcgccgaaccaacaacatcctagccaacacattccgctcctgttcctgttcctgctcaagctccgctatatatatatatatttaaatatataaagtagcatagtagttgcaagttgctaaccagccaaacgcaattgttccatctgcagctcaccgttccagaaattttgcattaacgaagataccgagtgcttagaaggatggctcaggaaggtcaggatatacccacattcaagtgcgtgctagtcggcgatggcggcaccggcaagaccacctttgtcaagcggcacatgaccggtgagttcgagaagaagtacgtggccacactgggcgtggaggtgcatccattgatcttccataccaatcgtggcgccatccgtttcaatgtgtgggataccgctggccaggagaagttcggcgggctgcgcgatggctactacattcagggccagtgtgccgtcatcatgttcgatgttacctcgcgtgtcacgtacaagaacgtgcccaactggcatcgcgatctagtccgcgtctgcgagaacataccaatcgtcctctgtggcaacaaagtcgatatcaaggatcgcaaggtgaaagcgaagagcatcgtcttccaccgaaagaagaacttgcaggtaaataaagaaaagctgaacttttatttgaaattttgttaacgttattgtgcttgtgccttcttttttgtcaaacagtattacgatatttctgccaaatcgaactacaacttcgagaaaccattcctttggctggcgcgcaagctggttggtgatcccaacctggagtttgtcgccatgccagccctgctgccgcccgaggttaagatggataaggattggcaggcgcagatcgagcgtgacttgcaggaggcccaggcgaccgcactgcccgacgaggacgaggagctataagcctatttgtagttaacttagagcgaaatccgacttgcgcgaaaacacaaacacacacacactcaaacacaaaaccacaacacacaacaccacaccgaacatagaacactgaatcacaggcaccgtatgaaaaggcgtggcaagagggaatgaaggattacggattagaggaagtagcattagcagtagtgtactatccgtacactattggatttgccagcctatgttcttcgatcgatcgttgggaaaatctacaaacaagcccttcttaatacgtcgattgtatttaaattttagatccccaattcattaataagtcggttataattgattttttttttgtttgtttccttatacgttggctcttggaaaaaaaggagtaagtaagtagtattgtcattaaagtgctaaagcagcaggcaacagcaacttaatcgaaaaccaagagaaataaatagtcgcagaacgtatttttttaaaacttgcaacaccaatgttcttttccacccaaaaaaaaaaaggaagaaaaaaccaagttacttcaacaaaagtgtgaatgttagaaacgagcgagacggcatgctcggagcgagcgagagcgcaatagctggccaatgaactgagtccccccaaaggaaaattaatactattgaaaaaagaaaagaaaggaaaacactggaaactatgagaaaataacctatagacaggccgccgaattcgcatccacatgttattaatctaagaactaaagaaataaaaaataaacgtcgaagaaaaaaaaactaaacgaacggagctggatttgcatttgaaagatgataaggaaatgatgctagattatagttatcgcataccctgtaattgaatgggtagcacatatattccgttagctaatcgtctactgtttacatttctacatttgaatacactgttcttaatgaaactcctcggatttagggacacttgaggcagcaggcagggaaaactccggtgaagcgatccttgttgccgcaggtgaccttctgctgtccacagctgaaaaaaagatattgtagatggcttggttagaatcatgtggagatcggggcaaagttcagctaggaaatattttgttttcttcatgcaacctaagttgctaattaagatcgctgtcatgatgcacttactcctccacgatggtcttgaaggtgtccgtgcagatggcccgcttgaggcacttgccatccttgccgaagtccacgtagtcctgtccgcgtctcagcagcggcagatacttgagaaagatggtctcatcctccgagttgcggtaggagcacacgggttcgctggctacgtac

SEQ ID NO: 1034 - DNA, 1039 bp, DROSOPHILA
ctcaccgttccagaaattttgcattaacgaagataccgagtgcttagaaggatggctcaggaaggtcaggatatacccacattcaagtgcgtgctagtcggcgatggcggcaccggcaagaccacctttgtcaagcggcacatgaccggtgagttcgagaagaagtacgtggccacactgggcgtggaggtgcatccattgatcttccataccaatcgtggcgccatccgtttcaatgtgtgggataccgctggccaggagaagttcggcgggctgcgcgatggctactacattcagggccagtgtgccgtcatcatgttcgatgttacctcgcgtgtcacgtacaagaacgtgcccaactggcatcgcgatctagtccgcgtctgcgagaacataccaatcgtcctctgtggcaacaaagtcgatatcaaggatcgcaaggtgaaagcgaagagcatcgtcttccaccgaaagaagaacttgcagtattacgatatttctgccaaatcgaactacaacttcgagaaaccattcctttggctggcgcgcaagctggttggtgatcccaacctggagtttgtcgccatgccagccctgctgccgcccgaggttaagatggataaggattggcaggcgcagatcgagcgtgacttgcaggaggcccaggcgaccgcactgcccgacgaggacgaggagctataagcctatttgtagttaacttagagcgaaatccgacttgcgcgaaaacacaaacacacacacactcaaacacaaaaccacaacacacaacaccacaccgaacatagaacactgaatcacaggcaccgtatgaaaaggcgtggcaagagggaatgaaggattacggattagaggaagtagcattagcagtagtgtactatccgtacactattggatttgccagcctatgttcttcgatcgatcgttgggaaaatctacaaacaagcccttcttaatacgtcgattgtatttaaattttagatccccaattcattaataagtcggttataattgatttttt

SEQ ID NO: 1035 - protein, 216 aa, DROSOPHILA
MAQEGQDIPTFKCVLVGDGGTGKTTFVKRHMTGEFEKKYVATLGVEVHPLIFHTNRGAIRFNVWDTAGQEKFGGLRDGYYIQGQCAVIMFDVTSRVTYKNVPNWHRDLVRVCENIPIVLCGNKVDIKDRKVKAKSIVFHRKKNLQYYDISAKSNYNFEKPFLWLARKLVGDPNLEFVAMPALLPPEVKMDKDWQAQIERDLQEAQATALPDEDEEL

SEQ ID NO: 1036 - DNA, 2888 bp, DROSOPHILA
aaatgttttgtgtactatattttatatttttatgtatttaaatcagttaagtgccaattatatacagaattaatctacaaatatttttagcgtgtgctctacatcaatttcaatgaaactaacgaaaataacgcaatgaatatgatacactatacatattatgtaattcgattgagtgtataagaactattttaatgggctaaacctaaaaaaatctaaatgaaatataatattttttataactgcttccaaatacaaactttatggtttattatttccccttttctgtttacctcccctatacacatacttatagtatttatagtatttaagcgacaatccgttttcaaattttgaggcgcgttatgccgccagaaacaaatgcatttatttagaaacaaggcggagaccgacgatcttattgattattttctaaatagttaacaatttaagaaactaggcgaaaacgaaaccgatataaaattactaagccatttaacaacagaaaaccgaaatctatagaaaactaattacccttatcgcaaaacgatcaacttcaattttgatgatctagtagtttgcaccaacgacacagaatatattcagagcagcgtttaaactttaaaccagtccaccaccgaccacacacttcgagttttgagtgtatcccgttctcattcaaaaccccgaaacgaaataagagaaacttaacgtgttcattaaagttaagcaattaaaacatcattgtaatctattgaaattcaaattaaacggaaacgatattggacagtagtgttatttatttatttttgaatttcgaaagatcaggggccctattggcagcattggagtaatcccagtattattacgatatttagaatggtagaagcccagcagaccgataaaataccaaaacattgttaccactagatctatcgatagcgatgccggcattgcttgctatcggaaaactgttcatcaccaactcgcgtcggcagcgaattgtttttctgcatttcggaaaataagcttcaaaagagtataaaaagaccgagtaaagaccaaacgtaagcatactataactgccaagatggtgaaactaacgccggagctgataaaccagtcgatgcaatacataaacccatgccgggagcgcgagctggatttgcgcggctataagattccacaaatcgagaacctgggcgcaactctggaccagtttgataccatcgacttgtccgacaacgatctgcgcaagctggacaacctgccgcatctgccgcgcctcaagtgcctgctgctgaacaacaaccgcatcctgcgcatcagcgaagggctggaggaggcggtgcccaacctgggctccatcattctcaccggcaacaacctgcaggagctgagcgacttagagcccctggtcggattcaccaagctggaaaccatctgcctgcttatcaacccggtatccacgaagcccaactaccgcgagtacatggcctacaagttcccgcagctgcggctactcgacttcaggaagatcaagcagaaggaccgccaggcggcgcaggagttcttccgcaccaagcagggcaaggacgtgctaaaggagattagccggaagtccaagatgagcgccgcagccgccatagctgcagaggcggggaatggcaagggaaggggatcggaaggcggacgactggccaatccgcaggacatgcagcgcatccgcgaggccatcaagcgggccagctctctggcagaggtggagcgtctatcgcagatcctgcaaagcggccagctgccggataagtttcagcacgagatggaggcggtggcacagaacggggcggggcacaacggttcgggggccgtggccatggaatactaggactagaattatccgctcatctgtcagctaccttataaccgtagaccaatattttttaataaaacaccaaaagttgattcatcgcattctgcatttcggacactcaaaaacatatagaatcttctgttttcaactaagaccgctggccgaaggatctttcacggaaagattcgggacaatcggtcacaacagaaatgcatttacatgaccgtaattggctaaaagtttaacaatctacagcgagtacaaaggggacacaaaacgagaggagctgctggcttatgtggagagtggagtggtgtggtgtggacctggctcctggaatccggtattgctggggagtgttattaagatcctttcgccgccattatggcgtcgtagtgcaggccagtgtagaagatgatccacgtgaccaggaatccggcaaacgacgtcatgaacccctccttgatcagctcccatacccctccgtaggcgtcctcgtccacgttctgaaagtttatggcgtacaggtagacgatcccgcagctgatgccggcgaatctgggggcgcattggattgattaagtgaagtgactccggctatttataggttaaaggtagctctactcacagtacgaggcccagaaagcccttcagcggaacaatgccccagatgacgcccagaaagatgccgaatacctggcgtgaccagtagataacgtccaggaactcttcctgcgggagatgcgaaggattggattagcaatctagattcagcgccgggaactttgctcaccttgtcctcccactccgattttgtgatggcgcgcgcgcaaatttcccgtagtgtggagcttttggccgagtggccgttgcgctcgatggtatttgttttcgtcgccatagcttaattaagatctgacccaaatgagtttaaatttttttgttaattaattttttcactatcaaatgactaacgcgttttggcgaaatgaaaaccccaaatgcctgcgctgtc

SEQ ID NO: 1037 - DNA, 888 bp, DROSOPHILA
aattgtttttctgcatttcggaaaataagcttcaaaagagtataaaaagaccgagtaaagaccaaacgtaagcatactataactgccaagatggtgaaactaacgccggagctgataaaccagtcgatgcaatacataaacccatgccgggagcgcgagctggatttgcgcggctataagattccacaaatcgagaacctgggcgcaactctggaccagtttgataccatcgacttgtccgacaacgatctgcgcaagctggacaacctgccgcatctgccgcgcctcaagtgcctgctgctgaacaacaaccgcatcctgcgcatcagcgaagggctggaggaggcggtgcccaacctgggctccatcattctcaccggcaacaacctgcaggagctgagcgacttagagcccctggtcggattcaccaagctggaaaccatctgcctgcttatcaacccggtatccacgaagcccaactaccgcgagtacatggcctacaagttcccgcagctgcggctactcgacttcaggaagatcaagcagaaggaccgccaggcggcgcaggagttcttccgcaccaagcagggcaaggacgtgctaaaggagattagccggaagtccaagatgagcgccgcagccgccatagctgcagaggcggggaatggcaagggaaggggatcggaaggcggacgactggccaatccgcaggacatgcagcgcatccgcgaggccatcaagcgggccagctctctggcagaggtggagcgtctatcgcagatcctgcaaagcggccagctgccggataagtttcagcacgagatggaggcggtggcacagaacggggcggggcacaacggttcgggggccgtggccatggaatactag

SEQ ID NO: 1038 - protein, 265 aa, DROSOPHILA
MVKLTPELINQSMQYINPCRERELDLRGYKIPQIENLGATLDQFDTIDLSDNDLRKLDNLPHLPRLKCLLLNNNRILRISEGLEEAVPNLGSIILTGNNLQELSDLEPLVGFTKLETICLLINPVSTKPNYREYMAYKFPQLRLLDFRKIKQKDRQAAQEFFRTKQGKDVLKEISRKSKMSAAAAIAAEAGNGKGRGSEGGRLANPQDMQRIREAIKRASSLAEVERLSQILQSGQLPDKFQHEMEAVAQNGAGHNGSGAVAMEY

SEQ ID NO: 1039 - DNA, 6037 bp, DROSOPHILA
tctatgcagagaatctaagtgcatctttagtatcttcttttagttttccttataacagtgaattcaagagaccatccaatattcactactatataatgtacattattttggctgctgcattggtttatttattcggctttctgtggcgctcgagatgccaaaggcgtggaaaaaagaggggctgcaccgcgggaaagggcgtggccaggggggctggaagcggtccaaaccaaatcaaagcgctttgttttcgatcggtttttctgttcaatttgcggtgcatgtttgttttgctgaatgccaaagagtttgttttgtcatttgcatggacgaccgaaaaacttgtttgttttgtttgcgcagttttcctcgctttgtttgcgcgaaaaaaatgagggttccccgcattccccgctcgaacactttgcaatttgtcgtttgggaaaagttgaaatattatacttaattaatacaaattatttcgcagcatactttgcggtcggcggcggaattccaagctgctgtcttcgagcttagcaaatttatgcttggcatttaatttttgcttttgtcaacgtcgcagtttttgctttttgtcttttttttaaccaaccaacctaccaaccaccttcgacacttgagcagcagcagcaacatcattaaaataaacaacagttggccgtaactggtttttgtgctacgttttttcgagttaacgtgtctctttgcggttggcagctcttttgtggtgcgctctcttagctgaaagtctctttgcagataatcatgatcatcttcattagcagcgtttatctgggattcccgccttttggggggcccagcccctttgttttagtttatcaacaaagttgccagagaggcgagagacacaaaaaccaggcaaaacaaaaatcacgacgctctcaacattttggtacctttgccagcgtttttgtttacctttcgggccaagtcagtacgctttgatttcttgaccatttacgttattgaaatattttcgtcgtcgcggcaaaacggcgaggagtaatcggtaatcatttttcttggctcactgtggtgcgtgtgctacggttacagttacagttcttgcggctttctttattgcttcttttagccagttggtgtgcaattgcattcgtcatgtttttctgccacatggccaagaagttttcttcgttttcctcggatcggtttgggaaaggggaacaactgtttgggcgcgcgcttttctaattatggtttatgtgtcagtcaggtgtaaattaatgattataatttgctgcgtgtctcggattcaaagtcatcattaagtcgcgttcgttgcttaagtctttcgatttgccagtggtgaagtgtgcgtgctaatgcgtgtgtatatactgccgttggctacgaacccgtaaaaataaaaagcaaaaaccgcacagccgtcatcataatgacaatcacccaacgctcaattactcaatgctagaaaatatcaaattcgcgctgctcttattttttatggcaaattttatttcgctccgtttttgtcattaaaagcagtgaaagtcgttgggtcgagcgcttttcttttcggtcacctttatttagaaattcgagcatgacaaagccaattctttggtcggttacgattatgcctcttaggattttgggtacattggcttgtccgtgggaatcaaaagattgatgggctgtatcaaaatttgggcacacttgaggttgaattttgtaaaaaaaaaaaacgctaataaacatggagaatctgatgtgtagatatgacatcagcagaacaagtgagattataattagagatgattgctttagtcaatcttgacttcgacaaggaaccgtttgaaatttttattaatgggtaaaatggcgatcgtgctataaataacaaaaatacatgcataggtatacgattataaatcttaattttttaagaacagaaaacggaacatgcattgtatcattcagcatgagttggttactcctgttaacaacacttttgtttataagttgctgaaataacctttttatttaagcaaatatgcatcaaatcacccagtagttatcagtttcattttgttgaagttcgtttattttttgaagggcatttccagttcgttgcctgatctttagattgctctttccggttggctattgccatttctttgggtctgacctttacacattttaagttgttactcaatagttttcgttgcctttcggttttgcttcggcttggtttggtttgatttggcttttgtcatcacaaccatttattggcgtttatttatgtccgtcaattgtttgcagcttgctgtttgctatattagcccgctttgatcctctcctacgcctctgattcggcttcaaacttgagttcggctttcgtttgtttttctatttccacattagttttattgacatttggcaacaagttgccagaaaccagtttcaagttgtttctgcgctcagctgttctgaagcgggatggttagtcatggaccacctcatccgaacgcgaatactgtgtaccgaatggcagtggatattggctaaaagatacgaaacgaatgatattgattataatttacaaacaaaatatcactaaatttagttaacttaaatctgtacattttaatcgatttctactgttggtaaacaaagttgaatgtttgcatgtcagtttgttggtgctaattgtgtccaatgtaactaatctttgacgctgtttgccaattttccagttgcaccgatcaacgagccaccgagtgccacacagattacgcagaatcagaggaaggtcagcaacaccgccagcaccaccagccacatgaccacaacgaactcaagcaattccagcaccacctcggtgaccacgcagcagcagaaggagcagatcggaggcagttcctccaccacatcgaaggtgtacatcaagaagaccgggagcagtagcaatagcactaccagcagcaccaccacagcttcctcttcggcgggtcgcaaggagagctttggttcccgtgactccctgaacgatatccttagtgaaacgggtctgcccaccggcaatgtggctgcccaaaggaaatccctggagaacaagaacctggacctgactaagccacctggagtgggagcatcagtgtccattggacagcagcggagcagcacctctagtgccaccacctcctcagccactacagtagccactggactaacctcatcatcagtgagcaagtccatggagaacatgctggacgagaaggtcaagtcgccaccaccgccggtgctcagcaagaagcccagtgtgccgctcaagaaaactcccaccggcggagttcctatgactggtgagtactgtacacagtagtgccacaaatccttaaaacaatgctaatatattatctcacaatcgcaggtaaccttttgggcggcaagaaaaagaataccgagggaaagctcaccactgccgtgtcccatgatttggcggatggtcttgcggccagcaagatgctttcaggtgctaatcaactacctgaatctggagcagctggcaatgtggtgatccggagagctgccacgattgcagtggaggatacagatttcgatcgcgtggagagggcttccatactcacggatatgcggcaaggaagggtcaaggcgccaaagagacgtccaccatcggcggctatcaatgtgctgggcgaaagtaataacaattccgtatatgtaaatggcagtggaatgtccggatctggtggagcaggaagtgccagtgagttgagtgaagatggcggtgctggagggaagacttctgatgacaattccaccggcgaggaaccacagttggccaaacccaagccacgtgagtgggagaagaagaaggcgccttggatggaggagctgaaggcctcgcaggtcaccaggaaaaagacctcacccagtgtggagccacgaggagcttcggtggccgaaaggacatccaaactctttgcggccgagcaagctgtcagcagcaatagcagcagtatcacaacgaaagtccaatcttcagcggtgacctcctccatgtttgtggagaactcaacgaccagcagctcggtgatcaccagtagctcccacaccaccaccaacgatgccatcatgtcgcgcagcttgtcggctgccaaagtccaaaccgccagcagcgacgaggagacgagagccacaaggccaaacagtctagctatacgaaatcaacgaagtgtttcgcctctggtaaagagctccaatgccagcagctcgcagtcccaggaggagaagcccaccagccagctgaacaaccaccaggatgccagttcctcaagggtggcccaattggagcaacgggtggataagctggaggggctggtgctaaaccaacagcgaaccattgaggagctggtaaatgccctgaaatcggaagctgaacgcgtcaagattttgaggagcgaactggacaaatacgcgcagtgcgtgacgcaagtttgagcctagttgaatcgccttttagctagcttttgaatacttgatttttagcgtctgctgaactctacaatatacccaggcctaaaagcgtagaacgtagtagagtagagaccgaacccaagacaatcccaaatatctgtactctgtgttctgtacttatataccagaatgatctatccaaaaccactagcgatcaatcgtttttgcatgccaaaaccgtttcgtttttcgctacaatactttgtattcccctgtatatctgataatttcgataagtattttttatacactcgtacattccgaagagcaaaagggtgtgatttcttttagctgctttcgattgcgatttgttttgtttattcgatttatgattattttttaaagatgtattaaagttatgagtaaactgtactataaactatatacctaacgagagagaaacatacaaagttcgatggagtcgatgatgatgcctaaaacttaagcaataccaataaataatgcaaataaatacttcaatgttttctgaatgtttttcattttcttatttcgatgtgattctgcttttatttttttctaaatgactgatatagatagttagcgatgtagagaatccacatatctaagcccggataataaactaacctttttgataaaatttctttttcataacagcaagcaaactcgtcgcgggaaattcgacaattggatgttttaattgatcagcggatcagatcagccgttagatcgaacgatccagatatattagatatttataacccagacccgcctgtacagaatattcctttttcttttgtgataagcctccgcataaccagctttgtagtctaatcaaatcaatctgcgtagctagccacccgcaattcccgattgttagcaaatatgttgtggtttacttggaaatatcgcattttgtatggcttaacatgtaaatattattgtaaattaatatgggatattaaataaacatttcatatttagtaaaacaaatgccaaatctagttcaactatcagtggctgatgggggggacttgtattctatttatttttgttatcaatttccatctaaacgtttctacatgctgacaatatcacgctttaaagttcacgcttagaccttgcaccttggcctgctatacaaaatttttttattcaaaatagcttaacatctattacttttgttatggttaaaataaatattggggaccaaatcaattttgccttggttcatgtctttgctaatatatcatagacacattttacattttactttttatgtaaaataataagcttcgatcatgttgaagtaatttaaattgttaataagtaattaattaaatcaggaaaataaaaatatgcgtgaatattattttttttccatatttccatattttattcttaagaatatagatagaatctagatataattaaactgtataaaattctggacttagaaatcagctttggtcaa

SEQ ID NO: 1040 - DNA, 2266 bp, DROSOPHILA
tacgttattgaaatattttcgtcgtcgcggcaaaacggcgaggagtaatcggtaatcatttttcttggctcactgtgttgcaccgatcaacgagccaccgagtgccacacagattacgcagaatcagaggaaggtcagcaacaccgccagcaccaccagccacatgaccacaacgaactcaagcaattccagcaccacctcggtgaccacgcagcagcagaaggagcagatcggaggcagttcctccaccacatcgaaggtgtacatcaagaagaccgggagcagtagcaatagcactaccagcagcaccaccacagcttcctcttcggcgggtcgcaaggagagctttggttcccgtgactccctgaacgatatccttagtgaaacgggtctgcccaccggcaatgtggctgcccaaaggaaatccctggagaacaagaacctggacctgactaagccacctggagtgggagcatcagtgtccattggacagcagcggagcagcacctctagtgccaccacctcctcagccactacagtagccactggactaacctcatcatcagtgagcaagtccatggagaacatgctggacgagaaggtcaagtcgccaccaccgccggtgctcagcaagaagcccagtgtgccgctcaagaaaactcccaccggcggagttcctatgactggtaaccttttgggcggcaagaaaaagaataccgagggaaagctcaccactgccgtgtcccatgatttggcggatggtcttgcggccagcaagatgctttcaggtgctaatcaactacctgaatctggagcagctggcaatgtggtgatccggagagctgccacgattgcagtggaggatacagatttcgatcgcgtggagagggcttccatactcacggatatgcggcaaggaagggtcaaggcgccaaagagacgtccaccatcggcggctatcaatgtgctgggcgaaagtaataacaattccgtatatgtaaatggcagtggaatgtccggatctggtggagcaggaagtgccagtgagttgagtgaagatggcggtgctggagggaagacttctgatgacaattccaccggcgaggaaccacagttggccaaacccaagccacgtgagtgggagaagaagaaggcgccttggatggaggagctgaaggcctcgcaggtcaccaggaaaaagacctcacccagtgtggagccacgaggagcttcggtggccgaaaggacatccaaactctttgcggccgagcaagctgtcagcagcaatagcagcagtatcacaacgaaagtccaatcttcagcggtgacctcctccatgtttgtggagaactcaacgaccagcagctcggtgatcaccagtagctcccacaccaccaccaacgatgccatcatgtcgcgcagcttgtcggctgccaaagtccaaaccgccagcagcgacgaggagacgagagccacaaggccaaacagtctagctatacgaaatcaacgaagtgtttcgcctctggtaaagagctccaatgccagcagctcgcagtcccaggaggagaagcccaccagccagctgaacaaccaccaggatgccagttcctcaagggtggcccaattggagcaacgggtggataagctggaggggctggtgctaaaccaacagcgaaccattgaggagctggtaaatgccctgaaatcggaagctgaacgcgtcaagattttgaggagcgaactggacaaatacgcgcagtgcgtgacgcaagtttgagcctagttgaatcgccttttagctagcttttgaatacttgatttttagcgtctgctgaactctacaatatacccaggcctaaaagcgtagaacgtagtagagtagagaccgaacccaagacaatcccaaatatctgtactctgtgttctgtacttatataccagaatgatctatccaaaaccactagcgatcaatcgtttttgcatgccaaaaccgtttcgtttttcgctacaatactttgtattcccctgtatatctgataatttcgataagtattttttatacactcgtacattccgaagagcaaaagggtgtgatttcttttagctgctttcgattgcgatttgttttgtttattcgatttatgattattttttaaagatgtattaaagttatgagtaaactgtactataaactatatacctaacgagagagaaacatacaaagttcgatggagtcgatgatgatgcctaaaacttaagcaatacc

SEQ ID NO: 1041 - protein, 537 aa, DROSOPHILA
MTTTNSSNSSTTSVTTQQQKEQIGGSSSTTSKVYIKKTGSSSNSTTSSTTTASSSAGRKESFGSRDSLNDILSETGLPTGNVAAQRKSLENKNLDLTKPPGVGASVSIGQQRSSTSSATTSSATTVATGLTSSSVSKSMENMLDEKVKSPPPPVLSKKPSVPLKKTPTGGVPMTGNLLGGKKKNTEGKLTTAVSHDLADGLAASKMLSGANQLPESGAAGNVVIRRAATIAVEDTDFDRVERASILTDMRQGRVKAPKRRPPSAAINVLGESNNNSVYVNGSGMSGSGGAGSASELSEDGGAGGKTSDDNSTGEEPQLAKPKPREWEKKKAPWMEELKASQVTRKKTSPSVEPRGASVAERTSKLFAAEQAVSSNSSSITTKVQSSAVTSSMFVENSTTSSSVITSSSHTTTNDAIMSRSLSAAKVQTASSDEETRATRPNSLAIRNQRSVSPLVKSSNASSSQSQEEKPTSQLNNHQDASSSRVAQLEQRVDKLEGLVLNQQRTIEELVNALKSEAERVKILRSELDKYAQCVTQV

SEQ ID NO: 1042 - DNA, 4149 bp, DROSOPHILA
gcgacccacgaacaacaacaaaatgtatggtcaaggccaaactaaaagaaggaaatccctattggtaaccccaaataccctttcccctacgaaaatacattgttttcctcagtgcgtagtgtgcattactaataatctatacaaatagttttaattcattttactgaaactaaacgaatttgtatgatgctatcgaacacgattttttgaaaagttattaataatccaagttccttagagattactcagattactcggttctgttcaatgtcctctagttaacttgaacctaatttcctccacatttgaaactaaactaaacatgcgcatgttcaatcccaagtctcctgtagtttcagagatcaggacgtttatacggacgacaacgaatctaccagatcatttatttataaaaatataaaagaattaatatcgattggctgcgacaaacactccccactctcactgcgctacctcttggttagctttgtgctagttttagtctagtttctaatgttaatgaactttgaaaaaggggcgttccacaaccgcgcccaattccgcgagtacattatcataagacggaataattattctatttgcgaccaagagccaaacaatgataagacgtatcgcacaagccgcggaaactcgggaggaaaatgggggcggttgaagggtacataatgataagcgacagccgcaccctcaagtattttttaaacgatactaaatatgtaggcttttgtcaaatatttccatttaaattagggaaaagaacaccacaatgttgtttgttgtttaataaagtatggattggagagacccaaaaatccactttaaggttatcagttgactgaatagtacaagctattcctagcattactgtccaactactattaattgaaatattaggtgcccatttttggaatggcaacaatcactcacctaaattgtccacaaatagctttgagaagcgatgttctggtcgggattgatcctaccgcttgagcacattgatgaaggtctcgtgaggaacgcggatgttggcgaacatgcgcatcttcttcttgccctcggcctgctgcttgagcagcttcatccgccgggtgacatccccaccataaagcttggctgtcacatccttgcgataggccttgatggtctcgcgcgctagcaccttgctgcccacgcatgcctggattgcgatctgtaccatctgctttggaataagctcccggagtttgagaaccatctgccgtgccacgcccgtggccttggacacatggacaatgcggcagagctcctccacgggcttgccgttcagatggatgtccaatcgaaccaagtgcgatggatgatagccgtggtcctcgtagctgaaactggcgtagccagaacttaacgacttgaggcggtcgtggaagtccaggatgatctcgcttaacggcagtacgtacttcattagcacacgggtgtcgtcgatgttcaccgagctttgctgcaatccccgacgctccacacacaggctgatcacctggccaacatactccgtgggcgtgatgattgtgcccaaaaccaagggctcatagtactccttgatggaatgcggttccgggaagagggctgcattggaaatgtccattgtatcgcgaccctgttgcttgatcatctttggattactcaagaccaaacgatatgtgacggaaggcgcggtgattatgggctcagcgccatgctcctgctccaggcgctgacagaagacctccatgtgcagaagtcccaggaagcccaaacgccaaccttgtcccaaagctgggctggaatcaatttttacagttaccgctgagtcattgagtaccattttgtcgatggcactgcgcagggcgacatgttttgactggtcggcgggaaaaactccagcaaaaacaagcggctgttgcggtcgatagcttcctgcggcggcgactgcttggttcttcaggtgaatggtatcgcccacaatggattccttgctgttgcgcatattgcaagcaatcaagcccacttgaccagcggatacatccggaacaggacactcggctggtctcaacacagagatgctcttgacggaatacaccttcttggtggctagcgactgaatatcctgattctgctctagcttgccattcagcacataaattagattaagggctccgcgatacttgtcgaaccagctgtcgaagattagggcccgaaagtcgctgtcccgttgaacttgtggtggcggcacagtttctatgaccctttctaagacttcagatacgccggtgcccagcttggcggacacgcgcagcacctcgtccggatctatgccaaacagcagctttagatcctgacaaacctgatcagggtttgcatgcttgatgtctatcttgttgagcacgggaaccactgccaactgacgctgcttggctaagtgatagttggccacggtttgagcctggacaccatggcatgcgtccaccaggagtaccacgccgtcgcaggcagccagagatcgcgaaacctgggtaatgggcaaatgattagcagaagaattagcagacttttgacatgaaacacacttcattggaaaaatccacgtgaccaggagtgtcaatgaggttcagcagatagagctgtcccttgtgacggtggaagatcgatgcggtctgggccttgaccgtgatcccacgctcccgctccacctgcaggttgtccagtacctggtgctgcccgccattacgcgcaatggctcccgtgagctccagcaaccggtcagccagcgtgctcttgccgtgatcgacatgcgcaatgatgctgaagttccgaatgcgctccaccggcatgtgggcaaactcgcgcaacagatccgcctgcgagggctcctccgtttcgcccttgacctgattggtggtgctcaggttgcggacgagtaagctctttgacctggccaccagccaggcggagtgtcgtttgtcccccgggcgctgcagcagccaacggattgaaatcgcacgaatcatggctgaatttacatttctttgccggcaaaaaaaaattgttaccgcacaccatgtgcgccgtgtgaccgtatgatgaaaaaataccgagtagccgacaatcatgtgtaagacagcaggaaaatactgtccatcttgtgacaaacagcgccatctgttggcaatctacgaaaaccgatgtttacacatgaacaaatatttacaactcaataatcctttactaatttgttctcggatgcaaattaaacatattcttaagcgaaagatcgtaatgctcctagatctcagattgcctataggtttatattcataaataaacaagtaagaaagtccgaaatattgagctatatatcataaatattctgttttttcaactgctttcgtgaggaagtcatcgctgcgagattcgatttctagaagccgaggttcttttcttggaacagcttacaatggtaaatggtaattgtaatagaccagcaagggagctggaggaactgctggttccagaaaaagggggtttgacctcagcacagtcagagaaaaagccgttctcaacgatctcgatttaagaacttcgatctcaaaatctagccaagatcgaatcatgctcagcatactcaggtcgagatcgaaccattctcagattgcaactgactttgctcttatttttcgatctctttcttggttttttaaccttacccacacatcatcttctacaatctgaaacccgatactgcttccgtctaaaatatgtatccaacatagagatcgttttcgtctcgaaaaaataagtcttcttttcatgagaatgattgatgggatggtagggattatcctggctgtgtccctgtaccgattccacaagaccttgatgctagacgtgttgaggagaccatacacacggacaatactcaagtatgggttgaactagggatacttgaggttgtgaggatccttaagctctttcgacgaacgcttgacaaatatgtacaagtaaaacttttgttctactaacaataatgccaatgtgattggaaaagctgatagtgaaatctcgcaatgttactcttgtgcttgcttgtgttttcgaatgcatacgttgaat

SEQ ID NO: 1043 - DNA, 2040 bp, DROSOPHILA
atgattgtcggctactcggtattttttcatcatacggtcacacggcgcacatggtgtgcggtaacaatttttttttgccggcaaagaaatgtaaattcagccatgattcgtgcgatttcaatccgttggctgctgcagcgcccgggggacaaacgacactccgcctggctggtggccaggtcaaagagcttactcgtccgcaacctgagcaccaccaatcaggtcaagggcgaaacggaggagccctcgcaggcggatctgttgcgcgagtttgcccacatgccggtggagcgcattcggaacttcagcatcattgcgcatgtcgatcacggcaagagcacgctggctgaccggttgctggagctcacgggagccattgcgcgtaatggcgggcagcaccaggtactggacaacctgcaggtggagcgggagcgtgggatcacggtcaaggcccagaccgcatcgatcttccaccgtcacaagggacagctctatctgctgaacctcattgacactcctggtcacgtggatttttccaatgaagtttcgcgatctctggctgcctgcgacggcgtggtactcctggtggacgcatgccatggtgtccaggctcaaaccgtggccaactatcacttagccaagcagcgtcagttggcagtggttcccgtgctcaacaagatagacatcaagcatgcaaaccctgatcaggtttgtcaggatctaaagctgctgtttggcatagatccggacgaggtgctgcgcgtgtccgccaagctgggcaccggcgtatctgaagtcttagaaagggtcatagaaactgtgccgccaccacaagttcaacgggacagcgactttcgggccctaatcttcgacagctggttcgacaagtatcgcggagcccttaatctaatttatgtgctgaatggcaagctagagcagaatcaggatattcagtcgctagccaccaagaaggtgtattccgtcaagagcatctctgtgttgagaccagccgagtgtcctgttccggatgtatccgctggtcaagtgggcttgattgcttgcaatatgcgcaacagcaaggaatccattgtgggcgataccattcacctgaagaaccaagcagtcgccgccgcaggaagctatcgaccgcaacagccgcttgtttttgctggagtttttcccgccgaccagtcaaaacatgtcgccctgcgcagtgccatcgacaaaatggtactcaatgactcagcggtaactgtaaaaattgattccagcccagctttgggacaaggttggcgtttgggcttcctgggacttctgcacatggaggtcttctgtcagcgcctggagcaggagcatggcgctgagcccataatcaccgcgccttccgtcacatatcgtttggtcttgagtaatccaaagatgatcaagcaacagggtcgcgatacaatggacatttccaatgcagccctcttcccggaaccgcattccatcaaggagtactatgagcccttggttttgggcacaatcatcacgcccacggagtatgttggccaggtgatcagcctgtgtgtggagcgtcggggattgcagcaaagctcggtgaacatcgacgacacccgtgtgctaatgaagtacgtactgccgttaagcgagatcatcctggacttccacgaccgcctcaagtcgttaagttctggctacgccagtttcagctacgaggaccacggctatcatccatcgcacttggttcgattggacatccatctgaacggcaagcccgtggaggagctctgccgcattgtccatgtgtccaaggccacgggcgtggcacggcagatggttctcaaactccgggagcttattccaaagcagatggtacagatcgcaatccaggcatgcgtgggcagcaagctttatggtggggatgtcacccggcggatgaagctgctcaagcagcaggccgagggcaagaagaagatgcgcatgttcgccaacatccgcgttcctcacgagaccttcatcaatgtgctcaagcggtag

SEQ ID NO: 1044 - protein, 679 aa, DROSOPHILA
MIVGYSVFFHHTVTRRTWCAVTIFFCRQRNVNSAMIRAISIRWLLQRPGDKRHSAWLVARSKSLLVRNLSTTNQVKGETEEPSQADLLREFAHMPVERIRNFSIIAHVDHGKSTLADRLLELTGAIARNGGQHQVLDNLQVERERGITVKAQTASIFHRHKGQLYLLNLIDTPGHVDFSNEVSRSLAACDGVVLLVDACHGVQAQTVANYHLAKQRQLAVVPVLNKIDIKHANPDQVCQDLKLLFGIDPDEVLRVSAKLGTGVSEVLERVIETVPPPQVQRDSDFRALIFDSWFDKYRGALNLIYVLNGKLEQNQDIQSLATKKVYSVKSISVLRPAECPVPDVSAGQVGLIACNMRNSKESIVGDTIHLKNQAVAAAGSYRPQQPLVFAGVFPADQSKHVALRSAIDKMVLNDSAVTVKIDSSPALGQGWRLGFLGLLHMEVFCQRLEQEHGAEPIITAPSVTYRLVLSNPKMIKQQGRDTMDISNAALFPEPHSIKEYYEPLVLGTIITPTEYVGQVISLCVERRGLQQSSVNIDDTRVLMKYVLPLSEIILDFHDRLKSLSSGYASFSYEDHGYHPSHLVRLDIHLNGKPVEELCRIVHVSKATGVARQMVLKLRELIPKQMVQIAIQACVGSKLYGGDVTRRMKLLKQQAEGKKKMRMFANIRVPHETFINVLKR

SEQ ID NO: 1045 - DNA, 3629 bp, DROSOPHILA
tgttgctacttatatgacgtacaataaacttttcccgatgatgtgatcgttcaaaataaaatattcgtaaagcaaaaacatatttgctctccttgggaatcctaatacatactcgaaagtccatgaattcatattccttttttatttagcacatataaaataaagcctaaagcctaaaacacttcttcatcaattataaaattaatctagacaaaaagtatatattttgctgtacctaagtgctgtactaaacaaacccgtaagaatgtggttatattgttttcaataagaagtttgcaacgcagtcaagaagacatttgtgactatgtgaaggacatatattcttgatagccatgtccttcagtcattactttcgtttctacacaagaactgttcgtagaagtgtttccattgcaggtacaatttaatttgaattaaagagcaaaaatacatatgtgaatctcttcgttgattatgataaaaaaatatttttgtttggtatacattagttttttgacaatatataatttcagttttaacttgatttttttatgagaaattcttcttattattagtattcttctataagattcggtaagcttttctttctgtcgtatagatctatatttatgagggtggacaatgcttaccattccgaacattgacacaatttcaaatagaagataatctaataataaacacaaatatttatattaattacttcgaaataccgtgatgcatactccatagatcagatattttttaaaattgttctacttttatgtattatggattagtaatttttaaaaaatgagcgggataaacagagtaccttggacgatccacttctggttagtgggtaatgtactttataaccattcactctaggatataaaaagtactaatcaatttcataaattcataaccgccaattcaccagtgctgcccagcattggtacgcccatagatgactacatataatcgagtcatcgacttatcgatataacagctgtcgtcattactgcaagaagaggacaaatttgcaaatttactaagaaaccaggagaaaactagcgtcgtcaagatgagcttcatgcaaccgagtcccgttaagtacgcgtgctcctgcggcatactgaacccgatcaacacgctgttcttctgccgccactgccccaagctgcgctgtggcttctgcgtgacgcatgagatcgagtcgcacttctgctccaactgcctggaaaacattccctccacagaggcgcgccacaagaagaactgttgtgcgaactgcttcgactgtccttgctgccagcacaccctttccgccagagcatctaccgttccggtggtgcgcaagtcggaggaggcgaaggaaccaaaggatggcgactccaagggcgaagccacgcccccagtcccggcgagcagcaagccctctgcggtgcccaccacaaaaaagatgtactatttgtcgtgcttgtcctgccgatggaccacgcgagatgtgggcattcccgaccaaggcgtggccacgggcacctggccggataacgagtgcttgtaccaggcgcgatttaatgctctggtcgagtacttccaggcggtggtgctgcaggagaagcaggagaaactggagttcatgcggcgcaaggcacccaagcagcacaagtttcccagtctgacggatcgcactggactaaccgtctcacttattcgccgccaaatcggctggaacgacaaggctcccaaggctaaagccgtgataacgccggcagaggccacggcggaggtggagggcctgccggagaacattttcacggaacccttgaacttgcggaatgtgacaaccatcacccagcgacatagccagccggcggaccagcccacggccgttgggagtctttatcctcagcgcaggtccctgtggattaagcggtcgcttcgttgccgccagtgcgagcacaatctaatcaaaccggagtaccatcccacatcgataaagtaccgcattcagcacttcgccagctaccatgttcctgaagtggtgatggtgcgctgcgagcagccactggtggcaggaaaaagcaacgccattttgctgaagctcacgaatccgactatatacgatatgacaattcgactgttgactgcatctcctcctgaggatccacagctgtcaacagaggccactcgtgttgcgaaagaggaacccatttcttcgtccccacttctaaaagcagtgggcatcacactgtcgcgtcaaaactcaacacgggaggtaaaacgagatgtgattgatatatccaatgccgaaatagttccgttggagagcgagttcgttctgaaccagcgcgatgactcgaaagagttcgacgaggacgtgcaactgtccaccgaggagcccaagtttattgtctggcggaagggcaacaaggtgcttttgcggctacagtttaccccagcagaggagctgtccggattagcagacgtcgttctgggcttctatatgcagtacacatacgtcaacaccgtaaacaatgcgcaagagaagagggaacccacaacccatgtgctccactccagggtgtttatcacggcgggagcaactgagcagaaagccaactaaactggaaacttattagccaacaggcgtactaatcgacttatgcgaaatatgaaatatgctttatgaaagctagagaaatatgtatttatttattaatccgttcgtgaaacagcagctagtattcaagtataataaaaggcttgttctaacactattcgttcttctttagttattagcttccagcttatctaatccggtccacttctcgctctcggcccacaggaacttggcaaccttatcgtccaaggcaccagaagccacaggctttggtttgcagtcactgaagtacaggccagagatgttcttaagctccggatccaaagcagcgtaaatcgaggtctgagctccactcttcggtgtctttaaaagcggccaaatcattggctttaaaaagaacctaggaaggttaacaggtattactgggaaggtcctaattcacttattcatcacttacttcacaaggtttgtctggaagaaggcccagttccgcgccagctcagtgtccaccacaccagggtgaagggcatttactgtgactccgctgccctccaaacgcttggccaattcccgggtgaacaggacgttggccaacttgctctggctgtaggctaggccctcatcatacgacttctcgctgttgaggtcggctacgttaatggagccacgcgcatgtgccagactggacacaacgacaatgcgactgggagccgagttctgaaattttgtaagaccattatctgacgcacttgactattatatagcacacttgccttcagtacgtcgagcagcaagttagtcaacaaaaagtgaccaatatgatttactcccagctgcagttcgtagccatccttggttagggtcttgggacaacgcatcacgccggcattgttgatcaggacgtgaagcttgggttgctccttcttgaagctgattgataggataggtttttaaatcttacagagacaagaaaattctctggaggtaagcttacccatcaaca

SEQ ID NO: 1046 - DNA, 1629 bp, DROSOPHILA
atataacagctgtcgtcattactgcaagaagaggacaaatttgcaaatttactaagaaaccaggagaaaactagcgtcgtcaagatgagcttcatgcaaccgagtcccgttaagtacgcgtgctcctgcggcatactgaacccgatcaacacgctgttcttctgccgccactgccccaagctgcgctgtggcttctgcgtgacgcatgagatcgagtcgcacttctgctccaactgcctggaaaacattccctccacagaggcgcgccacaagaagaactgttgtgcgaactgcttcgactgtccttgctgccagcacaccctttccgccagagcatctaccgttccggtggtgcgcaagtcggaggaggcgaaggaaccaaaggatggcgactccaagggcgaagccacgcccccagtcccggcgagcagcaagccctctgcggtgcccaccacaaaaaagatgtactatttgtcgtgcttgtcctgccgatggaccacgcgagatgtgggcattcccgaccaaggcgtggccacgggcacctggccggataacgagtgcttgtaccaggcgcgatttaatgctctggtcgagtacttccaggcggtggtgctgcaggagaagcaggagaaactggagttcatgcggcgcaaggcacccaagcagcacaagtttcccagtctgacggatcgcactggactaaccgtctcacttattcgccgccaaatcggctggaacgacaaggctcccaaggctaaagccgtgataacgccggcagaggccacggcggaggtggagggcctgccggagaacattttcacggaacccttgaacttgcggaatgtgacaaccatcacccagcgacatagccagccggcggaccagcccacggccgttgggagtctttatcctcagcgcaggtccctgtggattaagcggtcgcttcgttgccgccagtgcgagcacaatctaatcaaaccggagtaccatcccacatcgataaagtaccgcattcagcacttcgccagctaccatgttcctgaagtggtgatggtgcgctgcgagcagccactggtggcaggaaaaagcaacgccattttgctgaagctcacgaatccgactatatacgatatgacaattcgactgttgactgcatctcctcctgaggatccacagctgtcaacagaggccactcgtgttgcgaaagaggaacccatttcttcgtccccacttctaaaagcagtgggcatcacactgtcgcgtcaaaactcaacacgggaggtaaaacgagatgtgattgatatatccaatgccgaaatagttccgttggagagcgagttcgttctgaaccagcgcgatgactcgaaagagttcgacgaggacgtgcaactgtccaccgaggagcccaagtttattgtctggcggaagggcaacaaggtgcttttgcggctacagtttaccccagcagaggagctgtccggattagcagacgtcgttctgggcttctatatgcagtacacatacgtcaacaccgtaaacaatgcgcaagagaagagggaacccacaacccatgtgctccactccagggtgtttatcacggcgggagcaactgagcagaaagccaactaa

SEQ ID NO: 1047 - protein, 514 aa, DROSOPHILA
MSFMQPSPVKYACSCGILNPINTLFFCRHCPKLRCGFCVTHEIESHFCSNCLENIPSTEARHKKNCCANCFDCPCCQHTLSARASTVPVVRKSEEAKEPKDGDSKGEATPPVPASSKPSAVPTTKKMYYLSCLSCRWTTRDVGIPDQGVATGTWPDNECLYQARFNALVEYFQAVVLQEKQEKLEFMRRKAPKQHKFPSLTDRTGLTVSLIRRQIGWNDKAPKAKAVITPAEATAEVEGLPENIFTEPLNLRNVTTITQRHSQPADQPTAVGSLYPQRRSLWIKRSLRCRQCEHNLIKPEYHPTSIKYRIQHFASYHVPEVVMVRCEQPLVAGKSNAILLKLTNPTIYDMTIRLLTASPPEDPQLSTEATRVAKEEPISSSPLLKAVGITLSRQNSTREVKRDVIDISNAEIVPLESEFVLNQRDDSKEFDEDVQLSTEEPKFIVWRKGNKVLLRLQFTPAEELSGLADVVLGFYMQYTYVNTVNNAQEKREPTTHVLHSRVFITAGATEQKAN

SEQ ID NO: 1048 - DNA, 10057 bp, DROSOPHILA; identical to SEQ ID NO: 1003

SEQ ID NO: 1049 - DNA, 2550 bp, DROSOPHILA
tcggaccgagagttaaatgttttccgattttcaaacagcgaacttgtgcgtgcgttaaaattaaactcgttcagcatttaaatcgtgtgagatctttgccttttaacgactattgccatgtcgaccagcccgaaaccggttaagaaggtgccgattcacttgcagagtgcccagaatcgcgtctacatcaagaatggcgagatcgtcaaccatgacaagtccttcaaagcggacgtgtacatcgaagatggaattatcaagtttgtgggtccctcctcggaaataacgatacctggcggagtgcgcaccatcgacgccagcggactgatgatcattcccggaggcatcgatccccacacccacatgcagttgcctttcggcggagccgtggccgtcgacgatttctaccatggaaccaaggccgccgtggcaggtggcaccaccatgatcatcgacttcgttctgcccaacaaacatgagtcgatgatcgaggcctacgacaagtggcgcagctgggccgatcctaaggtatgctgcgactacggattgcatgtgggcatcacctggtggtcgaagtcggtgtctgaggagatcggcattctgtgcaaagagcttggagtgaactccttcaaaacattcatggcctacaaaggactttatcagttgaatgactcagaccttctggatgtgttcgagcgtatcaggcacctaaatggggttgctatggtccacgcggagaatggcgacatcattgcaaagaacacgcagcgccttttggccgagggcatcaatggtccggagggtcacgagctgtcgcggcccgaggaggtcgaggccgaggcggtgcaccgcgcctgcgtcctggcccaccagatgaagacgccgctcttcgtgtccggcctcaccagcaaatcctccgccgagctcgtgggtcgcgcccgtcgcagtggctactgcgtgttcggggagacgctggccagctcactgggccgctccatgagcgccgtgcccaagggcgaccgcatctacgccatcaccagtcccccgatccgcgaatccgccgagacacccaggcagctgatgaagtccctggcttatgacgatttgcagctgactggcagcgacaattgcaccttcaacaaggagcacaaggcgctcggaaagggtgactttaccaagattcccaatggcgtcaacggagtcgaggatcgcatgtcgctggtctgggagaagggcgtgcacgctgggcttctggatccctgccgctttgtggccgtgaccagtacaaatgcagccaagatattcaacatctacccccagaagggacgcattgccgtcggctcggatgcggacattgtgatctggaatccgaatgccacccgtaccatttctaaggatacccaccaccatgcctgtgacttcaacatattcgagggcatgactgtgcacggcgtctgcgaattcgtcctggtgcgcggacggatctgcgccgagcgcgggaatgtgcgggtagcggagggctttggacgtttcattcccacaccagttcgtccgccgttcgtatacgacatcatcgagggcaaggtgcagtcgcagccggaggagcagcacgaggagaagcagaacggcagcatggccaagcggttcgctgagctggacatacagattccggtgcaggagcccatcagcgccatgctggctggcaacctagccatgccggcggagggatctctgtgcagcacgccctcggttcgtggtcgcgtcgatggaaaacgcgacttgcaggagtcttccttctccataagtgaggagctcgacaggtctggtgttcgagcgtgcatcaaagtgaagaacccacctggcggaaagtcttctggattctggtagatcacagacccgatgtcgcatcgcaagtcgtgtggatgcggaatcgcacaatctccgacgacagtgtaagccaaagtctgcgctcattcgacaactaaactggcatttaatatagatccctgaaacaaaatcgtaatctaatcaaatttcaaataagtacataagagcataaccacaaaccaattaagaaggtatcatagactctgcttcgtcattttgtatttagaaccgattgcctcttgttgatacaatttttgttaagatcatcaattgaatgaaatgcatcaaagcatttgaagtcgaaaatcaaacattatggctgcttaggtatttttcgctgaaatcgtttattttaatactttgtttatttacaaggagatttagcacaatttaactctgttaaattcatgacactattgcaattgtttattgattacccgattcgaagtagagcacatcgatcatgccacgtgagacaaagagtgcttgggagcaaattcggcatttaatctgaggatgtctaaaagtaatacttcaatcgattttttgataagaaaaaagtataaatgtggaaaactatttattataaatatacatactttatatacatataatatttaacaacaaaagccgaacacaaagatcaaactaataaactttacc

SEQ ID NO: 1050 - protein, 589 aa, DROSOPHILA
MSTSPKPVKKVPIHLQSAQNRVYIKNGEIVNHDKSFKADVYIEDGIIKFVGPSSEITIPGGVRTIDASGLMIIPGGIDPHTHMQLPFGGAVAVDDFYHGTKAAVAGGTTMIIDFVLPNKHESMIEAYDKWRSWADPKVCCDYGLHVGITWWSKSVSEEIGILCKELGVNSFKTFMAYKGLYQLNDSDLLDVFERIRHLNGVAMVHAENGDIIAKNTQRLLAEGINGPEGHELSRPEEVEAEAVHRACVLAHQMKTPLFVSGLTSKSSAELVGRARRSGYCVFGETLASSLGRSMSAVPKGDRIYAITSPPIRESAETPRQLMKSLAYDDLQLTGSDNCTFNKEHKALGKGDFTKIPNGVNGVEDRMSLVWEKGVHAGLLDPCRFVAVTSTNAAKIFNIYPQKGRIAVGSDADIVIWNPNATRTISKDTHHHACDFNIFEGMTVHGVCEFVLVRGRICAERGNVRVAEGFGRFIPTPVRPPFVYDIIEGKVQSQPEEQHEEKQNGSMAKRFAELDIQIPVQEPISAMLAGNLAMPAEGSLCSTPSVRGRVDGKRDLQESSFSISEELDRSGVRACIKVKNPPGGKSSGFW

SEQ ID NO: 1051 - DNA, 2453 bp, DROSOPHILA
cataaggccggaagtctgtcaatttgcgtataatttgtttacgagcttcacacacacataagcacgcacgcacacagctgcaaaaacgcctgcagaacggatacggaagctggaaatcagagcacggaaacgttttgatttcattcagctatctcggtctccctgaatcttaaggaacagagatggtgaaaataataaaatattttaacattggagtaaagtgcaatttatataaaataaatttacatacataaataatacacaaatattttaactgctgggcaacttaatttgtgcactacattgttctgcaatacaatattctcgttgttgaagtacattttgcatctctaatgcaatttactttactactgatattgttttcaaataattgcaaataattgctaccattttgacctcagctgtacaaatgtgagcttatgacatactcgtttttagacacttgagtgcgtcaggagttcaacgggtgtgattctatgtggcaaagtgtattaaaaatgaaaacatcaactttaaatcaaaccaaattcagtcaaaactaaaatgctttaataaaagtgtggaggcatttgtccatcagtacaaactaattcgaacattttcaagagtttccagacgccgcattgtttacataaagtgaatcaattttctgtgaatttggaaaggcaaacaaaattggcttaaattctataagttgttggataagaaaggttcaattcacagggaaaacagtttcacaaattgtaaaaggaaaatgtaatttccaaaaaaagaaaaagggcacatgggtaatttataaaactccgtactggaccaatgcttttctcttaatctaaaacattataaatatttctgatcatttcgatgatttcacaaagcaatcgagtcattttcactttatagttcttattatgttcaggttatgatttcggagatctctacacaatcgcgagcaaaattccctttagacaagcagaaaatggcacggtacttagcgcaaatcatcattttgggtgcccagctggttggccgggcgctggtaaagacgatgcgccaggagctgcaggccttcgaggatgcggcacgcctacaggaaacgctaaaggccaacgatcccaacagcggcaggagtgcggtggccaagacaatgaccctggcggaggcccagcagattctcgatgtgagtgaccttaccaaccgccaggcgatagatacgcactaccagcacttgtttcgtgtgaacgacaaatccaccggcggtagcttctacattcagtcgaaagtctttcgggccaaggagcgaatcgatcaggaactggaacggacggaactgttggtcaagaccgacgactcccattcaatcctaccaacgccaccggaatcctcgcaattccaatgcgagaacaaagagccgggtcagaagagccgatgatccttcgcagctgtattcacatggattgccttttagtagcgtggcataaaatcgtcttcgaactttttgtacatgtatatatttaaatcgtcaattaaatagtttgatatgcaaaaatttcgatgcgaaataaatctggaattatctctaagaaagaattcccacagtacaaactctaacctattcccgtgttactcctgtgtatataagaaaatattacagataattttaatgagccttgaaattcgaaaatgttgcccataattttaacatcaatttcagctccgatttggatttgcaccccaagcttcaaaaatgttcagttctcctttcgttttggccttgacggagccacatctgcttaatatcaaatacaaattttcagtttttgtaacgctttagcatattgaatatattgatttatacacttttttctatttactactatttttagaatacgcacttaaattaagctacaccactactattaatgttaagtaaataaacaaattggctcgcattgtggccgggctttactttaactacattaaaatgctaaattttgaaccatttgcctacgcctatatgaaaatgaaaagagcaacaatttacattcaaatggcgtttaatatctgttcgggacatgtcattgatctttataatgaggcacgttttaccaaagcaaaagttcgcccattcacacacacacacacacacacacgtacatacatgtgcatattgcattatggcaattttcaatttgtgtatgcatttaaaatgcaattttccacggcaaaacgagaggcgaggctcaataaaattcaagtgatttatttatacgcattgttgggcgacggaaaatttgtggaacgaagggtgtgtggagtgatggggcgatgtgctgtgctggcgtggcgaactcttaataaaaacaattaagccaaattggccacaattgtaggcaaaaatgaaataaaaacccaaataaattgaaacggaa

SEQ ID NO: 1052 - DNA, 453 bp, DROSOPHILA
atggcacggtacttagcgcaaatcatcattttgggtgcccagctggttggccgggcgctggtaaagacgatgcgccaggagctgcaggccttcgaggatgcggcacgcctacaggaaacgctaaaggccaacgatcccaacagcggcaggagtgcggtggccaagacaatgaccctggcggaggcccagcagattctcgatgtgagtgaccttaccaaccgccaggcgatagatacgcactaccagcacttgtttcgtgtgaacgacaaatccaccggcggtagcttctacattcagtcgaaagtctttcgggccaaggagcgaatcgatcaggaactggaacggacggaactgttggtcaagaccgacgactcccattcaatcctaccaacgccaccggaatcctcgcaattccaatgcgagaacaaagagccgggtcagaagagccgatga

SEQ ID NO: 1053 - protein, 150 aa, DROSOPHILA
MARYLAQIIILGAQLVGRALVKTMRQELQAFEDAARLQETLKANDPNSGRSAVAKTMTLAEAQQILDVSDLTNRQAIDTHYQHLFRVNDKSTGGSFYIQSKVFRAKERIDQELERTELLVKTDDSHSILPTPPESSQFQCENKEPGQKSR

SEQ ID NO: 1054 - DNA, 3566 bp, DROSOPHILA
gtcagcctcagtgtatcgaccgccgcctgcaggctgcgccccagtcccagttccccaaccgcgtaccagggcacgcgttgggcataaccgatgggccagagtcgcgggagccacttgtttctccggttcctcggctcgtcctcgcctggctgctgccgctgccgctgctgtccaaggattgccgctgctgtgtccgggcaaattgtgctcctcgagatgatccggatattgagcttggctgcgccgtcgacgtggatcgcctagctatggtcacgttgctgggccagaccttaatggctctggctagcgatgttctcctagttcttctgcgcaactaatccaattaatggccacttgcggagtcctctttggtttgcagctttattcgcgcctcgccttgttgctctgttcgctgtccgccgacctctgacctctgctgctttgtgctgtgtgtcgcgcttgggtggcaattctctcgaggattcgcggttattcagcaaatttctgtgccaaaacaaaaacaaaaaacttttggcttgcttggtttaaatgacaaaaacaatactgctatcgataacgagaaaatctatcgaaaaatagaccgtgaatacagaagtatattttcgaaaataccaaaacacaccaagcgaaattgctataagaacaaaggaaaggtatgtatatatatgcaggataaatattaacaatgcctatattttagcttgtaagcagctgatttaaatttttgtttttagacattataataatcaacaatattcagtaggcggaatacaatcaaacaaaaatatgcaaaaatattcactagcacaaataaatcatatctgcatagaatatgcagttcttcaataattattcaatcatatttatatggcgtagaaatagtaccttgcatgacggctccacgtgtcgtgcagtgtccgccatgcgctgacgtgcagagggccccaaattgaacggcgtgcaacagctgaattcgattcccgcgattccaatccatgttgcgactgccgacgattttaaggaagtccttcagcatgaagacgcgccagaggctggactaccgcaacaagctcatactggcgccaatggtgcgcgtgggcacgctgcccatgcgactgttggccctggaaatgggtgcggacatcgtttacaccgaggagctggtggacatcaagctgatcaagagcatacgcaggccgaaccgtaagtggacagagctccagccaactcagcatacttcatctatttgcattataccttttagccgctctgggcacggtggactttgtggatccgtcggatggcacgattgtgttccgcacctgcgcccaggaaacctcacggctggtactacaaatgggcaccagcgacgctggacgggctctggccgtgggcaagctgctgcagcgcgacatttccggtctggacataaacatgggctgtcccaaggaattctccatcaagggcggcatgggcgccgccctgctcgctgatcccgacaaggcggcacacatattgcgcactctgtgctccggcttggacattccagtcacctgcaaaatacgcatactgccggacgtggagggtacaatcgatctggtgcagaaactggccgccacgggcatcgctgccattggcattcatgcgaggacgcgcgacgagcgtccgcagcatcctgcccatcccgaggtactgcgtgccgttgcccaggcggttgacataccgattatcgccaacggtggttcgaaaaacatgcactgctacgatgatctgcgcaaatttcaaatggaatgcggcgccgatagcgtgatggtcgcacgtgcggcacagatcaatgttagcatcttcaggccggagggcctgctgcccatggacgagctaatcgagaagtatctgcgcctgtgcgtcgactacgacaatgcgccgcataacgccaagtactgtgtgcagagcatactcagggagctgcaggagacgccgcgtggcaagcgtttccttcagtgccagacgctgcagcagatctgcgagatctgggagctgggcgactattgccgccgcaagcagcgggagctaaagacgatgggcaactcgggacgggcggaggtggagccaccggaggcgctggccaagcgacagaagctggaggatgcggccattgccataacggacgagtacgacggcatcatttgccgacacatgccattcctgcgctccacctatcccagtggtaagtgtttcgatcaatctcttgccatgatagccatcatccccattcggtatttttcatgccacagataatcatctgccgaaaacgcaactatatgtgcatgctgtcaaaactggcaaatccccgccagcgtacgaaacgcagcagtgtgacaaattgtttcgctccatctgcacgtacgatggccagcgctttagtagctccttctgggagaagaacaagaagcaggcagagcagggcgccgctctggtggccctgctccatcttggccagctggaggcggaggttctgcgcgacaatggcagcctgctcaactgagcagcaaagttcctcctgttttatgtaaatgtcatccattttggctatgttttggacaccattatttagttgttttttttttttttgattattgcaatggctgttgcaactgccttaggtgctgggagcagtatctggactacctccattgggttaacaaagtttgcatctgaataaacaaaactgcaagtgtgcagtgctttaaatatatgtatgtatttagataaataaattatatgagctgttttaagtttataaggagtacagctggttggagtgctcctagtactaagtaattcgtagttcagctaatccaagaaaacccaagttcacacagtttttcggtacataactcacgattaattttattctttctttttttattacgctctgattaatttcctaatgtcgggttcacgcagggacgacgctggtgttggccatgaccatggggataaaagtggttatggttgtggttttggttatgggaattgatcggcggcggcatcatgacatgatcattccgatagccagagcttgcgataaagtttagtaggtactccttggtgactggatgctttatgctgtccacaacggctgaaattaagatgagttgagaatgagtatagggatcctcctactgctggtgaagattactactcacagcgggctgtattataactgttgggattctttttgtccgttcgctcgcgcataaagtcccagttgccaaactgattcatggtgcactcaacgattctgttgtccaattctctggtctccttcgttaacctttgcatccgtccatagggtgcatcgtgtccgccgacatagaggaagcccacctttttcgtcagcaagctgccagaggcggagaatggcatggtatgaattgagcccgttgaacggatagatcactacaactcacccctcgccgcgctctgttatgatcttcagccgaaagtccaccgagttgagctcatgtggcttccatttgaag

SEQ ID NO: 1055 - DNA, 1438 bp, DROSOPHILA
cccgcgattccaatccatgttgcgactgccgacgattttaaggaagtccttcagcatgaagacgcgccagaggctggactaccgcaacaagctcatactggcgccaatggtgcgcgtgggcacgctgcccatgcgactgttggccctggaaatgggtgcggacatcgtttacaccgaggagctggtggacatcaagctgatcaagagcatacgcaggccgaaccccgctctgggcacggtggactttgtggatccgtcggatggcacgattgtgttccgcacctgcgcccaggaaacctcacggctggtactacaaatgggcaccagcgacgctggacgggctctggccgtgggcaagctgctgcagcgcgacatttccggtctggacataaacatgggctgtcccaaggaattctccatcaagggcggcatgggcgccgccctgctcgctgatcccgacaaggcggcacacatattgcgcactctgtgctccggcttggacattccagtcacctgcaaaatacgcatactgccggacgtggagggtacaatcgatctggtgcagaaactggccgccacgggcatcgctgccattggcattcatgcgaggacgcgcgacgagcgtccgcagcatcctgcccatcccgaggtactgcgtgccgttgcccaggcggttgacataccgattatcgccaacggtggttcgaaaaacatgcactgctacgatgatctgcgcaaatttcaaatggaatgcggcgccgatagcgtgatggtcgcacgtgcggcacagatcaatgttagcatcttcaggccggagggcctgctgcccatggacgagctaatcgagaagtatctgcgcctgtgcgtcgactacgacaatgcgccgcataacgccaagtactgtgtgcagagcatactcagggagctgcaggagacgccgcgtggcaagcgtttccttcagtgccagacgctgcagcagatctgcgagatctgggagctgggcgactattgccgccgcaagcagcgggagctaaagacgatgggcaactcgggacgggcggaggtggagccaccggaggcgctggccaagcgacagaagctggaggatgcggccattgccataacggacgagtacgacggcatcatttgccgacacatgccattcctgcgctccacctatcccagtgataatcatctgccgaaaacgcaactatatgtgcatgctgtcaaaactggcaaatccccgccagcgtacgaaacgcagcagtgtgacaaattgtttcgctccatctgcacgtacgatggccagcgctttagtagctccttctgggagaagaacaagaagcaggcagagcagggcgccgctctggtggccctgctccatcttggccagctggaggcggaggttctgcgcgacaatggcagcctgctcaactga

SEQ ID NO: 1056 - protein, 460 aa, DROSOPHILA
MKTRQRLDYRNKLILAPMVRVGTLPMRLLALEMGADIVYTEELVDIKLIKSIRRPNPALGTVDFVDPSDGTIVFRTCAQETSRLVLQMGTSDAGRALAVGKLLQRDISGLDINMGCPKEFSIKGGMGAALLADPDKAAHILRTLCSGLDIPVTCKIRILPDVEGTIDLVQKLAATGIAAIGIHARTRDERPQHPAHPEVLRAVAQAVDIPIIANGGSKNMHCYDDLRKFQMECGADSVMVARAAQINVSIFRPEGLLPMDELIEKYLRLCVDYDNAPHNAKYCVQSILRELQETPRGKRFLQCQTLQQICEIWELGDYCRRKQRELKTMGNSGRAEVEPPEALAKRQKLEDAAIAITDEYDGIICRHMPFLRSTYPSDNHLPKTQLYVHAVKTGKSPPAYETQQCDKLFRSICTYDGQRFSSSFWEKNKKQAEQGAALVALLHLGQLEAEVLRDNGSLLN

SEQ ID NO: 1057 - DNA, 7551 bp, DROSOPHILA
ttaatattataatcgcattcaaacgcatttcgtttcgtttgttatgcgcccacacgcagcacttatgtatagcatttattatgtaggacttatagcgaaaacaaaaaaaatttcctatgaatatacaagaaattaatcagttgttcttcagataattgataactatcctagtgggcttttctctggccccacctcctctccacggatttttacttgagaattgtagtttgcttggccagaactgaattggagttcagcttcaaaaaaaaatttaaaataagataggaagctgcgagatccgatccgcctgggcaccttgctcgtatcgtcctcttcctgtcctggtgattagttctacatgtgtgttctcttactttcaccacaattgattgcaattgcgatgattgatggtgactcatccaggctatccacagatttcggttatatacgtaaaacgctgtcgcatacgtattttctttaagtctaaacttatgtttaccgtgtggtaagctcccttgcttaccatctagatgttattgaggtttctgggatacttcgggatcgaaatcatctattcgctatctctgcttgtttgtttctggtgtgctcgcttaacttacaaagtagtttaaacgtaaatctgcaagaaaatgtgcgcagttttgaaaactattcaacgattcaacaacgactcacttaccttatattttaaatatttggctcttgattttgttgttgctgcggtgttttgtttgttgtttgttgttgttgcttcgctgtgggtgcttttcgcttcggtgtccaggctttctcgagtttagtttaaatgcggcaagcacacgaaaataaatgtgatgaaaaatgacttgaacgaataaccaacaaattcgaaaagaagctcgtggctatttgtgagtgtggcgtgtttagtgttgtagtgtttcatcatcgatttgaaccattttagttgaaatttttttttggcacgggcagcgctagcttagaagggcatatccaattcgttgttctcctcctcctcgatcaagtcatcaacatcgaattcgctgggcgagaagctggtctgttgctgctgcggttgcagctgttgctgctgctgctgcatttggatacgttgcggctgctgcacgattatgctgttgcgtgtgcatgttgtcaccttggcgcctaacatacgtgcattggccaacgcggccgtcttgagaggattacgcagatgtgtcgcctgggaggctaacgaagatgtggcggctgatgctgtggacgatgcggcgttaattgtgcccgtggtaccgggatcattgtaacgtggacgcttattctgcagcttggttgcccagcattcggtggcccggcgacgggcattggcacagatattatccccggatgaggacgatgaggaggaggtggagggagctgctgccgccgatgaggtggaggccggattggccttctccccattaaacattatatggcggcgctcttcctgggtttgcttcatcatctggtgatagttgaccatctgtttcagacgaggcatactatcaactgtgctggacaagatggtcgcgggtgctgatgtttggtcattcgacgatgatttagagtgcgccgctgttgtattaacaaagatattatcaagggaagcagtcttgttatcggccaagacatttttctccagttcgtggggatcaccgccggcttgcagacgctgcttttgacgcagatgctgcagctcctccgccgaacgttgcttgcggaaatcaaagaccagcgggtatatgtgctggatagccgattcaacgtggtttacgctagccgctaaataaatatgacgaaaattagaattagaattagttttagtacagtttgaggataacaacagtactcaccggtgactgttacgctgccggtggagaagatcttcagggtggcctttggatcgggatcgcgcatcttgtaagtcactccaggatgcagctcgggctcgtagctggcgttctcgcgatggcgctccgaaaagttgacgatcttgatggcccacggcatgctgcaggtgcccagtacgttgacaatgcgaaagttgaggaaacgagtgggaaatcccagcttgccaaggcatctggcatagcggcgtgcagcgaccttggcctaaaaagatcatcaactattgagataacaaaaatgtataatttaatgctaaatcataccattgactcggaagtggcaccagtgcaggtaatcctccccgacgaccaaatcgaggcagtggtgtatggatggcggagcttcattgtcaccattccgttctcgcgacggtactccacatttgatccctgcagcgcaatttcgcgcagcttcaggtgacagccgacgctaaacgagcagaccacattgtttatcacaatgtccagctcgtgctcattatcagcaattggctggtgaaggtcaatgggtttggcattattgctgctctcttcttcgtcttcagcgacttcctttttctcctcgtcatcgtcatcaatcacagttatcgactgcatgacctcctcctccaatagatccattttggctgtgatcagaccattgccattgctggcgacggtcggcagattagccttattttcgctgctagtaaggaacatatttttactgccggttgccagaacaatggtatccccgttggcaagtttcctttgcaaactgggtccgccggccgtttgcattttgctgaattgcgaaaaatagcgaacggtaccggctgttgaggctgtgccagatgaaccaccgacgacttgtccgctcattcttccggtggacgccactcccgccatttggcgattggtcatgaatgtggaggagggcgttaggtatacacgtggggcattggccagcaccgccgaggatacgacgccgccggaggtcactacaccaactccggaaccgctgctggccgctttaaggccgccgttcaaattggccaccggtatgctgaccatatcgttttgcatcagcttgtgctttcgattccccttcaacgagcgctgactggccttctccagctgcttaatcttgatcagataatgctcgcgctgcaaacgcaactgacgtttacagtcctccctatattccttcaagaatcgttcgtattccaagcgctgtttctcctttttctggcgcaatttacgttcgcgttttacgcgattttgctgacgacgatgctgctccttctgttggcgcaatttttctaggacaaactgtttctgttgctcaaagaggtggcgctttcgctctcgctgctcctccagttctttcttctgttgcaactgtcgtagctgtaggaagactttatcctgttgcaactgtcgctcctgtggcaagtgtttctcctgttgcaattgtttctcctgttgcaagagtttctcctgttgcaagagtttctcctgttgcaagagtttctgctgttgcaagagtttctcctgttgcaagagtttctgctgttgcaagagtttctgctgttgcaaccgtttctcctgttgcaaccgtttctcctgttgcaaccgtttctcctgttgcaaccgtttctcctgttgcaaccgtttctcctgttgcaagagtttctcctgttgcaaaagtttctcctgttgcaaccgtttctcctgttgctcttgtggaaagaatttctgcaaaagtagtttcagatactcatatagcaacagttgctcctttgaaaagaatttctcctggtgccagaataccaccagttgcaacttttgatatttttttaaatgtttctgttgctgcttcagttgcaggtcctgttctggttggccttcctcatcaatactgctgtatacgtcttccagtttgtaagctccaaataccttatagagctgtatgctaaggtccaaactagatttatcatcccctaaaggatttgttacgaatttcaagaacttcctttcctttgagaagataaatggtttataatcctcctcagaatcacaaatgtgatcgtcgtaataagaagctggatcctgatcgtcgtaataaggagctggatcctgatcgttgtaataaggatgtggatcttgatcggttccgaattcaggagctggatcttgatcgactccgccttcaggagctagatcttgatcggattcgccttcaggagctggatcttgatcgacttcgccttcaggagctggatcttgatcgactccgccttcaggagctggatcttgatcgactccgccttcaggagctggatcttgatcggcttcgccttcaggagctggatcttgatcggtttcgccttcaggagctggatcctgggcagattcctcagaacttgaagatgattcgaaatcggaatgggaatcggaatcggaatctaaatctaaatttgaatctgaatctgaatttgaatctgtatcgaaacttgaactatctgagtcttcttcgtcagagcattcgctttccgtatcttcacgtttttcctcctcagatttgtcttcctcactctgcaagtttggtttaaatttcttagagtctgtacaatcaaaaggccatttacgctttaaggatctgcgacttcccagagacgataaatgtgaacgtgggtctcctttgtcaccgtccaataatggtttcttcgaatacgaagaattcccagtgcctaacgattttcgcttattctgttgcttgtctggcgaatgatcgcgtctatcagaagaagtatgttcagccggcgactgttgttcgacgtcgtcgctttcttccttctgttcgtctgtaatttcctctgacgactcctgttggctttggtcgcttttttcctcgcgttcggtagaagtttctcgccggcgcgatagccacccagtaactggatcgattaagtagtccgagtccccagaagacgattcctcatctgaagcttgtcgcgactcgctttcagagtcttgtctctccggcgaagatgactctaaagatgaatccgatttttgatttggcctattgattggctgattgaatggctgattgattgggttatggcgacgatcgtcgctatcaacttctgattctcctaaacgagggagatgtacctgacaagcgtaggatcgtaaacgggtatatatgtttctttttctagcggcctcttcctcatcagattcaggatattggtactctcgattcaaggcctgatactcgtgatttgagtcctggtattcgtgattccaagcctggtactcgtgatttgagtcttggttgacgtgattcaaatcctggtactcgtcacttgagtcctgatcgccgtgattcaactcctggtactcgtcatttgagtcctggttgctgtgattcaactcctggtactcgtcatttgagtcctggttgccgtgatttgattcctggtactcgtcatttgagtcctggttgccgtgattcaactcctggtactcgtcatttgagtcctgatcgccgtgattcaactcctggtactcggtattcaagtgctggtactcttggtttgaaacctggtactcgttattagactcctggtactcgcgattaacttgattcaagtcctggttaccgatattcaagtcctggtacccgggattcaagtcagattgtgcatattcccttgttcttcctcttgatgaagttgaatattcttggtgcagctgttcgtcctcgctattagaagaacttaagcgatctgcgtatgatgaaaagaatttgtttaaaaaacatttttataattctcacattattttaccactagaattgcaggcatccccgtacgactcgttaccgctgctgttggcttcgttcttctcaacttcttcgttcgaaaactggtcagcttcgttgcgacttgaagtatctttaccaacgtcagagccttgctcacgatttccgatggtgcttccgcttgatgaagttgaatattcttggttaagctgttcgtcctcgctatgagaggaacttaaacgatctgcgtatgttgaaaagaatttgtgtaaaaaacatttatataaattaacaattcattttacctctagaattgcgagcatccccgcccgactcgttacagctgctgttggcttcgttcttctcaacttcttcgctcgaaaactggtcagcttcgttgggatttagagtatctttaccaatgtcaggtccttgctcacaatcaccgatggctcttggattgggggattgattcggcgattggttctccttatccgaatcttcgtccggatgttcaaccggatgttccggaaacaaatcctcgttccttaagtctctagctacttggtattcttcaagtattcgagtcggggaaccatccccctttttgacgctacagttgttttagggagacgaagttcaattatatttcattgggtatttatgcttactgtttgtgtgactgtggcggtgtggatatgcggctctttatatctactgtatatcgtgtaatagttctttttttttctctgtatgcctacttacgcactgcccatcgttaaaaaaatatttcttgttatctttttgggtttcttgataggactcttgctctgcgttttcttgctagcttcttaattatatttaattgtatataaggctaaaggtgattcttccttggtgttgtattacattctttccattgtttcgttcatgtggatgtgtatgtatgtgtttgtatgtgagtatgtttgcacttaaggccaaaaaatacttttttatgtgtgattttgtattagaattaatgttttcttagtgttctagttgttgggtttgctggttctctaattctatctactatgtttatgattatgtctagtcttccgttcttttctcctggttaaatttgcttgtagtttttagttgttccgtttagcagtctgcaagtagaagagaatataataaaagttaataatcgtaaagttgacatttgggaaaatgaaaacatgcaaattgccttgataaatacaaatgcatttattaattggtttgatagcgcacctaataaacacgatgacactatttaatctaatttccacttttatatatcaacccgacccccgacaaccggcacaagtgaagggtctaggtctaaccctctgggagttttcgtggaatattagtagttcctgtcatgttaatagagatggaactctgagccggcccttatagagtggcatgattcacgaagactcacgaagactcacgctttgcctacccaaaaaaaaaaaaataatacgtcttatacatttttaaaatgtaatttttaaaacaaaaaaaatgagaagagatcatgacctacttatagtagttttacaaactaaaatattgtattttacagacgacttcactgttaacgggagctgcgtttaacagagagcgctgttcgttaacagtcctttttattaggatcgcctaagtgcgctgaccttaacatagattttcgcatgcctgctaagagtatgcacgaagaaggggcggaggaaaacgaaaaggcga

SEQ ID NO: 1058 - DNA, 5148 bp, DROSOPHILA
atgggcagtgccgtcaaaaagggggatggttccccgactcgaatacttgaagaataccaagtagctagagacttaaggaacgaggatttgtttccggaacatccggttgaacatccggacgaagattcggataaggagaaccaatcgccgaatcaatcccccaatccaagagccatcggtgattgtgagcaaggacctgacattggtaaagatactctaaatcccaacgaagctgaccagttttcgagcgaagaagttgagaagaacgaagccaacagcagctgtaacgagtcgggcggggatgctcgcaattctagagatcgtttaagttcctctcatagcgaggacgaacagcttaaccaagaatattcaacttcatcaagcggaagcaccatcggaaatcgtgagcaaggctctgacgttggtaaagatacttcaagtcgcaacgaagctgaccagttttcgaacgaagaagttgagaagaacgaagccaacagcagcggtaacgagtcgtacggggatgcctgcaattctagtgatcgcttaagttcttctaatagcgaggacgaacagctgcaccaagaatattcaacttcatcaagaggaagaacaagggaatatgcacaatctgacttgaatcccgggtaccaggacttgaatatcggtaaccaggacttgaatcaagttaatcgcgagtaccaggagtctaataacgagtaccaggtttcaaaccaagagtaccagcacttgaataccgagtaccaggagttgaatcacggcgatcaggactcaaatgacgagtaccaggagttgaatcacggcaaccaggactcaaatgacgagtaccaggaatcaaatcacggcaaccaggactcaaatgacgagtaccaggagttgaatcacagcaaccaggactcaaatgacgagtaccaggagttgaatcacggcgatcaggactcaagtgacgagtaccaggatttgaatcacgtcaaccaagactcaaatcacgagtaccaggcttggaatcacgaataccaggactcaaatcacgagtatcaggccttgaatcgagagtaccaatatcctgaatctgatgaggaagaggccgctagaaaaagaaacatatatacccgtttacgatcctacgcttgtcaggtacatctccctcgtttaggagaatcagaagttgatagcgacgatcgtcgccataacccaatcaatcagccattcaatcagccaatcaataggccaaatcaaaaatcggattcatctttagagtcatcttcgccggagagacaagactctgaaagcgagtcgcgacaagcttcagatgaggaatcgtcttctggggactcggactacttaatcgatccagttactgggtggctatcgcgccggcgagaaacttctaccgaacgcgaggaaaaaagcgaccaaagccaacaggagtcgtcagaggaaattacagacgaacagaaggaagaaagcgacgacgtcgaacaacagtcgccggctgaacatacttcttctgatagacgcgatcattcgccagacaagcaacagaataagcgaaaatcgttaggcactgggaattcttcgtattcgaagaaaccattattggacggtgacaaaggagacccacgttcacatttatcgtctctgggaagtcgcagatccttaaagcgtaaatggccttttgattgtacagactctaagaaatttaaaccaaacttgcagagtgaggaagacaaatctgaggaggaaaaacgtgaagatacggaaagcgaatgctctgacgaagaagactcagatagttcaagtttcgatacagattcaaattcagattcagattcaaatttagatttagattccgattccgattcccattccgatttcgaatcatcttcaagttctgaggaatctgcccaggatccagctcctgaaggcgaaaccgatcaagatccagctcctgaaggcgaagccgatcaagatccagctcctgaaggcggagtcgatcaagatccagctcctgaaggcggagtcgatcaagatccagctcctgaaggcgaagtcgatcaagatccagctcctgaaggcgaatccgatcaagatctagctcctgaaggcggagtcgatcaagatccagctcctgaattcggaaccgatcaagatccacatccttattacaacgatcaggatccagctccttattacgacgatcaggatccagcttcttattacgacgatcacatttgtgattctgaggaggattataaaccatttatcttctcaaaggaaaggaagttcttgaaattcgtaacaaatcctttaggggatgataaatctagtttggaccttagcatacagctctataaggtatttggagcttacaaactggaagacgtatacagcagtattgatgaggaaggccaaccagaacaggacctgcaactgaagcagcaacagaaacatttaaaaaaatatcaaaagttgcaactggtggtattctggcaccaggagaaattcttttcaaaggagcaactgttgctatatgagtatctgaaactacttttgcagaaattctttccacaagagcaacaggagaaacggttgcaacaggagaaacttttgcaacaggagaaactcttgcaacaggagaaacggttgcaacaggagaaacggttgcaacaggagaaacggttgcaacaggagaaacggttgcaacaggagaaacggttgcaacagcagaaactcttgcaacagcagaaactcttgcaacaggagaaactcttgcaacagcagaaactcttgcaacaggagaaactcttgcaacaggagaaactcttgcaacaggagaaacaattgcaacaggagaaacacttgccacaggagcgacagttgcaacaggataaagtcttcctacagctacgacagttgcaacagaagaaagaactggaggagcagcgagagcgaaagcgccacctctttgagcaacagaaacagtttgtcctagaaaaattgcgccaacagaaggagcagcatcgtcgtcagcaaaatcgcgtaaaacgcgaacgtaaattgcgccagaaaaaggagaaacagcgcttggaatacgaacgattcttgaaggaatatagggaggactgtaaacgtcagttgcgtttgcagcgcgagcattatctgatcaagattaagcagctggagaaggccagtcagcgctcgttgaaggggaatcgaaagcacaagctgatgcaaaacgatatggtcagcataccggtggccaatttgaacggcggccttaaagcggccagcagcggttccggagttggtgtagtgacctccggcggcgtcgtatcctcggcggtgctggccaatgccccacgtgtatacctaacgccctcctccacattcatgaccaatcgccaaatggcgggagtggcgtccaccggaagaatgagcggacaagtcgtcggtggttcatctggcacagcctcaacagccggtaccgttcgctatttttcgcaattcagcaaaatgcaaacggccggcggacccagtttgcaaaggaaacttgccaacggggataccattgttctggcaaccggcagtaaaaatatgttccttactagcagcgaaaataaggctaatctgccgaccgtcgccagcaatggcaatggtctgatcacagccaaaatggatctattggaggaggaggtcatgcagtcgataactgtgattgatgacgatgacgaggagaaaaaggaagtcgctgaagacgaagaagagagcagcaataatgccaaacccattgaccttcaccagccaattgctgataatgagcacgagctggacattgtgataaacaatgtggtctgctcgtttagcgtcggctgtcacctgaagctgcgcgaaattgcgctgcagggatcaaatgtggagtaccgtcgcgagaacggaatggtgacaatgaagctccgccatccatacaccactgcctcgatttggtcgtcggggaggattacctgcactggtgccacttccgagtcaatggccaaggtcgctgcacgccgctatgccagatgccttggcaagctgggatttcccactcgtttcctcaactttcgcattgtcaacgtactgggcacctgcagcatgccgtgggccatcaagatcgtcaacttttcggagcgccatcgcgagaacgccagctacgagcccgagctgcatcctggagtgacttacaagatgcgcgatcccgatccaaaggccaccctgaagatcttctccaccggcagcgtaacagtcaccgcggctagcgtaaaccacgttgaatcggctatccagcacatatacccgctggtctttgatttccgcaagcaacgttcggcggaggagctgcagcatctgcgtcaaaagcagcgtctgcaagccggcggtgatccccacgaactggagaaaaatgtcttggccgataacaagactgcttcccttgataatatctttgttaatacaacagcggcgcactctaaatcatcgtcgaatgaccaaacatcagcacccgcgaccatcttgtccagcacagttgatagtatgcctcgtctgaaacagatggtcaactatcaccagatgatgaagcaaacccaggaagagcgccgccatataatgtttaatggggagaaggccaatccggcctccacctcatcggcggcagcagctccctccacctcctcctcatcgtcctcatccggggataatatctgtgccaatgcccgtcgccgggccaccgaatgctgggcaaccaagctgcagaataagcgtccacgttacaatgatcccggtaccacgggcacaattaacgccgcatcgtccacagcatcagccgccacatcttcgttagcctcccaggcgacacatctgcgtaatcctctcaagacggccgcgttggccaatgcacgtatgttaggcgccaaggtgacaacatgcacacgcaacagcataatcgtgcagcagccgcaacgtatccaaatgcagcagcagcagcaacagctgcaaccgcagcagcaacagaccagcttctcgcccagcgaattcgatgttgatgacttgatcgaggaggaggagaacaacgaattggatatgcccttctaa

SEQ ID NO: 1059 - protein, 1715 aa, DROSOPHILA
MGSAVKKGDGSPTRILEEYQVARDLRNEDLFPEHPVEHPDEDSDKENQSPNQSPNPRAIGDCEQGPDIGKDTLNPNEADQFSSEEVEKNEANSSCNESGGDARNSRDRLSSSHSEDEQLNQEYSTSSSGSTIGNREQGSDVGKDTSSRNEADQFSNEEVEKNEANSSGNESYGDACNSSDRLSSSNSEDEQLHQEYSTSSRGRTREYAQSDLNPGYQDLNIGNQDLNQVNREYQESNNEYQVSNQEYQHLNTEYQELNHGDQDSNDEYQELNHGNQDSNDEYQESNHGNQDSNDEYQELNHSNQDSNDEYQELNHGDQDSSDEYQDLNHVNQDSNHEYQAWNHEYQDSNHEYQALNREYQYPESDEEEAARKRNIYTRLRSYACQVHLPRLGESEVDSDDRRHNPINQPFNQPINRPNQKSDSSLESSSPERQDSESESRQASDEESSSGDSDYLIDPVTGWLSRRRETSTEREEKSDQSQQESSEEITDEQKEESDDVEQQSPAEHTSSDRRDHSPDKQQNKRKSLGTGNSSYSKKPLLDGDKGDPRSHLSSLGSRRSLKRKWPFDCTDSKKFKPNLQSEEDKSEEEKREDTESECSDEEDSDSSSFDTDSNSDSDSNLDLDSDSDSHSDFESSSSSEESAQDPAPEGETDQDPAPEGEADQDPAPEGGVDQDPAPEGGVDQDPAPEGEVDQDPAPEGESDQDLAPEGGVDQDPAPEFGTDQDPHPYYNDQDPAPYYDDQDPASYYDDHICDSEEDYKPFIFSKERKFLKFVTNPLGDDKSSLDLSIQLYKVFGAYKLEDVYSSIDEEGQPEQDLQLKQQQKHLKKYQKLQLVVFWHQEKFFSKEQLLLYEYLKLLLQKFFPQEQQEKRLQQEKLLQQEKLLQQEKRLQQEKRLQQEKRLQQEKRLQQEKRLQQQKLLQQQKLLQQEKLLQQQKLLQQEKLLQQEKLLQQEKQLQQEKHLPQERQLQQDKVFLQLRQLQQKKELEEQRERKRHLFEQQKQFVLEKLRQQKEQHRRQQNRVKRERKLRQKKEKQRLEYERFLKEYREDCKRQLRLQREHYLIKIKQLEKASQRSLKGNRKHKLMQNDMVSIPVANLNGGLKAASSGSGVGVVTSGGVVSSAVLANAPRVYLTPSSTFMTNRQMAGVASTGRMSGQVVGGSSGTASTAGTVRYFSQFSKMQTAGGPSLQRKLANGDTIVLATGSKNMFLTSSENKANLPTVASNGNGLITAKMDLLEEEVMQSITVIDDDDEEKKEVAEDEEESSNNAKPIDLHQPIADNEHELDIVINNVVCSFSVGCHLKLREIALQGSNVEYRRENGMVTMKLRHPYTTASIWSSGRITCTGATSESMAKVAARRYARCLGKLGFPTRFLNFRIVNVLGTCSMPWAIKIVNFSERHRENASYEPELHPGVTYKMRDPDPKATLKIFSTGSVTVTAASVNHVESAIQHIYPLVFDFRKQRSAEELQHLRQKQRLQAGGDPHELEKNVLADNKTASLDNIFVNTTAAHSKSSSNDQTSAPATILSSTVDSMPRLKQMVNYHQMMKQTQEERRHIMFNGEKANPASTSSAAAAPSTSSSSSSSGDNICANARRRATECWATKLQNKRPRYNDPGTTGTINAASSTASAATSSLASQATHLRNPLKTAALANARMLGAKVTTCTRNSIIVQQPQRIQMQQQQQQLQPQQQQTSFSPSEFDVDDLIEEEENNELDMPF

SEQ ID NO: 1060 - DNA, 3135 bp, DROSOPHILA
agtcaaacacattgcggtaacactggcgattgttgccaagcgcttttggccacaccacaaagtccagcttttcagtccgatctagatataaatcaacttggccatgcacatgcagaacgcaaatccagctaaaaggcaaacaaacggctttacaactttacaacttgaagaggggagtgaaaagttaacaacgctcatttggcgaatttcccaagatatgttcggattttcagcagagggcgaccgcccagttatccatcacaatcgacagtttccacgggcttttcacactggaaaaatcaaaaagacaataaagacgaggcttttgccaatttcttccacagggtgttgtagttactttctatttctgttttttagcttaggccaacattattggcatacaatactattattcaatctattttatatcccgttttatttgtattttccatacattttccttttttcctactcttaaactaaactattgccattaaaattgcatcatgctctgcagaactaattggtaattcctggtttcgatagatcccctcccagatgaggatacctctgcgctgaggctggattacagctgaaaaacttttgaaataattaaaaaatattttcgtcttgggcttgggcctggtgcaggcagaaacggtggaactaagtgcatatagcatatattcgtatatatagaaagcaaaagttggcgctccaagcgaaagagatcgaaactggtaaaacgacttggcaacacgaccgcgataccaatactcgcccaaagttgacttattggagcacttagctcgattcttgttattgttacgccgacttggccgacttgttgttgccgttaacgttaatagtaccaacacaattacatagcttggagtgcctaggcggagtcgatcggcgatccagcgatccaaggttcccgctcggactataaaaagcttgggcggcaccgttgcggaaggcagttaactccacaaatccgttgccgtcggtcccatttccctcttaaccgacttgtaagcgtaaaggcgcgtgtgaatccccctcgagaagaagataaaattgtgtgcagtttacgcttgacaaggatattccccacaccaaaatgttcagatttgtgagttgtgttttattcaaggctgttcgaacaatttaaaagctattaagagaaaagtaatcaaactgacggacaaaagtgtcaattcaaaccaggatattctagagtacacattaaatagtgaaagtcttaccttataatacgttaagtgataatgactcagattaaggaattggcagcacacaaatacttgattgtacaataaattttgaattcttgacagcttgcactgaccaccttggtggccctggcttccagccagcactatcaccaggatcccaaaacggcggccatcatcagtgagcagcgttatctgtccggagatggaaagttcggagctgcctatgagcaggaggatggcatcaacttcaaggaggagacggatgcggatggaacacgtcatggcagctacagctatctggatcccacgggccagaggcgtactatttcgtacacagctggcaaaaatgggtaagcactttctatagaacaaatacccgaacttgtattaatttggtttttattccgaaatagtttccaagcttctggagatcacttgccccaggcaccacctgctccaccacagcccgtgcccacagcgggatatcagccacagcagcagtaccagccgcagcagtaccaggctcccgctccccagccgcaggccagtttccgcagcaatgactacggagatgatggttcctacgatccccgctacaacgatccctctttcggacagaaccagcagagctaccagcagcccgctgcccagccgcagtaccgtcctgctccccagcccgcctacaacccacagcccgtgcagccgcagcagcagtaccagcctcagtatcagcagccccaaccccagtatcagcagccgcaaccccagcaggcgtactacaccaccaccacccccaacccacaccgcttttcgccacccggcaaactgtccctgaaccgcacgcccgatggcttcacctactccttcaacaaggtataagccccactgtcctccactcagacattatgcatcttcttcattagtagggatcctctttcttcttttccaactttccctatcacaactagaacccctactcttttcttgactccatcaaactctcgtgtgatatgtttaagagcaattgtatcgtacttcctatatgcgtactgtttgttattaatttataatcctacacagagaaaattaatcgctgctgcccaatgggtattgctgatttaaattacaaaatatattcaaaatatcatttgcatatttttgaaatatgaaaaaactcaagaaatgtcggcctttttctctgtgactttcccattaaactttaatctttccatttaagtcttcccaagaaaagagaagtcaataaacttcgatgatgttgaaaaatgatcaaaattaatttagaaactatgttaatttgggccttgggacgtctgagcaatttgtactataatcgagtaaaaacaatatatgaaggaaaccaagttcgtgtcctgcagtcttttgtttttcggccagtggccgcttatttaatttccagcagatttatctaaacacctcgggtggtgaacgcccactaaatgcggcattacacaaccgactttcgtacgtgcaaaacaagtttcgagtttctgttacgattctatgcggccaacaaggaaagacctcaaacgggtttcgctcatttgacagtaatcttggccaattgtgcaaaattccgatgaaaatgaaatcagcctggtgtgctggtgctggctaagccggaaaaccatgtgcaagtgggggtggcactggttcattaggggattggggctctaaatcaattcccaatggtattgcgatccgtcaggctccagttgcgttagtgcaacttaataacatccaaatgttttgcatattttatgcaccatcgaacgcaagaatgccgccagctaatttgctatttcctctcacctgctgagttctcagcatatgtgtgtta

SEQ ID NO: 1061 - DNA, 849 bp, DROSOPHILA
ttgccgtcggtcccatttccctcttaaccgacttgtaagcgtaaaggcgcgtgtgaatccccctcgagaagaagataaaattgtgtgcagtttacgcttgacaaggatattccccacaccaaaatgttcagatttcttgcactgaccaccttggtggccctggcttccagccagcactatcaccaggatcccaaaacggcggccatcatcagtgagcagcgttatctgtccggagatggaaagttcggagctgcctatgagcaggaggatggcatcaacttcaaggaggagacggatgcggatggaacacgtcatggcagctacagctatctggatcccacgggccagaggcgtactatttcgtacacagctggcaaaaatggtttccaagcttctggagatcacttgccccaggcaccacctgctccaccacagcccgtgcccacagcgggatatcagccacagcagcagtaccagccgcagcagtaccaggctcccgctccccagccgcaggccagtttccgcagcaatgactacggagatgatggttcctacgatccccgctacaacgatccctctttcggacagaaccagcagagctaccagcagcccgctgcccagccgcagtaccgtcctgctccccagcccgcctacaacccacagcccgtgcagccgcagcagcagtaccagcctcagtatcagcagccccaaccccagtatcagcagccgcaaccccagcaggcgtactacaccaccaccacccccaacccacaccgcttttcgccacccggcaaactgtccctgaaccgcacgcccgatggcttcacctactccttcaacaaggtataa

SEQ ID NO: 1062 - protein, 241 aa, DROSOPHILA
MFRFLALTTLVALASSQHYHQDPKTAAIISEQRYLSGDGKFGAAYEQEDGINFKEETDADGTRHGSYSYLDPTGQRRTISYTAGKNGFQASGDHLPQAPPAPPQPVPTAGYQPQQQYQPQQYQAPAPQPQASFRSNDYGDDGSYDPRYNDPSFGQNQQSYQQPAAQPQYRPAPQPAYNPQPVQPQQQYQPQYQQPQPQYQQPQPQQAYYTTTTPNPHRFSPPGKLSLNRTPDGFTYSFNKV

SEQ ID NO: 1063 - DNA, 4488 bp, DROSOPHILA
ataccaaattgttcccgtatactgattacttactggcgtttcatagataaatattgcaaaattggctcttcaaaatgaaaattccaagtttccattttaaaatgaatatatttttgtttgcaaattgtttgcgtttcgacaaatatagcaataagttacgactacatattagaaataataataattaacatttaatgagcgaccgctgctgttgattttgctgcttagcgaacgcggcccgaaaaaggagaaacttaacaagaaaaaaacagaacaagttatttaaataccaaatatatacatagatatatgcgtgtgaaactgactcgggtctcctcctaccgccgtcataacaaacaatacataattcgctatcgccgcgactctcttctcgcattctcttcggctggcttgattttctgttattacataatattattgactaaattgtagatcaacgaatgtctgtttttccatctccattgggcaccaccagcaaatagctttaagcatcgtaagtatcgaaaatgggtgcttaacttgaccgcaagactatcataagggcgacaaattcagtttaaggttttcgattgatgcgacaatgttaaaacaattgaatattaatgcacagttgtgcggatatgaactgaatattttggatatgtgtgcaacatagcccgaaaaacatgtaaaacctatctatatatgtatgtaaataaaatataaagtattattcctcagctctgacgtaatgaatgatgatatgaataactgctaaggacatgctcttttgctttcctaaaaactatataataaggtaaacagggaatagtttaaatatctaaacataatttcaaattattgcaacaggatatacatatgtgaatatgtcttccccaagtatgacaatcttgcagttcgctattttgatttgggctaactatttggtggtaatgctggacagccagtggtgctgctgatgttattggtgttgcaggcgctagttggacttggtcagctcagtgcggttggcggccacttcggccagaatgagtagatctgaggtagaggaggtcacgtcgaaggccgcctgcgaggagagcgaggaggatgacgacgaggagttcgaagagagcggtggcgaggccgacgacgaggttacaggggcattcaccgccttgggagcaccgctctggttaaagtagtagctgccattgatggtcaggggcagaattgaggccacctcctgttcaatggcactaacatcgcgccgggtgatactttccttgcgcgcctttcgtcgctggcttcccacagcctgcagttgctgctgcttgatcctcacgtgttgctcgctagataatgggacagcacctttcgccgcagcatctgctgctgccacattcgaagttgctgatgcaccacttgtgctgttcgaattcctctgtttcttggtgccgctaaacttcttcttctttttggtgctacgtttgcgctgcaggtaagcgtccaagctgagggctggcagctctttgattttctcctcgagatcaaagaaaccactgctgcttgactcggaaacgcttcttatatgtttttgcatggaatccggactgctaccctgacgttccggtggcgaaacgggcggtgtattgggtcccgcatccaaggggatgtccacaaagtttccacccatgttacctgccggcggcaagcgagctttgctcttcttagctatggccgccaattgaccggaattgaccaattcctggtaaatcttgcccttgcaggagcgtgatgacttgaccttcttgtttggcgagctaccactggccgcctcctcctcgctggagttgctcgagttgttgtcctgcaaggagcgcttattgccattcccatttgtattgccagctggcatatgggcagatagaaactggctggtctcgctgagcacctgctgtagggcgaagtccttttcttgtacttgaacttgcagtagggagcttagctcgcccatctgcgtttcgtctgccagtttaaagtagttggggcgcagcatagcacgcggcatctcccctcgctctgcccactgcacttgcagtgaagtcggcacctgctgctgtggctgatcttcactgggtatgagcaagccagcagacgcgttgctgggacgggtagctagcgttcgcagcggcggagctggcagtttgtaccacttgaagtttggattagcattgaagaaggcgtccttgttctacaaaagaaaattaattagcttgctaaacttatagaactcaaagcccagcaggcatgttcagcagaagtgaagtatgtgcacgggtaaatattgtatgatccccacctgctgtgccagatccgtgaagcagtgtttctcctgctcgtcgagagcggcccaccagtcgccaagtatctttgtaatggcactaaaagaggtaaacaacgagtgagtaatctttccggaacctaaatgggtgcagctggaaaaaaacccaccggttctccaaagttttgtaacgctccttgacgataccgcgatgtctcttgcagaatatgaggaaggcattcatgggtcggcgggcatgatgctccggccgtgtgttatccgctgtctcatcctgctgaagctgtcgcggctctacttgatggctatactgatcctgctcctgctgcggcactgtgaccacgtccacgtccacatgctcttcggcggcctcgcgacgaatgcgcgtgacctcctgctgcacaggcaactgcacttggatctccgcctcctcctcatcatcctcctcttcatcgagatcttcctcttcgtcgtcctcgtcgtcagtgtcgctgctgcagtcctgcaacttggcatagttgtgcacatcctcgatgcgccgaaaggcattttcttggtcttcggtgcgctgcggctgggggtcacctaaggcacttttggcaactttaccaggcgatccttgtgattcaccttctctgactaatgttttagcttctgcttctcctgcgctcgatggtttgtctttggtcctggatatggggagccagcggagttcgcttgctcccatttgggataccatctttgcagcagctgtcaggaattctcctgatctttgggaaagttctctggatatcaaaaagtccctggacaagcccgaaacgtaagatgccgctgccggagaatatccctcaaggcttcttgctccttggttgccgctcgttgtggcgattactccacttgctcccggtatcttctcaactattttcagcgctctgcctgtgtagttcttgttgttcctcattttcgtctccgatgttttaaggccactgtagttgctgttgctgatgttgctgctgctactgttgttgctgttgttgttgtaggcaaagtgcaatttaattgcagcacctgttggcgtcacctgcgccacctgctgaccaccgccaacgctcaggccgttgatcatgttcttagctttcgttttccacctacttgtctagtcccgatcctcaaacatattacgctgcaagtatggaaaaatgtcactgttttttagtgggtaaatttcacaaatgcaagaaaatggcgctgccagtgtgtctggaaaataaaaaaaaactaattggcagctctggtttttgcgatattgagttgtttacaaatttccagtgcgagagcaagacagatcagctgtgcgtgtgtgtttgtgcgtgctgtggcgcctgttcggatagctctttctctttttttctcaagcaaaacttcgttaaacaaaaataaatcgcacacaaataaagctatattttttttcattattatgaaattcacgtcaatccatacatacaagtaaggcaaaaatatcacagtctatcaaacaaaagcataaaaataattgcaaaataaataaacaaagaaacagctaagggaatgcactcaaaaagagttacggctacttattgactttcaatacttttcaacactacttgtgaaggttaacaacgggaaaaattttattatggtcaatttgatgagcctattatgattaagaaccttataaatgcatacgcttcctgcaccttgtccaattgaaaaagttgaaaagcttgagtttcgttgacaaaaaaaggttgtattgaaatacacaaaaattcacccgctttctttattaacaacgaacattatcagtgctttttgtgcataagatacatactatcaatactgcctgcaaaatttaataacagttttaattatcgataaatacttgttttttgtactgctattgcacaattatgtgacaaactaaacacacaaataaagaaatgaaaaaaggaaaacaaaaaaaaaaaacaaaaaacaggctacgtgtacagctgagcattagctcgcatgtgcgagtgtgtgcgagcgggagagcgctcgagaagtgcgttagcttctctctttttcgcaaagttcgctttgaactt

SEQ ID NO: 1064 - DNA, 2310 bp, DROSOPHILA
atgatcaacggcctgagcgttggcggtggtcagcaggtggcgcaggtgacgccaacaggtgctgcaattaaattgcactttgcctacaacaacaacagcaacaacagtagcagcagcaacatcagcaacagcaactacagtggccttaaaacatcggagacgaaaatgaggaacaacaagaactacacaggcagagcgctgaaaatagttgagaagataccgggagcaagtggagtaatcgccacaacgagcggcaaccaaggagcaagaagccttgagggatattctccggcagcggcatcttacgtttcgggcttgtccagggactttttgatatccagagaactttcccaaagatcaggagaattcctgacagctgctgcaaagatggtatcccaaatgggagcaagcgaactccgctggctccccatatccaggaccaaagacaaaccatcgagcgcaggagaagcagaagctaaaacattagtcagagaaggtgaatcacaaggatcgcctggtaaagttgccaaaagtgccttaggtgacccccagccgcagcgcaccgaagaccaagaaaatgcctttcggcgcatcgaggatgtgcacaactatgccaagttgcaggactgcagcagcgacactgacgacgaggacgacgaagaggaagatctcgatgaagaggaggatgatgaggaggaggcggagatccaagtgcagttgcctgtgcagcaggaggtcacgcgcattcgtcgcgaggccgccgaagagcatgtggacgtggacgtggtcacagtgccgcagcaggagcaggatcagtatagccatcaagtagagccgcgacagcttcagcaggatgagacagcggataacacacggccggagcatcatgcccgccgacccatgaatgccttcctcatattctgcaagagacatcgcggtatcgtcaaggagcgttacaaaactttggagaaccgtgccattacaaagatacttggcgactggtgggccgctctcgacgagcaggagaaacactgcttcacggatctggcacagcagaacaaggacgccttcttcaatgctaatccaaacttcaagtggtacaaactgccagctccgccgctgcgaacgctagctacccgtcccagcaacgcgtctgctggcttgctcatacccagtgaagatcagccacagcagcaggtgccgacttcactgcaagtgcagtgggcagagcgaggggagatgccgcgtgctatgctgcgccccaactactttaaactggcagacgaaacgcagatgggcgagctaagctccctactgcaagttcaagtacaagaaaaggacttcgccctacagcaggtgctcagcgagaccagccagtttctatctgcccatatgccagctggcaatacaaatgggaatggcaataagcgctccttgcaggacaacaactcgagcaactccagcgaggaggaggcggccagtggtagctcgccaaacaagaaggtcaagtcatcacgctcctgcaagggcaagatttaccaggaattggtcaattccggtcaattggcggccatagctaagaagagcaaagctcgcttgccgccggcaggtaacatgggtggaaactttgtggacatccccttggatgcgggacccaatacaccgcccgtttcgccaccggaacgtcagggtagcagtccggattccatgcaaaaacatataagaagcgtttccgagtcaagcagcagtggtttctttgatctcgaggagaaaatcaaagagctgccagccctcagcttggacgcttacctgcagcgcaaacgtagcaccaaaaagaagaagaagtttagcggcaccaagaaacagaggaattcgaacagcacaagtggtgcatcagcaacttcgaatgtggcagcagcagatgctgcggcgaaaggtgctgtcccattatctagcgagcaacacgtgaggatcaagcagcagcaactgcaggctgtgggaagccagcgacgaaaggcgcgcaaggaaagtatcacccggcgcgatgttagtgccattgaacaggaggtggcctcaattctgcccctgaccatcaatggcagctactactttaaccagagcggtgctcccaaggcggtgaatgcccctgtaacctcgtcgtcggcctcgccaccgctctcttcgaactcctcgtcgtcatcctcctcgctctcctcgcaggcggccttcgacgtgacctcctctacctcagatctactcattctggccgaagtggccgccaaccgcactgagctgaccaagtccaactag

SEQ ID NO: 1065 - protein, 769 aa, DROSOPHILA
MINGLSVGGGQQVAQVTPTGAAIKLHFAYNNNSNNSSSSNISNSNYSGLKTSETKMRNNKNYTGRALKIVEKIPGASGVIATTSGNQGARSLEGYSPAAASYVSGLSRDFLISRELSQRSGEFLTAAAKMVSQMGASELRWLPISRTKDKPSSAGEAEAKTLVREGESQGSPGKVAKSALGDPQPQRTEDQENAFRRIEDVHNYAKLQDCSSDTDDEDDEEEDLDEEEDDEEEAEIQVQLPVQQEVTRIRREAAEEHVDVDVVTVPQQEQDQYSHQVEPRQLQQDETADNTRPEHHARRPMNAFLIFCKRHRGIVKERYKTLENRAITKILGDWWAALDEQEKHCFTDLAQQNKDAFFNANPNFKWYKLPAPPLRTLATRPSNASAGLLIPSEDQPQQQVPTSLQVQWAERGEMPRAMLRPNYFKLADETQMGELSSLLQVQVQEKDFALQQVLSETSQFLSAHMPAGNTNGNGNKRSLQDNNSSNSSEEEAASGSSPNKKVKSSRSCKGKIYQELVNSGQLAAIAKKSKARLPPAGNMGGNFVDIPLDAGPNTPPVSPPERQGSSPDSMQKHIRSVSESSSSGFFDLEEKIKELPALSLDAYLQRKRSTKKKKKFSGTKKQRNSNSTSGASATSNVAAADAAAKGAVPLSSEQHVRIKQQQLQAVGSQRRKARKESITRRDVSAIEQEVASILPLTINGSYYFNQSGAPKAVNAPVTSSSASPPLSSNSSSSSSSLSSQAAFDVTSSTSDLLILAEVAANRTELTKSN

(The sequence listing continues in the following parts.)
